United States Patent Application Publication US 2019/0348154 A1 - sequence listing, part 90

SEQ ID NO: 338429 - DNA, 831 bp, Pseudomonas aeruginosa
atggagcaggaagacgataagcagtactcccgagaagcggtgttcgctggcaggcgggtatccgtggtgggctcggacgcccgctcgcggggtcgggtgccgggttacgcatcgagcagtttgtatcgtgagtccggaatcatcagtgcgcggcaactggcgttgctgcagcggatgctgccgcgcctgcggctggagcaactgttccgctgcgagtggttgcagcagcgcctggcgcgcggcctggcgctggggcgcgaagaggtgcggcagattctcctctgcgcggcgcaggacgacgacggctggtgcgccgaactgggcgaccgggtcaacctcgccgtgccgcagtcgatgatcgactgggtcctgctgccggtctatggctggtgggaaagcctgctcgaccaggcgatccccggctggcgcctgtcgctggtggagctggagacccagtcccggcaactgcgagtcaagtccgaattctggtcccgcgtggccgagctggagccggagcaggcccgcgaggaactggccagggtcgccaagtgccaggcgcgcacccaggaacaggtggccgaactggccggcaagctggagacggcttcggcactggcgaagagcgcctggccgaactggcagcggggcatggcgacgctgctcgccagcggcgggctggccggcttcgagccgatccccgaggtcctcgaatgcctctggcaacctctctgccggctggacgacgacgtcggcgcggcggacgccgtccaggcctggctgcacgaacgcaacctgtgccaggcacaggatcacttctactggcagagctga

SEQ ID NO: 338430 - DNA, 423 bp, Pseudomonas aeruginosa
atggatcatctgttgagcggattggccactcgcctgggccaagggccctttgttgccgatcggatgggttcgtaccacctgcgcatcgacggacagagcgtcctgttgctgcgccagggcgacgacctgctgctggaaagcccgctggagcacgcccccctggacccgcagcgcgaccagctggggttgctgcgggcgctgttgtcgcgggtcgccagttggagccggcgctatccccaggccattgtcctggacgcggacgggcgcctgctgttgcaggcgcggctgggcctcgacggcctcgatcccgagcgactcgaacgggccctggccgcccaggtggggctgctcgaggcgctggcgccggagctggagccgctgccccgcgggttgccgccgcaggttccggtgtggcgtccctga

SEQ ID NO: 338431 - DNA, 1803 bp, Pseudomonas aeruginosa
atgcgccgcctgctaatcggcggactgctggcgctgctgcctggcgcggtcttgcgcgcgcagccgctggactggcccagcctgccttacgactatgtggcgcagggcgaaagcctgcgcgacgtgctggccaacttcggcgccaactacgatgcctcggtgatcgtcagcgacaaggtcaacgaccaggtcagcggtcgcttcgacctggaaagcccgcaggccttcctgcagttgatggcctccctctacaacctcggctggtactacgacggcaccgtgctgtacgtattcaagaccaccgagatgcaatcgcggctggtgaggctggagcaggtcggcgaggccgagctgaagcgcgcgctgaccgccgccggcatctgggaaccgcgcttcggctggcgtgccgacccttccgggcggctggtgcacgtgtccggtccggggcgctatctcgaactggtcgagcagaccgcccaggtgctggagcagcaatacaccctgcgcagcgaaaagaccggcgacctcagcgtggagatcttcccgctgcgctatgcggtcgccgaggaccgcaagatcgagtaccgcgacgacgagatcgaggcgccgggcatcgccagcatcctctcgcgggtgctcagcgatgccaacgtggttgcggtgggcgacgagccgggcaagctgcgcccgggaccgcaatcgagccatgcggtggtccaggcggaaccgtcgctgaacgcggtggtggtgcgcgaccacaaggaccggttgcccatgtatcgccgcctgatcgaagccctcgaccggccctcggcgcggatcgaggtcggcttgtcgatcatcgacatcaatgccgagaacctcgcccagctgggcgtcgactggagcgccgggattcgcctgggcaacaacaagtcgatccagatccgcaccaccggccaggatagcgaggagggcggcggcgccggtaacggggcggtcggcagcctggtggacagtcgcgggctggatttcctgctggccaaggtcaccctgttgcagagccaggggcaggcgcagatcggatcccggccgaccctgctgacccaggagaatacccaggcggtgctcgaccagagcgaaacctactatgtgcgggtcacgggcgagcgggtggccgagctgaaggcgatcacctacggcaccatgctgaaaatgacgccgcgagtggtgactctcggcgatacgccggagatcagcctcagcctgcacatcgaggacggcagccagaaacccaacagcgccggcctggacaagatccccacgatcaaccgcacggtgatcgataccatcgcccgcgtgggccatggccagagcctgctgatcggcggcatctaccgcgacgaactgagccagagccagcgcaaggtaccctggctcggcgacattccctatctcggcgcgctgttccgcactaccgcggacaccgtgcgccgctcggtgcggctgttcctcatcgagcctcggctgatcgacgatggcgtcggccattacctggcgctgaacaaccgtcgcgacctgcgcggcggcctgcttgaaatcgacgagttgtcgaaccagagcctgtcgttgcgcaagctgctcggtagcgcccgctgccaggcgctggcgccggccagggccgaacaggagcgcttgcgccaggccggccagggttcgttcctcacgccctgccggatgggtgcgcaggagggctggcgggtgaccgacggcgcctgtcccaaggacggcgcctggtgcgtcggcgcggagcgcgggaattag

SEQ ID NO: 338432 - DNA, 1299 bp, Pseudomonas aeruginosa
atggcctggaagatccgcttctacagcgggctgaaccagggcgccgaagtctcgctcggagagggccgggtggcgcttggcagcgatccgttgcaggccgacctggtgttgctcgacgagggcatcgcggcagtccacctggtgctcgaggtcgatgcccagggcgtgcgcctgctggagtgggcggagggctgcgagcctcgccaggacggccaggcgcaagtcgccggagcgatcctgcaggcgcttgccgggcagacctgcggcccgctgcgctgggcattctgcgacccgcagcggagttttcccgagcgtttccccgaagccgaggtgcagaccgcgccagtgcgccgcaagtcgtccgcccgtgccggcggggcctggctgctcggcgtcagcctggcgctggcgctgtgtctgctgggcatgctcgtcgaaccctggtcggcccgccagcacggcatggccggcgaggagcccctggcgaaggtgcgcgcctacctgcgcgagcagggcatgagcgaggtggatgtgcagcgccagggcgacagtctcctgctcggcggctacctggaggacaacgcccggcgcctggcgctacagcgctacctcgatggcagcggcgtggactaccgactggaagcacggagcatggaagacattcgccagggcgtggatttcatcctgcagaaattcggctatcggcagatcctcagcagcaacgcggacaagcctggctgggtccggctcaacggcgaactggcggaacaggacgaacgctgggcgcggatcgacgcattgctggagtccgaggtgccgggcctgctcggggtggaaaaccaggtccgggtggccggctcgcacctgcgccgcctcgagcgcctgctggcggacgccggcctcgaccggcaactgagtttccgcgagcgcggcgagcgcatcgagttgagcggcacgctcgacgaggtccagctcagcgccttctaccgcctgcagcgcgagttccagcaggaattcggcaaccgcccgagcctggagctgctcagtcgcggcaagcgcgccagcggcgacgaactggagttcacgattcgctcggtgtcgctggggcgggtgccctatgtagtgctcggcgacgggcagaaatacccggtgggcgcctcgacatcccgcggtgtgcgaatcctcgccatcgagccggagtcgatcctggtggcccgcggcaagcagcgtttcatcatcaatctcaaaggggaggtgctccatgatgacagccttggaaacgcgactgtcggtcgctga

SEQ ID NO: 338433 - DNA, 258 bp, Pseudomonas aeruginosa
atggcgcagatattcaaccccaacccggggaataccctcgataccgtggccaatgccctgaaggagcaggccaacgcagcgaacaaggacgtcaacgacgcgatcaaggccttgcaggggaccgacaatgccgacaacccggcgctgctggccgagctgcaacacaagatcaacaagtggtcggtcatctacaacatcaactcgacggtgacccgggcgctgcgcgacctgatgcaaggcatcctgcagaagatctga

SEQ ID NO: 338434 - DNA, 348 bp, Pseudomonas aeruginosa
atggacactccactgatacgcgaattggcggaactggcgctggccggcagcgggcagcactgccacgaagaggcgctgtgcatcgccgagtggctggagcgcctcggacaggacgaagcggcacggctgatccggatttccagcctggccaaccaggggcgctatcaggaggccctggtcttcgcccatggcaatccctggccggcgctggagccctggttcgccttgtgcgagtggcacctggggctgggcgccgcgctggaccgcaggctggccgggctgggcggcagcagcgatcctgccctggccgacttcgccgccggcatgcgcgcccaggtgcggacatga

SEQ ID NO: 338435 - DNA, 432 bp, Pseudomonas aeruginosa
atgagccgcatcgacacgccaccgggattcgccgtctatccgtcggccagtccaaaggcggcgaacctgccggctgtcgatcaggtgctggctttcgagcaggccctcggcggcgagccgccggcggccggacgccgcctggccgggttggagaacggcgctctcggcgagcgcctgctgcagcgctttgcccagccgctacaagggttggaggcggaccgcctggagctgaaggcgatgctccgtgcggaactgccgctggggcgccagcagcaaacctttctcctccagttgctcggtgcagtcgagcatgcgccgggcggcgaatacctggcgcaactggcgcgtcgcgaattgcaggtgctgatcccgctcaacggcatgctcgacaacctcgtgcgcaacagccacaaactcgacctggagtcatga

SEQ ID NO: 338436 - DNA, 339 bp, Pseudomonas aeruginosa; identical to SEQ ID NO: 319106

SEQ ID NO: 338437 - DNA, 735 bp, Pseudomonas aeruginosa
gtgaaaggtctgtcgcgcatggcgctcctggcgctggtcctggcgttgggcgggtgcaaggtcgaactctataccgggatcagccagaaggaaggtaacgagatgctggcgctgttgcgttcggagggcgtttccgcggacaagcaggcggacaaggatggcaccgtgcgcctgctggtggaggaatcggatatcgccgaggcggtggaggtgctcaagcgcaagggctatccgcgggagaacttctccacgctgaaggatgtgtttcccaaggacgggctgatttcctcgcccatcgaagagcgcgcgcggctcaactacgccaaggcccaggagatttcccataccctttccgagatcgatggcgtgctggtggcgcgggtccatgtggtgctgccagaggagcgcgacggactgggcaggaagtcctcgccggcatcggcctcggtgttcatcaagcacgccgccgacgtgcaactggatgcctacgtgccgcagatcaagcaactggtgaacaacggcatcgaaggactcagctacgaccgcatcagcgtggtgctggtgccgtcggccggggtccgccaggtcccgctggcgccacgcttcgagagtgtcttctcgatccaggtggcggagcactcgcgcggacgcctgctcggcctgttcggcctgctgctggcgttgctgctggcgagcaacctggcgcagttcttctggcaccggcaacggggctga

SEQ ID NO: 338438 - DNA, 621 bp, Pseudomonas aeruginosa
atgccattgacggcctaccagttgcgcttctgcccggcccgctacatccacgagtcgcacctgcccgcggtattgctgcggttgctgccggcgctgccggactggcggcgacagagcgttctcaacgcctggctgctggagcaactggaattggactgcgcgttccgcatgcccgcgcaactgggcgggctggccctttacccgcaggcggcgctggaacggaccctgggctggctcggcgcgctgctgcacggccaggccttgcggcaggtgctggacggtgcgcgggtacggcgcatccgcgcgcagatcggcgaacagggccagcgtttctgcctggagcagctcgacctgctcatcggtcgctggccgcccggctggcagcgggccttgccggaaaacccggaagaaggctatttccggcgctgcggcctggctttctggctggccgcctgtagcgatgccgactgcggtttctcgcggcgcctgcgcctgcgcctggaggccatgccggccccggcggactggaccttcgacgaacaacggcgatccctggcgcggaccctgtgcctgaaggtcgcccgacaagcgagcgatgaatgcttccatttgttgaactag

SEQ ID NO: 338439 - DNA, 645 bp, Pseudomonas aeruginosa
atgcttccatttgttgaactagacgccagtcgcgtacggctgacccccgggcaggccctgttgcgcgcccgcgactaccaggactacctcagcgccaaccgcctggtggaagcggcccgcgagcgtgccgccgaaatcgagcgcgaggcccacgaggtttaccaggagcagaagcgcctgggctgggaggccggactggaggaggcgcgtctgcgccaggccgggctgatccaggaaacgctactgcgctgcaatcgctactaccggcaggtcgatcgccagcttggcgaggtggtgctgcaggcggtgcgcaaggtgttgcgccactacgacgctgtcgagctgaccctggcggccacgcgcgaggcactggcattggtgagcaaccagaagcaggtgatcctgcacgtccagccggaacaactggccgcggtgcgcgagcaggtcgcccgggtgctcaaggatttccccgaggtgggctacctggaagtggtcggcgatgcccggctggaccagggcggttgcatcctggaaaccgagatcgggatcatcgacgcttcgctcgacagccagttggcggcgttgcaggccgcattgacggagagcgtggcgcggagcggcgaggaggaaggggacgccggttga

SEQ ID NO: 338440 - DNA, 2295 bp, Pseudomonas aeruginosa
atgaacaggctgtgtgtactggggcttctcatcgggctgagcgggagcccggcactggcggctggccagggcgaatccggcaatccaccggctaccgacaaggagcgtttcatcgccagcctgatggctcgcatgagcaacgcggaaaagatcggccagctacgcctggtcagcgtcggcgccgaccatcccaaggaagcgctgatggcggacatccgcgccggcaaggtcggcgccatcttcaataccgtgacccgcccggacattcgcgccatgcaggatcaggtccgccatagccgcctgaagatcccgctgttccatgcctacgacgtggcccacggccaccgcaccatcttccccatcagcctcggcctggccgccagctgggaccccgaggtggtcgcccgcagcgcgcggatctccgccctcgaagccagcgccgacgggctcgacatgagcttctcgccgatggtcgacatcacccgcgacgcgcgctgggggcgggtctcggaaggcttcggcgaagacacctacctgacctcgctgctgtccggcgtgatggtccgtgcctaccagggctccaacctggccgccccggacagcatcatggcggcggtcaagcacttcgccctgtacggcgcggccgaaggtggccgcgactacaacaccgtggacatgagcctgccgcgcatgttccaggactacctgccgccctacaaggccgcggtggacgccggcgccggcgcggtgatggtctcgctgaacaccatcaacggcgtgcccgccaccgccaaccgctggctgctgaccgacctgttgcgccagcagtggggcttcaaggggctgaccatcagtgaccacggcgcggtgaaggaactgatcaagcacggcctcgccggcaacgagcgggacgccacgcgcctggcgatccaggccggtgtcgacatgaacatgaacgacgatctctactcgacctggctaccgaagctgctggcggccggcgagatcgaccaggccgacatcgatcgcgcctgccgcgacgtgctggcggtgaagtacgacctcggcctgttcgccgatccctaccggcgcctgggcaagccggacgacccgccgttcgacaccaacgccgagagccgcctgcaccgccaggccgcccgcgaggtggctcgcgaaggactggtcctgctgaagaaccgcgacggtctgctgccgctgaagaaacaggggcggatcgccgtgatcggccccctggccaagagccagcgcgacgtcatcggcagttggtcggcagccggcgtgccacgccaggcggtaaccgtctaccagggcctggccaatgccgtcggcgagcgtgccaccctgctctacgccaagggtgccaacgtcagtggcgaccaggcgatcctcgactacctgaacagctacaacccggaagtcgaggtcgatccgcgctccgccgaggcgatgctcgaggaggccttgcgcaccgcgcgcgacgccgacctggtggtcgccgtggtcggcgaatcgcagggcatggcccacgaggcctccagtcgcaccgacctgcgcatcccggccagccagcggcggctgctgaaggcactgaaggccaccggcaagccgctggtgctggtgctgatgaacggccgaccgctgtcgctgggctgggagcaggaaaacgccgatgcgatcctggaaacctggttcagtggcaccgaaggcggcaatgccatcgccgacgtgctgttcggcgagcacaaccccagcggcaagctgaccatgtccttcccgcgctcggtgggccaggtaccggtctactacaaccacctgaacaccggccggccgatggaccacgacaaccccggcaaatacacctcgcgctatttcgacgaagccaacggcccgctctacccgttcggctacggcctcagctacaccgagttcagtctctcgcccctgcgcctgtccagcgaacggctggcccgcggcgctaccctggaagcgcgggtcacgctcagcaacagcggcaagcgcgccggcgccacggtggtccagctttatctgcaggacccggtcgccagcctcagccgtccggtgaaggaactgcgcgggttccgcaaggtgatgctggagcccggcgaatcgcgggagatcgtcttccgcctcggcgaggcagacctgaagttctacgacagccagctcaggcacacggccgagccgggcgagttcaaggtcttcgtcggcctggattcggcgcaaaccgaaagccgcagcttcaccctgctctga

SEQ ID NO: 338441 - DNA, 2058 bp, Pseudomonas aeruginosa
atgcttatcagcagctacaaccaggttcttgtcgccttttccctgattgtggccatcctggcgtcctacaccgctctcgacatggccggccgggtgaccctggcgaaaggccgcgaggcgctctcctggctgatcggcggcgctttcgccatgggcttcggcatctggtcgatgcatttcgtcggtatgctcgccttcagcctgccgatcccgctcggctacgacctgggcctgaccctgctgtcgctgctactggccgtcggcagttcggccttcgccctctggctggtgtgccaggcggaactcccctggcaacgcctggcgctgggcgccctgctgatgggcagcggcatcgccgccatgcactacaccgggatggccgccctgctgatgatgccggggatcgtctacgacccgctgtggctcggcctctccatcctgatcgcggtgatcgcctccggcgccgcgctgtggatcgccttccgcctgcgccatggcagccggcgcatcgtcctggtccggaccggcgccgccctggtgatgggctgcgccatcgtcggcatgcactacaccgggatggccgccgcgcagttccccctgggcagcttctgcggcgccgccggccgaggcatcgacaacggctggctggcggtgctggtcatcgtgatcaccctggcggtgatcgccatcgccctgatcgtctcggtgctggactcgcgcctggaggcacgtacctcggtgctcgccacctccctcgcacgagccaaccgcgagctgatccagttggccctgcacgacaacctgaccaagctgcccaaccgcatgctcctcgacgaccgcctggagcaggcgatccagcaggcgatccgcgacgatcgccggttcgccgtgctgttcatggacctggacggcttcaaggcggtcaacgatgcctacggccatcacctcggcgacctgttgctgatcgaagtcgccgagcgtatccgcgccaacgtccgcgcccaggacaccatcgcccgcctcggcggcgacgagttcgtcctgctgatcgaggcccgcgagcccgccgacgccgcgaccctggccgagaaactggtgaagcggatcagccagccgtaccagatatcccgccatgaggtgcggatctcggcgagcatcggcatcgcgctctaccccggcgacgggcagacccgccacgaactgatgatcaatgccgacgcggcgatgtatcacgccaaggaccagggacggaacggctactgcttcttcgagagttcgatgaacgccaacgcccaggaacagttgcaactgctccatgacctgcgccaggccctggagcgccggcaactggtcttgcactaccagcccaaggtactggcgccgaacggaccgatgatcggcgtggaagcgctgctgcgctgggagcatccgcaacacgggctgatcacccccggccagttcctgccgctggcggaaaagaccggcctgatcgtgcagatcggcgagtgggtgctcgacgaagcctgtcggcagatgcgcctctggctggacggcggacatgcggactggaacatcgcggtgaacctttcggccctgcagttcgcccatgccggcctggtcgactcggtgcgcaacgcactcctgcgccacagcctggagcccagccacctgatcctcgaggtgaccgaatcgaccgccatgcgcgatgccgatgccagcctggtgatcctcgagcagttgtcggcgatgggcgtcggcatctccatcgacgacttcggcaccggctactccagcctgctctatctcaagcgcctgccggcgagcgaactgaagatcgaccgtggcttcatcaacgagctggcccacgacagcgacgacgccgcgatcgtctcggcgatcgtcgccctcggccgcacgctgaacctgaagatcgtcgccgagggcgtggaaaccgaggcccagcaggagttcctgacccgcctcggctgcaattcgctgcaaggcttcctgctcggcaggccgatgccggccgagcagttgctcgccagcgtcgcctga

SEQ ID NO: 338442 - DNA, 342 bp, Pseudomonas aeruginosa
atggaaaagcccttctcggatgatgtcagcgtgaatgtcctgcgtcgcatgaaagaaggcggcttcgacttcgcgcgcatccatcccatcgacttcttcgccatctttcccagtgagcgggaggcccgccaggcagcgggccagtttcgcggcgagtcgctcagggcccaggtcgtcgctcgcgacgatggctcctggaacctgcaggtcagcaaggtgatgtatgccacccatgccgccatcggtgccttcgaacacgacctggaggaagtcgtggtgccgctgggcggcgtgctggacggatggggcgtgacccaggaggtcacttcgctgcgtccgtga

SEQ ID NO: 338443 - DNA, 699 bp, Pseudomonas aeruginosa
atgagcgatattctgatcctgacccatgccgacttctgtccgccaggccatctgggtgccgtgctggcggagcgcggcctggacttccgcgtgatccgcgccgacctcggcggactcgccggtctcgacgccgaacgcccgcgagcggtggcgatcatgggtgggccgatgagcgtcaacgacgacctgccctggttgcgcgacgaactggcgctgctgcgtcgcttcatcgagcggcgcatcccgctgatcggccattgcctcggcggccagttgctggcccgcgccctgggcgcgacggtgcggcaacagccctacaccgaaatgggctggcagcccatgcagcgggaaagccgcgacagtccatggctggccgggctgccggagcgcttctcgatcttccagtggcacggcgatgccttcgacctgccgcagggcgccgagcgcctgctgtccagcccgtggtgcgagaaccaggggttttcctggggcgatcacgtactcggcctgcaaggccatccggaaatgaccgaggaactggtgcggcgctggatcgccggctggccgcacctgctcgatccctcccagcccagccagcaatccgccgaggacatgctggccgggttgcctgccaaggttgccgggctgaatcgggtggccgagggtttctaccgtcattggctgtcgctgatcgattga

SEQ ID NO: 338444 - DNA, 1413 bp, Pseudomonas aeruginosa
atggcacgcatgttttacgacgagatgcacgatgctggcggcgaatgccgctcgcattatcgggaattcgctcgctggctggccgacacccctgaagagcaattgctgcaacgccggcgcgaagccgacctgctgttccaccgcgccggcatcaccttcaccctgtacggcgacgagcagggcaccgagcgcctgatccccttcgacaccatcccgcgcagcattcccgcggcggagtgggcgcacatcgaggccggctgcatccagcgcgtccaggcgctgaacctgttcctcgccgatctctaccacgaacagcgcatcctcaaggccggcgtgattcctgccgagcaggtcctggccaacgaccagtaccaactggcgatgcagggactggacctgccgggcaacgtctacgcgcacattgccggggtcgacctggtccgcgacggcagcggcaactactacgtgctggaggacaacctgcgcacgcccagcggtgtttcctacatgctggaaaaccgcaagatgatgatgcgcctgttccccgagctgttcgtccgccagcgcgtggcgccgatcgaccactacccggacctgctgctcgacaccctcaagcgggccagtgacgtcgaatcgccgagcgtggtggtattgacgccgggacgtttcaacagcgcctacttcgaacacgccttcctcgcccgcgagatgggcgtggaactggtcgaaggcgccgatctgttcgtccgcgacgagcgggtctacatgcgcacgacggccggaccgcaaccggtggacgtgatctaccgaaggatcgacgacgccttcctcgacccgctggcgttcaacccggattcgctgctcggcgtgcccggcctgctggccgcctaccgggccggcaacctggtgctggccaacgcgatcggtaccggggtggccgacgacaagtcgatctacccctacgtgccggacatgatccgcttctacctcggcgaagacccgctgctgcacaacgtgccgacctggcaatgtcgcaagccgaaggaactggcgcacgtcctggcgcacctgccggagctggtggtgaaggagacccagggttccggcggctacggcatgctggtcggaccggcggccagccgggaggaaatcgagctgttccgcgagcgcctgaaggctcgcccggaggcctatatcgcgcaaccgacgctgtccctgtcgacctgtccgaccttcgtcgagagcggcgtcgcgccacgccatatcgacctgcggccgttcgtcctgtcggcgccggatcgggttcgcctggtgcctggcgggctgacccgggtggcgttgcgcgaaggctcgctggtggtcaactcgtcccagggcggcggcaccaaggacacctgggtggtggaggaataa

SEQ ID NO: 338445 - DNA, 954 bp, Pseudomonas aeruginosa
atgctcagccggaccgcttccgacctgtactggatgtcgcgctacctggaacgcgcggagaacctcgcccgcatgctcgacgtcagctactcgctgtcgctgttgccgcaggaccgcaacggcggcggcctggacgaactggccatgccgctgctgatcaccggcaccctcgacgcctacctggagcgccacggcgaactggccgccgagcgcctgctgagtttcttcgccctcgacccggacaacccggcgagcatctacagctgcctggctgcagcgcgcgccagtgcccatgcggtacgcgggcggatcaccctggacatgtgggagaacatcaacgccacctggctggaaatgcgcggcatcgccgccgagggcatcctgcgctatggcatcagtcgtttctgcgaatgggtgaaggaccgctcgcacctgttccgcggcgcgaccttcgccaccagcatgcgcaacgatgcgttccgcttcatccgtctcggaaccttcatcgaacgcgccgacaataccttgcgcctgcttgatgcgcgctaccagacccagggcgaagcggcgctcgccggggcggacgagggcaccgcgcgcggctactaccagtggagcgcgctgctgcgggcgctatccgccttcgagggctacaccgagctgtaccgcgcctcgcccaacgcgcgcaacatcgccgaattgctgctgttgcgcgaggacgtgccgcgttctctgctgtcctgcatcgaggaactgagcgagatcctttccggcctgcccggtgtcaacggccggccggcgcagcgcctggccgccgagctggaggcgcgggtgcgctacaccggcatcgacgaggtgctggagcagggcctgcatacctggatcaccgactacatcctgctggttcgccagttggccaacgccattcacagctcctacctggaggccgcatga

SEQ ID NO: 338446 - DNA, 801 bp, Pseudomonas aeruginosa
atgagactctcgatcacccacgacaccacctatcgctacgaagaccgggtgcgcgccagcatccagtacctgcgcctgaccccgcaggacagcgagcgccagcacgtggtcgattggcgcctggacctgccgcgcccggcgcggccgctgcgcgatccgtacggcaacatcctgcacgtcctgaccctggacgaaccgcatgagtcggtcctgatcgccgcccacggcctggtcgagatcgacgaggagcgcgaggtggagcacgatcgccagtcgccgttgccgttcctgcgcagcacccgcctgaccggcgccgatgccgagatgcgcgccttcgccgaacgcgccatgggcggccgcaaggatcgcggcggcctgctcgacctgatgcatgcgctgcacgagcatatcctctaccagccgggggcgacccgcgtcgacagcaccgccatcgaggccttcggcgcacgcgccggggtctgccaggaccatgcccatgccttcctcgcctgcattcgcagccagggtgtgccggggcgctatgtctccggctacctctacaccgaggacgacacgcacctggccagccatgcctgggccgaggcctggctcggcgacggctggtacagcttcgacgtgaccaaccggctcggccgtccggagcgccatctcaagctggccgtcggcctcgactacctggatgcctgcccggtgcgcggcttgcgccgtggcggcggttgcgagcagatgcatgcgcgggtgctggtcagcgcgccgctgctgcaggtgcagcaacagtga

SEQ ID NO: 338447 - DNA, 732 bp, Pseudomonas aeruginosa
atgacctactgtgtcgcgatgcacctggccgacggcttggtgttcgcctccgattcgcggaccaacgccgggatcgaccatatcgccaccttccgcaagctgttcaccttcggcacgcccggcgagcgcctgctggtggtgcagacggccggcaacctggcgacctcgcaatcggtgatcaacctgctgcagcagcgcatccgccgggacggcgccagcctgctcaacgtgccctcggtctacgacgccacggcgctgatcgccgagaccacccgcgaggtgatggcccgcgacggcggcaatctggccggcaataccgacctgagctgttccttcctggtcggcgggcagatcgccggcggaccgccggcgctgtacagcatctacccccagggcaacttcatccaggccacgccggacacgcctttcctgcaactgggcgaaagcaagtacggcaagccgatcctcgaccgcaacctgactttcgacacgccgctggagcaggccctgcgctgcgcgctggtgtcgttcgactcgaccatccgcagcaacctctcggtgggcatgccgctggacctgctggtctaccaccgcgacagcctgatcctgccggagggctaccgggtcaccgaggacgacgcctatttcagcgccatccgccgccagtggagcgccggcctgcacgacttgctggagcgcctgccgtcgccgccctcggcgtacaacatctga

SEQ ID NO: 338448 - DNA, 822 bp, Pseudomonas aeruginosa
atgcctgtcactctcccgcgcctggcgttgctaggtgccctgctcttccctgtggctgccgcctgggccgccgagctccgcctggaactgccggggggcacgcagacctggagcagcgaagaactgctcaggcatccgcaggcccgcgacctggacatcccggccgacgtcgcctaccgccggaacatgcgctaccgcgccgtgccactggcggccttgttgaaaggcgtgcatcccgaagaccatttgcaggccgtggccagcgatggcttcgccgccgagttgccggccgccccgctgctcgccgaacagggctcgcaagcctggctggcgatagaggatccgcagcgcccctggccgccgttgggcgccggcaagccgtccgccgggccgttctatctggtctggagcaaacccgaggaaaaacgcatcggtccggagcaatggcccttccaggtcgtccgcatccgctaccagtcccctctggccgaacgcttcccggctctgctgccggccgccgacgccagcgcggaagtgcgcgccggcttcgccgtgttccagaagaactgcctgccctgccaccgtctcaacggtgccggcgacgcccagttcggcccggacctgaacctgccgtacaaccccaccgagtacttccagccgcaattcctcgcccgctacatccgcgacccgcaggcgctgcggcaatggccacaggcgaaaatgccggcgttcccggaacgggtgatcgacgaccaggagttgcgccagctgatcggctacctgcgccacatggccggccgcaaagcgggcgcggccggctga

SEQ ID NO: 338449 - DNA, 888 bp, Pseudomonas aeruginosa
gtgctcgccgagttgttcgccgtgatggcgcccgtgctgttcggcgccggtgtcggttacgtctgggtccgtctcggacacgcctatccgaccgagttcgtttcgcgcatcgtgttcaacatcggttcgccatgcctgatcctcgccaccctggcgcatacccgggtggacctgcacagtttcggccggatggccctggccagcgcgctgatctgcgtctgcatggctgcgctgggctgggcggcggcgcgcctcgggcgccaggagtggcaggtgctggtgccggcctacagcttcccgaatgtcggcaacatgggcctgccggtgtgcctgtatgcgttcggcgaggcggggatgaccctggcggtggcgttctacctgatcatgtcgatcggcaacttcagcctcggcgtgttctggatgagcggcgagcgctcctggcgttcgctgctgggcaatccgatcctgctcagcgtgctgctggccttgttgttgatggggctcgacctgcaactgccacgctggatggcgaataccgtcgacctgatggccgggctgaccattccgctgatgctgatcaccctcggcgtgtccctggccagcatccgcccgcggcaactgggcaatggcttcttctatggcggcctgcgtcttctgctgggggcgctggtgggctggtcggtggcgctggcgttgcaattgccgccgctggcgcagggggtgctggtggtgcagtcgtcgatgccggtggcggtgttcaactatctctacgccttgcgcggcaatcgttcgccggatcaggtcgccagcctggtgctgtgttcgaccctgctgtcgttcgccttcattccgctgctgctgacctggtggctgcctgcgctgcgctga

SEQ ID NO: 338450 - DNA, 1206 bp, Pseudomonas aeruginosa
atgaccgacgcattcatttacgacgccgtgcgtactccccgcggcaagggcaagaaggatggcgcgctgcacagcgtcaagccggtgaacctgatggccgggctgttgcgcgcggtccagcggcgcaacgacctggataccgcccaggtcgacgatatcgtgctcggctgcgtgacgccggtgggcgaccagggcgccgatatcgccaagaccgcggcgctggtggccgactgggacgaacaggttgccggcgtgcagatcaaccgtttctgcgcctccggcctggaggcggtgaacctgggggcgatgaaggtacgctccggcttcgaggacctggtcctggtcggcggcgtcgagtccatgtcacgcgtgccgatgggctccgacggcggcgcctgggcactggatccggaaaccaacctgcacaccagcttcgtcccgcaagggatcggcgccgacctgatcgccaccctggaaggcttcagtcgcgccgatgtcgatgccttcgccctgcgctcccagcagaaggccgccaaggcccgcgccgaagggctgttcggcaagtcgctggtgccggtcgccgaccagaatggcatcgtcctgctcgaccacgatgagttcattcgcgccgactccaccctggaagggctcgccgcgctcaaaccgagtttcgagatgatggggcagatgggcttcgacgccaccgcgctgcgcaagtacagccaggtcgagcgcatcgagcacgtgcatacgccgggcaacagctcgggtatcgtcgacggcgccagcgccatgctcattggctccgaggccaagggccgcgaactgggcctgaaggcgcgggcgcggatcgtcgctaccgcggtgacctccaccgaccccaccatcatgcttaccggccccgcgccggcgacccgcaaggccctggccaaggccggcctgaaggtggaagacatcgacctgttcgaagtcaacgaggcgttcgcttcggtggtgatgaaattcatgaaggacatgggcgtggcggaaagcaaggtcaacgtcaacggcggcgccatcgccatgggccacccgctcggcgccaccggctgcatcatcctcggcacgctgctcgacgaactggagcggcgcaacctgcgctacggcctggccaccctctgcgtaggcggcggcatgggcatcgccaccatcatcgagcgcgtgtga

SEQ ID NO: 338451 - DNA, 915 bp, Pseudomonas aeruginosa
atgaaaaagcccgatctcgccggtctcgccgccttcgtcgccatcgctcgcgaacgcagtttccgccgcgccgccgccaccctcggcgtaaccccgccgacgctcagccacaccctgcgcgaactggaaacccagctcggtatccgcctgctcaaccgcaccactcgcaacgtctcgccgaccgaggccggcgagcacctgctggcacacctggacccggcgttcgaagacatcgccgccgcgctggacagccttaaccgctttcgcgaaacgcctcacggcctggtacgaatcaacgcaccgcgaaacgccatcggtctcgtcctcgcgccacgtttcggcgaactggcccgcgactatcccggcatcaccctggaagtggtggcggacgagggtttcgccaatatcgtcgaagccggtttcgacgccggcatccgcctcggcgaagacctccagcacggcatgcgcgccgtgcgggtcggcccggacctgcgcttggccatcgtcgcgaccccggcctacttccgacggcaaggcaggccgggtagcccggaggaattgctcggccaccgttgcatcggctggcgcaaggtgtcttccggagagctgtacaaatggcaattcagcaagggcacgaaagcgctttcggtggccgtgagcggaccgctggtcctcgacgacccgcgcctgatgctacaggcggcgctggccgatgtcgggattgccttcgccatcgaggaggaagtcgccgagcacctcgccgccggccgcctggaacgggtcctggcagattggtgcgccccctttcccggtttccatctctattatccgaaccgccgcaaccacccggcggcgttgagcgccgtgatcgacctgctgcgctaccccggcgaggaacacccaggtcccgcgtag

SEQ ID NO: 338452 - DNA, 972 bp, Pseudomonas aeruginosa
atgcagcatgtccgtcttggcaacagcggcctgaaagtctcccgactctgcctggggtgcatgacctatggcgatccggcgtggcgtccatgggtgctggacgaggaacgggcgcgtccgttcattcgcgaggcgctggaagccgggatcgacttcttcgacagtgccgatatctattccaccggcgagagcgagcggatcctcggacgcgcgctcagggacttcgcgcagcgcgaggacctggtaatcgccaccaaggcgttctttcccatgagcgacaggcccaacgcctgcggcttgtcgcgtaagcacctgcttgccagcgtggatgcctcgctgcggcggttgggtacggactacctggatctcttcgtgatccatcgcttcgatccggacaccccgatcgcggaaacctgcgaaaccctcgacagcctggtgcgtgtcggcaaggtccgttacctcggcgcctcgtcgatgccggcctggcgcttcatgaagatgctcgccttccagcgccaccacggcctggcgcaattcatctcgatgcagagccagtacaacctgatcgttcgcgaggacgaggaggacctcgtgccgctgtgccgggaagaggggatcgcgttgacgccctggtcgccgctggcgcgtgggctgctggccggagcgcgaagcgccggcacgctgcggacccggacggacgaacaggccccgcgctggtacggcggcagggaggaagtcgagtcgaccctcggcgcgttggagaaactcgccgcagcccgcgggcttccaccggcgcaactcgccctggcctggctgcttggccggaacggtgtcgccgcgccgatagtcggcctgtccaggccgcatcacctcgaggatgccctcgcggcgctgacgctggacctcgccgaagaggagtgcgccacgctggaggcgccgctcacggtgcgcgcccggaccccgcgctggtag

SEQ ID NO: 338453 - DNA, 999 bp, Pseudomonas aeruginosa
atgatgagacgacaggcttccgtgttgctgctggtatccatggtatcggcgaccgtcttgccggttttcgcccgtgcgccgggcgagcgcgagccgtcctgcgccgcgacgagcatcgtcctgccagcgggggcccggtatcccaacggcatcgcccatgccgccgatggaacgctgtacgtcggcctggtcaccagcgggcgcatcctgcgcaagcctcccgggggcgagtgggaaaccttcttcgccggcagcccggcgatcttcgctgccaccgcgctgcggctggacgagccgcgtggcctgctctggggcaattcgccggacttcctacccgctggccggcgccggccgcatggggtgttcgccctggatctcgcgaccggtgccgtgcgccgatatctgaccctgcccggcgacgggatgggtaacgatctcgcggtggcgccggacggaacggtctacctgagcgaaacccgggatggcagcctgatgcggctgcggcccggggaaccggcgttccaggtgttgctgcgcgacagccgcctggccggccccggcggcctgggcgcggcgggcatcgtccgggtggacgacgacaccctgctggtcggcaacttcggtagcggggcgatccatgtcgtcgaaggggtcgccacgcgtccgcggctgcgcgagatggagctgccccgaacgctggagaatccggacggcatggcgctggctccggacggctcgctgatcgtgctggagaacgccatccgcagcggcgccggcaaggtgctgcggatcgccgagccgctcgctccagggcggcgcggcatcgaagtgatacgcgagggcctggagtcgccggtcaacctgaccgtcaccggacagggttgcgcctatgtcagcgagtcccgcattcgccaccgcctgttgccggggcgcgagggcgaggtgccggcgcgtttcctgatccaccggctgcccctggacgcggccgggggccgttga

SEQ ID NO: 338454 - DNA, 372 bp, Pseudomonas aeruginosa
atgttgctcaaggcagtacgtaacggactgggtcaggcgattatcctcgccgacttcgtcagccgcccccgcaagctgcagcgcagcgccgaggcccaggccgaggtcgagcgggcgctgcggaacctgtcgctctaccagttccgctcctgtccgttctgcgtgaagacacgccgcgccatgcaccggctgaacctgccgatgcaactcaaggacgccatgaacgatccgcaggcccgccaggctttgctggaaggcggcgggaaggtcaaggtgccgtgcctgcgcatcgaggaaaacggccaggtgcgctggatgtacgaatccagcgagatcatcgcctatctggaaggtcgtttcgccaacgcctga

SEQ ID NO: 338455 - DNA, 723 bp, Pseudomonas aeruginosa; identical to SEQ ID NO: 319086

SEQ ID NO: 338456 - DNA, 240 bp, Pseudomonas aeruginosa; identical to SEQ ID NO: 319085

SEQ ID NO: 338457 - DNA, 219 bp, Pseudomonas aeruginosa
atgaaacgtcgcagcccacgccattacgcccgcaacaccgccctggccaccctgggtctgtacgccatcctcatgctggtcgtgctgagcctcgtcgccggcgccgaaagcgccaggaacgccacaccggacaacgacaccgccacgaccttctccaaccagatcggccaggccctgccaggcctgctctcggggttgaacagtcgacgcgccggttga

SEQ ID NO: 338458 - DNA, 489 bp, Pseudomonas aeruginosa
atgccgaaatggattgcactttgcctgatcccgctgttggcaagctgcgccacctgccgccaggacagcgacagggaaaaactgctgtacgagaacgacatgctgcaggcgaaactgatcatcgtcgccaacgaccgcgatcgcctgccgctggcccaggccctgctggagcgcgcggcgcgcgacgaccgcagcggcgaggcggacttctaccaggccgtgctgatcgctcgccgcgacggccaggccagcgattgcgagcgcatcacccgcctcctcgaacgttccgccgagcgacgctacccgctggccaacgcaatgctctacaagatctacgccgagcccttcctgttgccgcgcgccgacattcccaaggccgagacctatcgccaggcctacgccgagctgccggtcgcgcgcagcggctacccctccttcgagcgagcccggcaggtggtcgatcgcctgctcgcgccgacttcgtcctga

SEQ ID NO: 338459 - DNA, 507 bp, Pseudomonas aeruginosa; identical to SEQ ID NO: 319082

SEQ ID NO: 338460 - DNA, 189 bp, Pseudomonas aeruginosa
atgaaacgcaacgtcttcgccgccattctcctcggcatggctaccaccctcgcagtgcaagccagcttcgccgacgaatccagcctgatggaaaaccgcatggtccaactgaaccagcacgccatcgagcaggcccagcagcaacaggccacggcgccaaccgcgagcgacaccgatgcgcagggttga

SEQ ID NO: 338461 - DNA, 690 bp, Pseudomonas aeruginosa
atgagcgagttgatcagctaccagttcgaagacggcatcgccaccctgaccctcaacaacggcaaggtgaacgccatctccccggcggtgatcgacgccttcaaccaggctctcgaccaggccctgcaggacaaggccgtggtcatcgtcaccggccagccgggcatcctctccggtggctacgacctgaaggtcatgacctccggcccggagaatgccgtcaacctggtcgccgccggctcgaccctggctcgccgcctgctctcccatccctatccggtgatcgtcgcctgtcccgggcacgcggtagccaagggcgccttcctgctgctctcggccgactaccggatcggcgtcgacgggccgttccagatcggcctgaacgaagtcgccatcggcatgaccatgcaccatgtcggcatcgaactggcccgtgatcgcctgcgcaagtcggcgttcacccgctcggtcatcaatgccgagatgttcagtccggccgctgcggtggatgccggcttcctcgacaccctggtcagcgccgaccagttgcaggaaagcgcgcgtgcagcggcccagcagttgaagaaactcaacatgaccgcgcatcgcaataccaagctcaaggtgcgcaaggcactgctggaaaccctcgaccaggcgatcgagctggacaagaagcacctgggctaa

SEQ ID NO: 338462 - DNA, 285 bp, Pseudomonas aeruginosa
gtgagcgagtccctgtccatccatcatgacgtgggcggccatcagttcgagacgacggtggatggccatcgtgcctatctggcgtatatggacctgggcaagcagacgctggacatctaccggaccttcgtaccggattcgctgcggggtcgcggtatcgccgccgcgctgaccgaacacgccctgcagtacgccgaccgcatgggctacagcgtgatcccgtcctgctcctacgtggagcgttacatcgagcgtcgccagcgtcaggccgatccggccgcctga

SEQ ID NO: 338463 - DNA, 1077 bp, Pseudomonas aeruginosa
atggctgatttacagatcgacgaccttaacgttgcctccaacgagaccctgatcacgccggagcagctcaagcgtgaaattcccctgaccgacaaggcgctgcagaccgtggcccatggtcgccaggtggtgcgcgacattctggatggcaaggaccaccgtctgttcgtggtgatcggcccctgctccatccacgacatcaaggccgcccacgaatacgccgaccgcctcaaggcgctcgcggccgaagtggcggatacgctgttcctggtgatgcgcgtgtacttcgagaagccgcgtaccacggtgggctggaaaggcctgatcaacgatccgtacctggacgactcgttcaagatccaggatggcctgcacatcggccgccaactgctccgcgacctcgccgagaaaggcttgcccaccgccaccgaagcgctcgacccgatttccccgcagtacctgcaggacctgatcagctggtcggcgatcggcgcccgtaccaccgaatcgcagacccaccgcgagatggcctccggcctgtcttccgcggtcggcttcaagaacggcaccgatggcagcctgaccgtggcgatcaatgccctgcagtcggtctccagcccgcatcgtttcctcggcatcaaccagcagggcggcgtatccatcgtcaccaccaagggcaaccgctacggtcacgtggtgttgcgcggcggcaacggcaagccgaactacgattcggtcagcgtcgcgctctgcgagcaggacctgaacaaggcgaaaatcccgctgaacatcatggtcgactgcagccacgccaactccaacaaggacccggccctgcaaccgctggtgatggacaacgtcagcaaccagatcgtcgaaggcaacaactcgatcgtcggcctgatggtggaaagccacttgggctggggcagccagccgattccgaaggatctcgaccaacttcagtacggcgtctccatcaccgacgcctgcatcgactgggcgaccaccgagaagagcatccgcagcatgcacgccaagctcaaggacgtgctgccgaaacgccagcgcggctga

SEQ ID NO: 338464 - DNA, 381 bp, Pseudomonas aeruginosa
atgatggtcgggccccatttcttcctttctatcgaggtcagcagcgtgccgtccctggaactcaccgatctggacgccgaccggcagttgcttgccctggaaggggtttcgctgttggtattcaccagcgaaggctgcgcgtcgtgccgctgggcccggcgccatctccccgcgatggacctgcccatcgagcgcctgtgctgggtggacgccggccgcaatggcggcctggtggaacgctacggcgtttttcacctgccggccctgttcatggtccgcgacggccgcttccatggcgcactgaacgttccgctgcaccaggaagccttgcggggtgcggtgctggcggggtcgaccgctttacctgaggagttgccctga

SEQ ID NO: 338465 - DNA, 948 bp, Pseudomonas aeruginosa
atggattcaaagcagcaacggatcggcgtcatcggtacgggagccatcggcggcttctatggattgatgctggcgcatgccggccacgacgtgcattttctcctgcgcagcgagttcgaggcggtcaatcgcgccggactcagcctgaatagtgcggtgcatggcttccggcgcctggcgccggtccaggcctaccattcggcgcaggacatgccgccctgcgactggttgctggtgggcgccaagaccaccggcaatgacgaactggcacccctgatccgcgcagcggcggcgccgggtgccaaggttctgctgctgcagaacggtctgggcgtggaggagcggctgcggccgttgctgccggaaagcctgcatctgttgggcggcctctgcttcatctgtgtgcatcgcggcgaaccgggcgtgatcgagcaccaggcctacggcggagtgaatctcggctatcattccggaccggccgacgagcgacgccggcgcgagatcgtcgaggagggtgccgcgctgttccgcgagtccgggctggagtccacggcgatgcccgacctggagcaggcgcgctggcagaagctggtctggaacatcccctacaacgggctgtcggtattgctgaagagcagcaccgcgccgctgatggccaacgcggacagtcggtcgctgatcgaggcgatcatggaggaagtcatcggggctgccggcgcctgcggcttcatcctgcctgagggctatgcggaccaactgttggcggcgaccgagcggatgcccgactatcggccgagcatgtaccacgacttcgcccatgggcggccactggagctggcggcgatctatgccgcgcccctggcccgcgctgctgctgcgggctaccggatgcccagggtcgaggcgctgcaccaggcgttgcgcttcctcgaagcgcaaccgcgctga

SEQ ID NO: 338466 - DNA, 498 bp, Pseudomonas aeruginosa
atgattcgttcgattctctatgccaccgatctggggctctatgctccctatgtcctgcaacacgccctgtcgctgacccgcgcctacaacgccgagctctatgtcgtccatgtggtggagcccctcgggctgttcgccgagtcggtcctgcagacctaccttgacaccgagcgtctccaggacctgcgggcgcaagggctggacaacgtcatggaaagcatcgagaagcgggtcctggaagggtttcgcgatgaactcggcgagttgccccaggatgcggcgctggtcaagagcgtgcgggtggtgcagggcgacccgccgcagatgatcctcgatgaggcggaaaagctggccgtggacctgatcgtcgccggcagccatagccacggcacccagctcgacacgccgctgggccggactgccgcgcgtctggtgcaactggcggaggtaccggtgtacctggtgccgatgttgcagcaccgtagtcgcgacctgtag

SEQ ID NO: 338467 - DNA, 975 bp, Pseudomonas aeruginosa
atgaagcttcagcaattgcgctatatctgggaggttgcgcaccacgacctcaacgtctccgccacggcgcagagcctctatacttcgcagccgggcatcagcaagcagatccgcctgctggaggacgaactgggcgtcgaggtgttcgctcgcagcggcaagcacctgacccgtgtgacgccggcgggggagcggatcatccataccgccggcgagatcctgcgcaaggtcgagagcatcaagcagatcgcccaggaattctccaacgagaagaagggcacgctgtccatcgccactacccacacccaggcgcgctatgcgctgcccaacgtgatcagcggcttcatcaagcagtacccggacgtctccctgcacatgcaccagggcacgccgatgcagatcgccgaaatggccgccgacggcaccgtcgacttcgccatcgccaccgaggcgctggagttgttcggcgacctgatcatgatgccctgctaccgctggaatcgctgcgtcatcgtgccccacgggcatccgctgaccaagctgccgaaactgaccctggaagccctggccgagcagccgatcgtcacctacgtgttcggcttcactggccgctccaagctcgacgaagccttcagccagcgcggcctggtgcccaaggtggtattcaccgcggccgatgccgacgtgatcaagacctacgtgcggttgggcctggggggcggcatcgtggcgcacatggcggtcgatccgaagctcgacaacgacctggtgatcctcgacgccagccacctgttcgagtccagcgtgaccaagatcggcttccgccgcggcaccttcctgcgcggcttcatgtgcgacttcatcgagaaattcgctccgcacctgacccgcgagctgctggccaaggccgtgcaatgccacaacaaggccgagctggacgagttgttcgacggcatcgaactgccggtctactga

SEQ ID NO: 338468 - DNA, 348 bp, Pseudomonas aeruginosa
atgcgcatcaccatggtcaagaaagtcctcgccaacggcgaggactgccgcaagtgcaaggaagtccggcaacgcctggaacaaggcggctacctgccgcgcatccatcgcaccctggtggccgacgaacgcgacccgaacagcgcaggctggatggtcgccgcccaatatggcgtagagaccgcgccgttcttcgtggttcgccacgacgacgggcgcgaacaggtctacaccgtgttcatgagcttcctccatgaagtcctcgaaccgcgagccgagcagtccgcggacgctgatcgcgaagcgctggccaggctggccggtcgcgacaatctcgacatgctctga

SEQ ID NO: 338469 - DNA, 735 bp, Pseudomonas aeruginosa
atgagccagcctttcgaccttcccgccctcgcctccagccttgccgacaaatccccccaggacatcctgaaagccgccttcgagcacttcggcgacgagctgtggatctccttcagcggcgccgaggacgtcgtcctggtagacatggcctggaagctcaaccgcaacgtgaaggtgttcagcctcgacaccggtcgtctgcacccggaaacctatcgtttcatcgaccaggtccgcgaacactacggcatcgccatcgacgtgctttcccccgacccgcgcctgctcgaacccctggtgaaggaaaagggcctgttcagcttctaccgggacggccacggcgagtgctgcggcatccgcaagatcgaaccgctcaagcgcaagctcgccggcgtgcgcgcctgggccaccggccaacgccgcgaccagagccccggcacgcgcagccaggtggcggtgctggaaatcgacggtgccttttccacgccggaaaagccgctgtacaaattcaacccgctgtcgtccatgaccagcgaggaggtctggggctatatccgcatgctcgaactgccctacaacagcctgcacgaacgcggctatatcagcatcggctgcgaaccctgcacccgtccggtgctgcccaaccagcacgagcgcgagggccgctggtggtgggaggaagccacccacaaggagtgcgggctgcacgccggcaacctgatcagcaaggcctga

SEQ ID NO: 338470 - DNA, 618 bp, Pseudomonas aeruginosa
gtggaaattgcctgtcttgacctggaaggcgtgctggttccggaaatctggatcgcgttcgcggaaaaaaccggtatcgacgccttgaaggcgaccacccgggacattccggactacgacgtgctgatgaagcagcgcctgcgcatcctcgacgaacatggcctgaagctgggcgacatccaggaggtgatcgccaccctgaagccgctggagggggcggtggaattcgtcgactggctgcgcgagcgcttccaggtggtgatcctctccgacaccttctacgagttctcccagccgctgatgcgccagctgggcttcccgaccctgttgtgccacaagctggagatcgacgacagcgaccgggtggtcggctatcaattgcgccagaaggatcccaagcggcagtcggtgatcgccttcaagagcctctactaccgggtgatcgccgcaggcgactcctacaacgacaccaccatgctttccgaggcccacgccggcatcctgttccatgccccggaaaacgtgatccgcgagtttccccagttccccgcggtgcatacctacgaagacctcaagcgcgagttcctcaaggcttccagccgttcgctgagtctgtag

SEQ ID NO: 338471 - DNA, 1362 bp, Pseudomonas aeruginosa
atgcccagttgtcatgttcaccccctgccctaccatagcgacccaagctgtctctttgccatcatccatgaggcgcccggtgcggtgatgctcgattcgggtcgccccatcgctacccgtggacgctatgaccttatgagcgcctggccattggcagaactggcgccgctgcccgacgaatcggccaaccgcttcttcgcccgcctacgcgaagcggccggaagcctgggccccgcgcagctgccagcgccgtacgaactgcccttcgccggcggtctgctgggctatttatcctacgacctgggtcggcgcatcgagcgcatcggcgaacacgcccgcgatgacctgggcctgccgctggcctccgtcggcctgtatgcctgggcgctgatcagcgaccaccaggccggcaccagccaactggtattccacccgcgattggacgagcgcgaacgccagcgcctgatcgccctgttcagcgaggaaacgcaaggcgcggccggcaacttcaagcttctgggaaaattccgacggagcatcagcgcatccgactatcggcaggcgatccgccgcatccaggactacatccaggcaggcgactgctaccaggtgaactatagccagcgcttccaggccgcttgcagcggctcgccgtggccggcctatcgcgccctgcgcgaggcctgcccgacgccgttctccggctacctgcgactggccgacggcgcgatcctcagcctgtcgccggagcgcttcctcaagctcggcaagggcaaggtggaaacccggccgatcaagggcacccgcccgcgcggcaagacccccgaggaggacatggcgctggcggcgtcgctgctggccagccccaaggaccgcgcggaaaacctgatgatcgtcgacctgctgcgcaacgacatcggacgcagttgccaacctggcagcgtacgggtaccggagctgttcgccctggaaagctatcccaacgtgcatcacctggtgagcagcgtcaccggcgaactggcgccgggcaaggacgccctcgacctgctggaaggcagcttccccggcggctcgatcaccggcgcgccgaagattcgcgccatgcagatcatcgacgaactggaaccgagccgacgcggcatctactgcggcagcctgttctacctcgacgtgcgcggcgagatggacagctcgatcgccatccgcaccctgctggtcaggaacggccaggtcagttgctggggcggcggcggcatcgtcgccgactcgcactgggaggacgagtaccaggaaaccctggacaaggtccgggtgctgctggaaaccctggaagggatggccgggacagcgtccccggaatag

SEQ ID NO: 338472 - DNA, 2571 bp, Pseudomonas aeruginosa
atgttttccgcacctgccggcttcggcaagacctgcgcgctcgccgccctggccagggagcgcactgtagcagaccaggcggtggcctggctctcgcttgccgaagaagacgacgaccccgcccgtttctgccggcagctgatcgaggcgctgggcgaagccgtgccgcagcttggcgacgacgcccagacctacctgcagaacaccatgcgggtcccggtggtggcggtgatcgaaagcctgctcggcgatctcgatcgctatgcgcggccgttgctgctggtgctcgacgacctgcacctggttagcaacccggacatcttcaccggcctcaaccgcctggtgcagtacgcaccgcccgggctggtcctggccctgggcacgcgttcgcagccggcgctgagcctggctacctggcgggccaaggggctgttgctggaaatcggcctcgaggagctgcgcctcggcttcgaggaaacccgcgaatacctcgagcgcagcggtctctatctggacgagccctgcctgaaggcgctctatggccagaccgaaggctgggtggtgggcgtgcatctcgtcagcctgtggctgcgccagcaaccgcaggcgcaggaaatggccctgctcgacggcgacaagcaggcggtcagcgcctatctgctggcggcggtcttcgaacgcttgcctggcgacctgcaggaagcgctgctggcccttggcgttgccagccaattgagcggcgacctggccaacgccctgaccgggcgccaggacggccaggcgctgctggaacgcctggagtccatgcaattgttcctcctgccgctggatcgcgaacgccagtggtatcgcttccacctgctgttcgccgatttcctccgcaaccgcctgcgcgactccgatccggaccgtttcaagcaactgcatttcaacgccagcctgtggttcaccaaccaccacatgccgacgttcgccatcgagcatgcctgtgcggcggaagacccggagatgatcgccgcgctggtcgacggatgcggactggaattgatcaaccgcggccagctcagcctgatctaccgttggcgcaagcatgtgccggacgaaatcgccgagcgctatccgatcctggtccttaccgatgtctggtcgcgggccagcgacctcagcctgggcgaggccaaccggatcatcgacgaactgctggcgcgctggggggagagccgcggcgatgggccgatgggcgaccagtacctctccgcgctggcggtgaaggcggtggtggcgttgcagaaggacgatctggaactgtgcatcgccctggctcgccgggtcgaggtccagctcgggcagaacgctgccttcctcgaagtggcggtgttgatcactgccgcgctggcccaggtggttcgtggccagggcgaccaggcgcggcgcctgctggggctggcgcagcagcgcaatcatttcctcgaagggcgctacctggacatgcaactggccaacgtcgaggtgatcctcgcactcgagcagggccaggtgaaacaggcgcaactgctcatcgagcggctccgccagcgcgcccggccgctgttcgagaagtccaggagcgcgctggcgctgccgaccatcaccgaggccctgaccgcctactacaggatcgagctggacgggctggaagagcgcctgggctgggcgctcgggcatgtggatgtgatcaatccgatcgatttctatgcccagggacagatctgcctggcgcgcacccagcgcctgctgggacggccgaaggaggcgctggccagcctggcggcgatgcaggccctggcctcgcgcaatcagtcgtggcgcttcttcgcccaggccatggccgaagagatcaacctgatcctccaggacagcggccccgaccgcctgaagcgcgccgagcagcggttgaagagcgtggactggaacaagatggcggcacactaccgcaacatggccttcaacccggtcaactggtcgctgggtgtgagccgcgtgcgcctgttgcaggggcgaggacatttcagcgaggcgctgcacgagatcactcagttgcgcggcaccttgcagcccggctggcacggcctgcagcgcctgcgcctggatatcctggcggcgctcagctatcagcgcctgggctaccaggaacgggccaacagcctgctcggcgaatgcctgatcaatgccgaacgggaaggggtgcgcagcctcttcatcgaggaaggcgacggtattcgccagttgctccagcaactcgaatccaccgagcgccagccggcgctacagaccttcattcgcggcctgctcggcatctggcccgggcagggcgtgcgcaagccccaggatgcgctcgaggaaggcctgacggagcgcgagcgcgaagtggtctgcctggccgcacagggcctatccaacgaagaaatcggccagcgcctgtcgctggccctggggaccgtcaaatggcatctgcacaacatctacgaaaagctcaaggtgcgcaatcgcacccaggcgatccggcgagcccgcgagctgagcctgctctga

SEQ ID NO: 338473 - DNA, 2724 bp, Pseudomonas aeruginosa
atgggccatcgcgacggtgttcccgccagcaccattccgctgttgcagaccaagctgttcccgccaggcgccggagggctgccgctgctgccccgccaggcgctgatcgaccgcctgtacgaggcccgcgggcgacgcgcgatggtgctcagcgcgccggccggcttcggcaagagcaccatcctctgccagttgcgcctgcgcctgctggagcagggcgcggcggtggcatggttgtcctgcgacgagaccgacagcgaaccgcagcgtctgatccagtacctgctggcgagcatccagcgagtggtcccggcattcggcggcaataccgccaatctgctcggcaccgacgtcgcggtgccgctggagggtatcctggatgccttcctcgccgacttgcgtcgcctggaaggccccttgtacctgttcctcgacgatttccaccgcatccgccacgccgccttgccgcatggggttcgctacctgatcgagaacctgcccgatcacgtgcgggtggtggcctcgacccgcttccgcccgcgcttcctggtcgacgagccgaccctcaagccctggaccttctgcctgagcgcggaagacctacgactttcgcgcgaggagagcgatgcgtttctcctcgacctcaaggggctggagctgggcgagcgcgagctgaagctgctgttcaagcgcaccgaaggctggatcacggcgttgcacctggcggccctggccctcagtcgcaataccgaccgggaaggtttcctccgcgggctctccgggaccgaacggaacatcgccgactacctggcggaagacgtgctggccagcctgcccgccgacctgcagctgttcctcgaccagacctcggtgctcgatgagttcaatgcggaactgtgcaatgcgctgaccgggcgtcgcgacggcctggacatgctcatgcgcctgcagaacgagcagttgttcgtcatcgccctggacgaccagcgcgaatggttccgctaccaccatctgttcgccgagttcctccaggggcggctgtcccggcatgccgatccgaccccgttgctgcatgcggcggcgcgctggtgcgaggggcgcgacctggccgaccgggcgatcaagtacgcccttcgcgcccgcgactacctgttcgccgccgagttgctggagcgccagggcgcgcgcctgatcgccggtaaccgggtgtacggcatcctcggcatgctcaacggcattcccgccgaggtgatccgcgagcatccggtgttccagatcttctacgcctggcaactggcgttcgagcaacgcttcgccgaggccgaggcgttgatcgaggaggtcagccaccgcctcttgcaggggcgcggcaaggtcatgcacttcgggctcggcgagttgctcgccgccgcccaggtgctcaaggccctggtgttgctctaccaggacaagctcgaagcctgcctgaaggtcgcccgtcactggctgtccatggtcccgagcaaccagccggtgttccgcgccagcctgctctgcgtgcaggcttcggcgcatgcgctgctcggcgactacgccgaggccgccggcgccatcggttccgcgcgggaggacctgaaagtcgccgacagcgagtacctgcaggtggtgaccagcctgatcgaatccctgatctgcaaggagagtggcgacctggagcggggcagggcgatcgccgagtcggcgcgcaaccgggtcgagcaggtattcggccggcgcagccgggtcggcgggcccttgtcgctggcctatgccgacctgctctacgagcaggaccggcatgccggcgtgctcgccgaactaccgctggcgacggtctggcgggatgtcgcgacgccggtggaactgctcagtcgcggccagttggtcatggccaaggcgcgcttcttctccggcgccgccgagcaggggctggcgcaactcgacgaatggctgagcggtctgctctcgcccggctacgagcgtgtctatgctcacgccatgagctgcaaggtgcagttcctgctgtggctgcgccgtccgaacgaagccgaacgggtctgcctgcaactggagcggcatcttgccgggctctccggcgagcggcatgccgacgcacagaccgccctggtcctggcggaggctcggctggcattgtccgagcgtcacgcggaacgcgcgcagagcaagctggaaagctgtctggccggctactcttccgcttaccagagggatcggcggctgcgtttgtccttgttactttctgtggcgtattggcagaaaggtaacagcgaaaaagccatcggcctgttcctcgccacgctcgaggaagcctggaatctcggctaccgccggctgttccaggacgacgcgttgtggctgttgccgatgtgggaaagctggagggaagcggaacccaagcgtgccgcggcctggcaggggctggccgacctgctccgcgagcagtgccggaagctctccgtggacccggaaagtttcgatgaaaatcaggatgttagccatcgcgaacgggaaatcctgcgactggtggcggcgggcttgtcgaaccgcgatatcgcgcaggcggtgcacctgtcggaagccaccatcaagtggcacctgcacaacctgttcgccaagctgggtgtgaagagcagaacgcaagccgtactaaagggtaaaagcctgggactgctgagcgaggcgtga

SEQ ID NO: 338474 - DNA, 438 bp, Pseudomonas aeruginosa; identical to SEQ ID NO: 319067

SEQ ID NO: 338475 - DNA, 762 bp, Pseudomonas aeruginosa; identical to SEQ ID NO: 319066

SEQ ID NO: 338476 - DNA, 1026 bp, Pseudomonas aeruginosa; identical to SEQ ID NO: 319065

SEQ ID NO: 338477 - DNA, 1599 bp, Pseudomonas aeruginosa
atgaagatgcgcattgcgccgctctggctggcgctggcaggggtgtgcctggcctggattccgccggccggcgcgcagatggccaacgacctgaccatcggcaacccgaaagccatggccctcggcaacgccgtgaccgccgacgagaccggcatcgattcggtgcactacaacccggcggcactgaccaggatgaagggccgccaggcgaccgtgaagctgctcaccggggtgatggacatccgcgccggcttcaaggcgccgccgaactacggcgaaggcaccttcggcctgcgcgacgacccggtcgccaacagccacagccggaccctgaccccgaccatgtacctgcccggcctcggcggcatgaccgacgtgccgttgctggtggcgccgctggccgggatctcgatcaacccgccgggttccaagttcaccttcgccaccaacgtctacaccccgcaagcgctgggctacagccgcgattccgatagcgatccggcgcgctaccagggacgcgaggtgtcgttgcagcggctcacctacttctcgccgaccctggcctaccaggtcaacgacgagctgtcggtcggcctgtcggtgggtttttcccaccaggcagtagcgttgaacgaggatttccgggcgccgaaccagttgctcgggctgttgcagcagaccaaggagatcggttgcctgccgggaatgcaggagatcctcgaggtgttcttcaacgtctgcggcggcaacatcggtccgttccagaacctggccaatatcgacctggacatgcagcagtcgctgtcgcccagcttcaacctcggcgtgctctgggagcccaccgactggttcgcctggggcgcgacctaccagagcgagtcgcggatgaggctcaagggcaagtaccgggtcgactacggccaaggctggcagggtttctggaccggggtgcacaagtcgctcggtggtgcgatcctcggccagatgttcccctacgggaacgtcgacgaagagcatggcaacgccacgatgaacatggtctacccggatgccttctccaccggcgtgaagctgcgcccgttcaagaagtggcaattcaacttcgacctgaaatggaacggctacagcgactggaacgagttcaagatcgagttcgaccgcgagcttgacctgctgcgcatcgccaagtacctcgactcgaaggacgccaccagccacagcatcaccctcgaccgcggctaccgcgatacctggagctgggccatgggcgtgcagtacgacgtcaacgaccgtttgcagctacgcgccggctacgaataccggccttcggcgatccccaagggccaggcggacatcctggtgccgatcggcgatgccaatctctacggcctggggctgggctaccagtgggacaaggacacggtgatcgatgtcggtttcaactacttcgtcaccaagcagagcgtcaaggccgataccagctgcaacctgaattgcaccgggctcgacaacctggtgtacaacccctacgcgggactggacgtggacaccacggtgaaagcctatattttcgccatgacctaccgtacgaccttctga

SEQ ID NO: 338478 - DNA, 1191 bp, Pseudomonas aeruginosa
atgatgcgcgcatccatcgtactttgcgtcttctccctggcgctgccggcatcttcgccgggctgggcctccggcgggcgctacctgacctgggtggacgacaatggcggggtgcacaacaccttcgtcgacggccagttcgaccgccagcagcgccaggcgcggcagcgcatcggccagagcgaccaggcgcgggtgctgaacaaggtggacaacgccacgcagtggccggggaacagcagcggaggggagagcaagcgtcgctactacacctggatcgatgctaacggcaacgtgcagaacagcttctatgccggcgccaaggtcgccggccagcgcgccgactacgtcctgcccaacggcgaacactccgccgaatacatcgacgccgaggccttcgagggcaagggtttcgttcgcagcgagaacggcagtccctactacacctgggtggacgagaagggccgcatgcacaactcgcagatcccgcccgaggagcgcgcggcgcgcttcaagcgggaggccgcgccttcgtcgcagatcgccttcaccgagggccggcagatcgagttcaagcaacgtccgacggcgttgcccgggctggatggcgccggccagcagagcgatgcgctgaaggctttgctcaagggcaccgagatgaccatcgacgatctctaccaggacctgcaacggcgctgctgcgagcagatcgccgagagcgacttcaccgaactggatgccgacgaaccgcgctacgaggagttgaaccgcttctcgccgagcttcgactttcccatgggcaggagcttctacgcggcgatccggctgccgcgctcccagggtgtctacggcctgcgcatccgcagtttcgccaaccgccaggtggtctacccgtcgctgctgttcctcgacgagcacaagcggccgacccggctggtcagcgacgcggtgtacaagctgaacccggaaacctggtatcgctacgctttcatcgagggtacggtgccggtgcgagccaatcgcggcgagcgctacgtgctgctgctgaccaccgacgaggaccgctcgctgcaaaccctcgacaacaagccgttcaagcgtccgctgcaggacctggcggtgaacgaggcgggtatgcaggtgcatgagcacgcccggcagggcggcttcgagctggccgtggtgcgttga

SEQ ID NO: 338479 - DNA, 984 bp, Pseudomonas aeruginosa
atgtcgatctggaagacctggaaagacctgaccgcgaaaggcgtgatgggcatcaaccgacgcaatgccgattacgtcctgaagtacaacaagcggcacctgtatccggtggtggacgacaagatcatcaccaaggaacgcgcgctcgaggccggcatccacgtgccggagatgtacggcatcatcgagaccgagaaaggcatcgacaagctcaacgagatcatcggcgagcacaacgatttcgtcatcaagccggcgcagggcgccggcggcgacggcatcatggtgatcgccgaccgcttcgagggccgctacaagaccgtgtcggggaagatcgtcagccacgaggagatcgagcaccacatctcgagcatcctctccggcctctactccctcggcggtcatcgcgaccgcgtactgatcgagtaccgggtgacccccgaccagatcttcaagagcatcagctacgaaggtgtgccggacatccgcatcatcgtgctgatgggctacccggtgatggccatgttgcgcctgccgacccggcagtcgggcggcaaggccaacctgcaccagggcgccatcggcgtgggcgtcgacctggccaccggcgtcaccctgcgcggcacctggctgaacaacaagatcgccaagcacccggacaccaccaacgcggtggacggtgtgcaactgccgaactgggacggcttcatgaagctggcggccggttgctacgagttgtcgggcctcggctacatcggcgtggacatggttctcgaccaggagaaaggcccgctgatcctcgaactcaacgcccgcccgggcctgaacatccagatcgccaacgacagcggcctggtgcaccgctgccacgccgtcgaggcgcgactggaagaactcaaggcgaaaggcatcgaagagtccgcggaagagcgcgtacgcttctcccagcagctgttcggccacgtccagcagcaccagggctga

SEQ ID NO: 338480 - DNA, 1527 bp, Pseudomonas aeruginosa
atgcgctctctcaacctgcatctgaaagtcctgatcgccatcctgctgaccctgggtgtggcgatcaccgcctatcagattttcgtccagggtattcccgttaccgaagccgaaaccgatgacctctggaacatcgatgccaaggtcgacttcgtcgccacgccgaaaaccccggtcaaggtgcagatgttcgttccgccgttgagccaggactacgtcagcctcaacgaaagcttcgtctccaacaattacggcgtcagcatcaatcgcgccgacggcaatcgcaaggtgacctggtccgcccgccgcgccaacggcaagcagaccctgtactaccgcctggtgctgaccaagcgctacaccggcgagaagactaaggagaaaggcccgatcttccgcgacagcctgcccctggaaggcccggagaagatcgccgcagaagccctgctggcccccattcgccagcactcggccgacgtcgagaccttcgtcagcgaagccatcaagcgcgccaacaacggcaacgacgacaacgtcaagctgctgatggccggcgacaccagcctggaaaagaaagcgcatatcgtcgaaaccctgctgtccatcgcccacgtgccgatggagcgggtccataccatccgcctggtcgccgacctgcaacagagcccggaactgtggctgcgcagcttcaacggcgagaactggctgtatttcaacgtggtcaccggcgaacagggcctgccctccgatcgcctgatctggtggcttggcgatgagccgctgatgaccatcgacggcggcaagaaggcccaggtcagcttcagcctgaacagcagcgagatgaacgccatccgcctggccaagctgtccgacgagaacaccgaggcggccttcctcgagtactccctgtacggcctgccgctgtccacccagcagaccttccagatcatgatcatgatcccgatcggcgtgctggtgatcctgatcctgcgcaacctgatcggcctgcagaccctcggcaccttcaccccggtgctgatcgccctggccttccgcgagaccggcctgcaatggggtatcgccctgttcaccgtgatcaccgccctgggcctgtcgctgcgctcctatctcgagcacctgaagctgcagatgctgccgcgcctctcggtggtgctgaccttcgtggtggtgatgatcgcggtgatcagcctgttcagccacaagctcggcttcgagagcggcctgtcgatcgccctgttcccgatggtgatcctgaccatgaccatcgaacgcctgtcgatcacctgggaagagcgcggcggcggccacgcgatgaaggtggccatcggcaccctgttcgcggcatcgctggcgcacatcctcatgcgcatcccggaactggtgtacttcatcttcaccttcccggccgtgctgctgatcctggtcgccttcatgctcgccatgggccgctaccgcggctaccgcctgaccgagctgttccgcttcaaggccctgctcaaggactga

SEQ ID NO: 338481 - DNA, 540 bp, Pseudomonas aeruginosa
atgaaactcaagcccttagctcccctgctctgcctattcatcgccgtaccaggcctgagcgtagccgccgaaaagacggtctacggcctgaacgaatacgcgcgcatcaacgacccggacatccagctggccgccaagctcgacaccggcgccaagaccgcctccctcagcgcccgcgacatcaagcgtttcaagcgcgacggcgaaacctgggtgcgcttctacctggccaccgacaacgccgacgacaccccgatcgagaagcccctggcgcggatcagcaagatcaagcgccgccacggcgacttcaaccccgacgagggcaaggcctataccgcccgtccggtgatcgagctgcaggtctgcatgggcaaggcgattcgcaccatcgaagtgaacctgaccgaccgaagtgcattccaatacccgcttttgatcggctcggaggccttgaagaaattcgacgcactggtcgatccgagcttgaaatactcggccgggaaacccggctgcaaacctgatgcaaaacctgctgagtaa

SEQ ID NO: 338482 - DNA, 819 bp, Pseudomonas aeruginosa; identical to SEQ ID NO: 319059

SEQ ID NO: 338483 - DNA, 2376 bp, Pseudomonas aeruginosa
ttggtagagtacgtagtttccctcgataagctcggcgtccatgatgtagagcatgtggggggcaagaacgcatccctcggcgagatgatcagcaacctggccggtgccggcgtttccgtacccggcggatttgccaccaccgcccaggcctaccgtgacttcctcgagcagagtggcctcaacgaccgtatccacgcggccctggacgccctggacgtcgacgacgtcaacgccctggccaagaccggcgcgcagatccgccagtgggtgatggaagccgagttcccggcccgtctcgacagcgagatccgccaggccttcgccgccctggccaacggcaacgacaacctcgccgtggcagtgcgttcctccgctaccgccgaagaccttccggacgcctcgttcgccggccagcaggaaaccttcctcaatatccgcggcgtggacaatgtgatccgcgcagcaaaagaggtcttcgcctccctgttcaacgaccgcgccatcgcctaccgcgtgcaccagggcttcgatcacaagctggtcgccttgtccgccggcgtgcagcgcatggtccgctcggaaaccggcaccgccggggtgatgttcaccctggacaccgaatccggcttccgcgacgtggtcttcatcaccggtgcctacggcctgggcgagaccgtggtccagggcgcggtgaaccccgacgagttctacgtccacaagccgaccctggaagccgggcgtccggccatcctgcgccgcaacctgggtagcaaggcgatcaagatgatctacggcgacgaagccaaggccggtcgctcggtcaaggtagtggacgtcgatcgcgccgatcgcgcccgcttcgccctgagcgacgccgaggtcaccgagctggccaagcaggccatgatcatcgagaagcactatggccgcccgatggacatcgaatgggccaaggacggtgacgacggcaagctgtacatcgtccaggcacgcccggaaaccgtgaagagccgcgccagcgccacggtcatggagcgctacctgctgaaagagaaggggaccgtcctggtggaagggcgtgccatcggccagcgcatcggtgccggtccggtcaaggtgatcaacgacgtgtcggaaatggacaaggtccaaccgggtgacgtcctggtctccgacatgaccgacccggactgggagccggtgatgaagcgcgccagcgccatcgtcaccaaccgcggcgggcgtacctgccacgcggcgatcatcgctcgcgaactgggcatcccggcggtggtcggttgcggcaacgccacccagatcctgcaggatggccagggggtgaccgtttcctgtgccgaaggcgataccggcttcatcttcgaaggcgaactcggtttcgatgtgcgcaagaactcggtcgacgccatgcccgaccttccgttcaagatcatgatgaacgtcggcaatcccgatcgcgctttcgatttcgcccagttgccgaacgaaggcgtgggcctggcccgcctcgaattcatcatcaaccgcatgatcggcgtgcaccccaaggcattgctgaacttcgccggcctgccggcggacatcaaggaaagcgtggagaagcgcatcgccggctatcccgatccggtcggcttctacgtcgagaagctggtggaaggcatcagcaccctggccgcggcgttctggccgaagaaggtcatcgtgcgcctgtccgacttcaagtccaatgagtacgccaacctgatcggcggcaagctctacgagccggaagaagagaacccgatgctcggcttccgtggcgcctcgcgctacatcagcgagtcgttccgcgactgcttcgagctggagtgccgtgcgctgaagaaggtccgcaacgaaatgggcctgaccaacgtcgagatcatggtgcccttcgtgcgcaccctgggcgaggcgagccaggtggtcgagctgctggccgggaacggcctgaagcgcggcgagaacggccttaaggtcatcatgatgtgcgaactgccgtcgaacgccctgctggccgacgagttcctcgagttcttcgatggcttctccatcggttccaacgacctgacccagctgaccctgggcctggatcgcgattccggcatcgttgcccacctgttcgacgagcgcaatccggcggtgaagaagctgctggccaacgccatcgctgcctgcaacaaggccggcaagtacatcggcatctgcggccagggtccgtcggaccacccggacctggcccgctggctgatggagcagggcatcgagagcgtctcgctgaaccccgactcggtgctggatacctggttcttccttgccgaggggcaagaccaggcctga

SEQ ID NO: 338484 - DNA, 1011 bp, Pseudomonas aeruginosa
atgcaaagcagtagtcgcctctttcctgtcgccctggtcagcgccgagttgcgcgccgaccttaccgaagacatctatcgcctgaagcccggcaacagccccgatgccagcgtcgagctggtcgtaacccggcttggacagcaggccgccggcgagcggcgcggaccgcctgtgatcctcctgcacgggagtttttccaaccgccgcttctggtactcgccgcgtgcgctcggactaggtccttacctggcgcgggcggggttcgatgtctggctgccggaaatgcgcggccatggcctgtcgattcgcaacgatggttaccgggacaaccgggtcgccgactacgcgcgctacgacctgccggcgctggcctccttcatccacgagcagtgcgggcagccggcgcactggattggccactccctcggtggggtggtgctggcggcgggactgggcgggggttacctggatcaggcgcggatcgcttccgtggcgttgttcggtagccaggtcagcaccgcgcactggctgttcaggttgcccatggcaggcatcctcgcgcgcctgctgctgcgccgcgtcgatgcgctgtccggaagccgttggcggcaggggccggaagacgagccggtcggcctggcgctggaggtcctgcgttggcatgggctgttcggccgcttcggcgagccgggcaacgactggtggaaggggctcgccgcagtcgacgtaccgctattggcggtcgccggggctggggatcggcaggacccgtcctgggcctgtcgcaagttgttagagcagttcgcctcgtccgagcgcgaatacctgttgctcggacgcgaggctggctacgccgaggactacgggcatatcgagatgctgatcggcaaggcggcccagctagaggtctggcccttggtggagcgctggctgcgccagcgatcgccggcgggcgacgaatccgcgtggagcgaggcgctagacgtatcggaagccggaatcagcggctaa

SEQ ID NO: 338485 - DNA, 489 bp, Pseudomonas aeruginosa
atgcattacgtcactcccgatctgtgcgatgcctatcctgagctggtccaggtcgtcgaacccatgttcagcaacttcggcggccgcgactccttcggcggcgagatcgtcaccatcaagtgcttcgaagacaactcgttggtcaaggagcaggtcgacaaggacggcaagggcaaggtcctggtcgtcgatggcggtggttcgctgcgccgcgccctgctgggcgacatgctggccgagaaagcggcgaagaacggctgggaagggatcgtcgtgtatggctgcatccgtgacgtcgacgtgatcgcccagaccgacctcggcgtccaggccctggccagtcatccgctgaagaccgacaagcgcggcatcggcgatctgaacgtcgccgtgaccttcggcggcgtcaccttccgccccggcgagttcgtgtatgccgacaacaacggcatcatcgtttctccgcaggccttgaatatgcccgaatag

SEQ ID NO: 338486 - DNA, 999 bp, Pseudomonas aeruginosa
atgcaagcgtacgagtcgggtgacgagcgcggcctgatctatggctacgtcctcaacgggcgcggcggcggacgccgtgtcggacgcaaccagatagcggtgctcgacctgctgccggaggaaagcctttggctgcactgggaccgcggcgtgccggaagcgcaggcctggctgcgggattccgcggggctcagcgagttcgcctgcgatctgctgctggaggaggcgacccgcccccgtttgctcgatctcggggccgaaagcctgctggtgttcctccgtggagtgaacctgaatccgggcgcggagccggaagacatggtttcgctgcgggtattcgccgacgcgcgccgggtgatctcgctgcgcctgcggccgctgaaggcggtggccgatctgctcgaggacctggaggcggggaaagggccgaagacagcatccgaggtcgtgtactacctcgcgcactacctgaccgatcgcgtcgacacgctgatcagcgggatagccgaccagctcgatgctgtcgaggagctggtcgaggcggacgagcgcgccagtcccgaccagcaccagttgcgtaccctgcgccgccggtcggcggggttgcggcgctacctggcgccgcagcgggacatctactcgcaactggcgcgctacaagctgtcctggttcgtcgaggacgacgccgattactggaacgagctgaacaaccggctgacgcggaatctcgaagaactcgagttgatacgggagcgcatcagcgtcctgcaggaagccgagtcgcggcgaatcaccgaacggatgaaccgcaccatgtatctccttggtataatcaccggctttttcctgccgatgagcttcgtcaccggcctgctgggaatcaatgtcggcggcattccgggggcggatgcaccgcatgggttctggctggcctgcctgctgatcggcggggtcgccaccttccagtggtgggtatttcgtcggctgcgctggctctga

SEQ ID NO: 338487 - DNA, 249 bp, Pseudomonas aeruginosa
atgcacgatccgttcgaagagtccctgcgggacctgctcaaggcttcggctccccagccggacgacgacgcgcgtctgggacgggtgctgaagaccgccaatcgccaggtcggcgccggtgacctgttcagcctcatggggcactggctgcaggcgctgatgatcggcatcaacaacggttcgccgcatctggcgccggtttcccgtatttccgcgaaaaacgcatcttctgctgacaaggctgagtga

SEQ ID NO: 338488 - DNA, 825 bp, Pseudomonas aeruginosa
atgcaattcgatatctggacccagagcttgctgaccgcgatgaacaccctgtggggcaagctggcaggcttcatccccaacctgctcggcgccctggtggtcgttctgctcggcttcgtcatcgccaagctgctcgatgcgctgctttccaagctgctggccaagctgggcctggaccggctgatgggtggcaccggcctgaccaagctgctggcccgggtcggtatccaggttccggtctcgacgctggtcggcaagatcgtctactggttcgtgctgctcgtcttcctcgtatccgccgccgagtcgctcggcctgcagcgggtatccgccacgctggacgtcctcgccctgtacctgcccaaggtgttcggcgcggccctggtgctgatcgtcggcgtgctcctggcgcaactggtgaacagcgtcgtgcgcggcgcagcggacggcgtcggcctcgaatacgcgaacggcctggggcggatcgcccagtggctggtcatcatcatcagcatctcggtggcggtggggcagctcgaggtcaagaccgacctgctcaactacatcatcgccatcgtcctgatcaccgtcggcctggccgctgcgctggccctgggcctgggcagccgcgaggtcgccgggcagatcattgcaggaatctacgtccgcgagctgtatcaggtcggacaacaggtgaaagtgggtgacgttgaaggcactattgaagagataggtacggtcaagaccatcctgctgacggaagagggagagcttgtgtcgctggccaaccgtctactgctcgatcagcgagttaccagccgctga

SEQ ID NO: 338489 - DNA, 498 bp, Pseudomonas aeruginosa
gtgacgcgcgcctatgaagaactgatgcggcgttaccagcgcacgctgttcaacgtctgtgcccgctacctgggcaacgaccgcgacgcggacgacgtgtgccaggaggtgatgctgaaagttttgtacgggttgaagaactttgagggcaagtcgaagttcaaaacgtggctatatagcatcacgtacaacgagtgcatcacgcagtaccgcaaggagcgccgcaagcgccgattgatggatgcgctcagcctcgacccgctggaggaggcttccgaggagaagtcgccgaaggttgaggagcggggcggattggatcgttggctcgtccatgtcaatccgatagatcgggagattctggttcttcgcttcgtcgcggaactggagtttcaggagatagcggatatcatgcacatgggtctgagtgcgacgaaaatgcgctacaagcgggcactggaccgcctgcgcgaaaagttttcagatgcgaccgaaacatag

SEQ ID NO: 338490 - DNA, 1053 bp, Pseudomonas aeruginosa
atgaaactgaagaacaccttaggcgttgtcatcggctcgctggttgccgcttcggcaatgaacgcctttgcccagggccagaactcggtagagatcgaagctttcggcaagcgctacttcaccgacagcgttcgcaacatgaagaacgcggacctgtacggcggctcgatcggttacttcctgaccgacgacgtcgagctggcgctgtcctacggtgagtaccatgacgttcgtggcacctacgaaaccggcaacaagaaggtccacggcaacctgacctccctggacgccatctaccacttcggtaccccgggcgtaggtctgcgtccgtacgtgtcggctggtctggctcaccagaacatcaccaacatcaacagcgacagccaaggccgtcagcagatgaccatggccaacatcggcgctggtctgaagtactacttcaccgagaacttcttcgccaaggccagcctcgacggccagtacggtctggagaagcgtgacaacggtcaccagggcgagtggatggctggcctgggcgtcggcttcaacttcggtggttcgaaagccgctccggctccggaaccggttgccgacgtttgctccgactccgacaacgacggcgtttgcgacaacgtcgacaagtgcccggataccccggccaacgtcaccgttgacgccaacggctgcccggctgtcgccgaagtcgtacgcgtacagctggacgtgaagttcgacttcgacaagtccaaggtcaaagagaacagctacgctgacatcaagaacctggctgacttcatgaagcagtacccgtccacttccaccaccgttgaaggtcacaccgactccgtcggcaccgacgcttacaaccagaagctgtccgagcgtcgtgccaacgccgttcgtgacgtactggtcaacgagtacggtgtagaaggtggtcgcgtgaacgctgttggttacggcgagtcccgcccggttgccgacaacgccaccgctgaaggccgcgctatcaaccgtcgcgttgaagccgaagtagaagctgaagccaagtaa

SEQ ID NO: 338491 - DNA, 327 bp, Pseudomonas aeruginosa
atgaactggctggatatctgcgccctcgatgaaatcaacccgctgggctcgcgcgtggtcgccggcccgaaaggcgacatcgccatcttccgcgccgccgacgaccaggtcttcgccctcgatgaccgctgcccgcacaagggcggcccgctgtcccagggcctgatctacggcaagcgagtggcctgtccgttgcacaactggcagatcgaactggagagcggcgaagccgtggccccggaccagggctgcgcccatcgccacccggtgcgggtggagaacggacgggtgctgctcggcctggacagcgtggcgctgtgcgcctga

SEQ ID NO: 338492 - DNA, 2451 bp, Pseudomonas aeruginosa
atgaagaagatcaagctggtgatggtcggcaacggcatggccggggtccgtaccctggaagaactgctcaagctcaactcggacttctacgacatcacggtgttcggcgccgagccccatcccaactacaaccgcatcctgctgtccccggtactggccggcgagcagaccttcgaggaaatcgtcctcaacgacctcaactggtatgcggaaaacggcatcaagctcctcctcgaccgcaaggtggtgcagatcgaccgggtccgccgcagggtggtcgccgcggacggcagcgaggccgagtacgaccgcctgctgctggccaccggctcggtcccctttatcctgccgatacccggcaatcggctgcagggcgtgatcggctaccgcgacatcgccgacacccaggccatgatcgactgcgcccggacccacagccacgcggtggtgatcggcggcggcctgctcggcctggaggcggccaacggcctcaagcaacgcggcatggacgtgaccgtcgtgcacctctccgactggctgcttgaacgccaactggaccgcaccgccggcaaactcctgcaaggcgcgctggaagcccgcggcatccgcttccgcctgaacacccagacccaggaactgatggacaacggcagcggccgggtctgtgccgtgcagttcaacgacggcgacgtgattcccgccgacctggtggtaatggccgccggcatccgccccaataccgagctggccgaaagcgcgggcatcccctgcaaccgcggcatcctggtcaacgacaccctgcagacctacgacccacgcatctatgcggtcggcgaatgcgccaaccaccgtggcatcgcctacggcctggttgcgccgctgttcgagcaggccaaggtctgcgccaaccacctggctcatctcggttacgcccgctaccagggctcggtgacctcgaccaagctcaaggtgaccggtatcgacctgttctccgccggcgacttcatcggcggcgaaggcagcgagaccatcaccctttccgaccccatcggcggcgtctacaagaagctggtgatcaaggacgatgtactggtcggcgcctgtctctacggcgacaccgccgacggcggctggtacttccggcagatccgcgagaaccataacgtcgcgcagatccgcgaccacctgatgttcggcgagaacgccctcggcgatgtcggccaccagggccagaacagcgccgcgagcatgcccgacacagccgaagtatgcggctgcaacggcgtctgcaagggcaccatcgtcaaggccatacaagaacacggcctgttcagcgtcgacgaagtcaagaaacacaccaaggccgccagctcctgcggctcctgcgcgggattggtggaacagatcctgatcagcaccgtcggcggcgccgccgacgtcaagccgaagagcgagaaggccatctgcggctgcagcgacctcaaccacgggcagatccgcaaggccattcgcgaacaccggctgaccagtctcgacgccgccatgcgcttcatggactggaagaccccgaacggctgtgccacctgccgcccagccctgaactactacctgatctcgacctggccgggagaagccaaggacgatccgcagtcgcgcctgatcaacgaacgcgcccacgccaacatccagaaggacggcacctactcggtggtaccgcggatgtggggcggcgtgaccaacgccgccgagttgcggcgcatcgccgacgtcgccgacaagtaccaggtgccgatggtcaaggtcaccggcggccagcgcatcgacctgctgggggtgaagaaggacgacctgccggccatctggaaagacctcgacatgccctccggacatgcctacggcaaatccatccgcaccgtgaagacctgcgtcggcagcgagttctgccgcttcggcacgcaaaactcgacgcagttgggcatcgatctggaacacgacctgttcaacatgtggtcgccgcacaaggtcaagctggcggtctccggctgcccgcgcaactgcgccgaggccgggatcaaggacgtcggcatcatcggcgtggactccggctgggagatgtacatcggcggcaacggcgggatcaagaccgaggtcgcggagttcttcgtcaagctcaagaccgccgaagaggtgcgcgaatacaacggcgccttcctccagctctaccgcgaggaagccttctacctggagcgcacggtgcattacctgcagcgggtcggcatggagcacatccgcaaggcggtggtcgaggacgcggaaaaccgcaaggcgctcaacgaccgcctgcaattcgccctgtccttcgagcaggacccatggaagcagcgcatcgaacagccgcaattgaagaaggagttcgaacggattccgctcaagcaactggaaaacgtctga

SEQ ID NO: 338493 - DNA, 1596 bp, Pseudomonas aeruginosa
gtggtcaccccggcgccggccctggccgccagcaagggacacctgctggccatcgccgacggtgtcagccagtgcgccgatggcggcctggcggcgcgcagcagcctgcaagcgctggccctggattactatgcgactccggaaacctgggccatcgtgcagtccctggaccgcctgctgctggcgcagaaccgctggctacaggccaacggcggcggccagccgctgctcaccaccctcaccgccctggtgctgcgcggcacccgctacaccctggcccacgtcggcgattgccgggcctacctgtggcgcgacggcgagttgctccggcagaccagcgaccacgtctgggaacagccgcacatgcaacacgtgctgacccgcgccctgggactggaccagcatctggtggtcgactatctggaaggcgatctggagcccggcagccagtggctactggtcagcgacggcgtctgggcgacgctgggcgacagcggcatccgcagcatcctgcgcaacgccgaagagccgcagcgcagcgccgaggctctggttcgcgccgcccacctggcaggcagccaggacaacgccagcgccctgctggtgcgcgtggaagccgtgcccgcaggcagcctcggcgacgccctcgcgcaactgggccactggccactgccgccaccgctgaagcccgaccagctcttcgaaggctggcgggtccggcagttgctcggcgaatcccgccagtccctgctctaccgggtcgaggatggccagggccaaccctggctgctgaagacccttcccgccgcacgtgccgacgatccgctggcaacccaggccctgctgctcgaggaatggttcctgcgccgcgtccagggccggcatttccccgagctgcacggattggcgcaacgccagcatctgtattacctgatgcgcgagcaccccggagagactctcgccgagcgcttgcgcaaccatggcccgctgtcgctgccggagtggctggggctggccaaccagctgctgcgcgggcttggccagttgcatcgacgcaacctgctgcaccgcgacctcaagccggaaaatctccacctcggccgcgacggcgagctgcgcctgctggatttcggcctggcctggtgtccgggattgtcgcgcgaagacccccatctgctaccgggtacgcccagctacctggcgccggagtgcttctccggcacctcgccctcggtgcgccaggatctctacgccaccggcgtctgcctctaccaggcgctgaccgggcgctatccctatggcgagatcgaagccttccagcacccgcgcttcggtcgccccgtcccgcccagccgctatcgccccgacctgccggcctggatcgacgacctgctgctgcgcgccgtcgcctgcgaccccgcacagcgcttcgagaccgccgaggaatggctgctctcgctgcaacagggagaagcgttgccggtcgcggcgccccgcccattgctggagcgcgaaccgctgcagacctggcgcgccatcgccctgctgtccctggccgccaacctggcgctactcctggtctggctgaagggctga

SEQ ID NO: 338494 - DNA, 1212 bp, Pseudomonas aeruginosa
atgaacaacagcttctggaaggccggccatgcgccgaccctgttcgcggcgtttctctatttcgacctgagcttcatggtctggtacgtgctcggcccgctgggggtgcagattgccggcgacctgcaactgagcacccagcagcgcgcgatgatggtcgccacgccgatcctcgccggcgccgtactgcgcttcctgctcggcctgctggccgatcgctggtcgccgaagagcgccggcatcctcgcccaggtcatcgtcatcgccgccctcgcggccgcctggctgctgggcgtgaacagctatgcgcaggcactgctgctggggttgttcctcggcttcgccggggcatccttcgccgtggccctgccgctcgcatcgcaatggtacccgccgcaacaccagggcaaggccatgggcatcgccggcgcgggcaactccggcaccgtgctcgccgccctcttcgcccccggcctggccgccgcgttcggctggaacaacgtgttcggcttcgccctgctgccgctcgtcctgaccctcctggtgttcgccatggtcgcgcgcaacgccccgcagcggccggcgcccaaggccatgggcgattacctgaaagccctcggcgaccgcgacagctggtggttcatgttcttctacagcgtcaccttcggcggcttcctcggcctggccagcaccctgcccggctatttccacgaccagtacggcctgaacccggtgaccgccggctactacaccgccgcctgcgtcttcgccggcagcctgatgcgcccgctcggtggcgccctcgccgatcgcatcggcggcatccgcagcctgctgatggtgtacaccctggccgccatctgcatcgccgcggtcggtttccacttgtccagctcgatggccgccctcggcctgttcgtggtcgccatgctcagtctcggtgccggcaatggcgcggtgttccagttggtaccgcagcgcttccacaaggaaatcggcgtgatgaccgggctgatcggcatggccggcggcatcggcggcttctgcctgactgccggcctcggcgcgatcaagcaaagcaccggcgactaccagctcggcctgtggctgttcgccagtctcggcgtgctggcctggttcggcctccacggggtgaagcggcgctggcgcaccacctggggctcggccgcggtcaccgccgcgcgggtctga

SEQ ID NO: 338495 - DNA, 1209 bp, Pseudomonas aeruginosa
atgacagacagagcgatacgcagccaggcctgggccggcggttccgacgcaccggaaaagagcgccctggacatcggtttcatggcgctgaccgattcggcctcgctgatcgtggccgccacccagggcttcgcccagccctacggcctcacgctcaatctcaggcgccaaccgtcctgggccgccttgcgcgacaagctgctcagcggcgagctggatgccgcgcagtgcctgtacgggctggtctacggcgtccagctcggcctcggcggcagcgcggcaagcgagatggcggtgctcatgggactgtgccagaacggccaggcgatcaatctttccgaaccgctgaagcaggctggcgtgaccagtgcggaggcactgctccggcagcggcgccagaatggtgcacgcctgaccctggcgcagacctttcccaccggtacccacgcgctctggctgaactactggctggcgagcatcggtctgcatccgctgcacgacgtgcacagcgtggtggttccaccggcgcagatggtcggccatctccaggccgggcgcatcgacgggttctgcgccggcggtccctggggcgccctggccgtggaccagggccagggcttcaccatcgccaccagccaggcgatctggccggaccacccggaaaaggtcctcggcactacccgcgccttcgtcgacgcctacccgaacaccgcccgcgcgctggtcatggcggtcctcgacgccagccgcttcatcgaacagaacgccgagaaccgcctgggcaccgcgcaactgatcagcggccgcgactatgtcgacgctccgctcggcgcgatccagccgcgcttcttcggccgctaccaggacggcctcggcaacgcctggcaggacccgcatccgctgcgtttctacgccgacggcgaagtcaaccggccctggctctcggatggcatgtggttcatgactcaattccgccgctggggcctgctgcgcgaagacccggactacctgggcatcgcccgcagggtccagcagaccgcgctgtaccgcgatgccgcgacggcccttggcctgtgcctggacggcgccgacatgcgccgctcgacactgatcgacgggcgcacctgggacggcagcgaccccgccggctacgcccgcagcttcccgatccacgccctggccgaaaccggccagggcatcgacctctga

SEQ ID NO: 338496 - DNA, 2610 bp, Pseudomonas aeruginosa
gtgcttgaagcctaccgcaaacacgtagaagagcgtgccgcccagggtgtcgtgccccaaccgctgaacgccgaacagaccgcaggcctggtcgagctgctgaagaacccgccggccggcgaagaagaattcctccttgacctgatcaccaaccgcgtaccgccgggcgtcgacgaagccgcctacgtcaaggccggtttcctttccgccatcgtcaagggcgaagccacctccccccttatcgacaagcaacgtgccgccgagctgctgggcaccatgcagggcggctacaacatcgccaccctggtcgagctgctggacgacgccgaactggccaacaccgccgccgaacagctgaagcacaccctgctgatgttcgacgccttccacgacgtcgccgagcgcgccaagaagggcaatgccgcggccaagtccgtgctgcaatcctgggccgatggcgagtggttcaaggccaagccggaagtcccggaaaagctgactctcaccgtattcaaggtccccggcgaaaccaacaccgacgacctctccccggcccccgacgcctggtcgcgcccggacatcccgctgcacgccctggccatgctgaagatggcccgcgacggcatcgagccggtccagccgggttcggtcggtccgctgaagcagatcgaagcggtcaaggccaagggcttcccggtcgcctacgtcggcgacgtggtcggcaccggttcctcgcgcaaatccgccaccaactcggtgctgtggttcttcggcgacgacattccgttcgtgccgaacaagcgtgccggcggcttctgcttcggcaccaagatcgcaccgatcttctacaacaccatggaagatgccggcgccctgccgatcgagttcgactgcaccaacctggccatgggcgacgtcatcgacgtatacccctatgaaggcaaggtcgttcgccacgacagcggcgaagtggtcaccaccttcgagctgaagaccccggtcctgctcgacgaagtccgcgccggcggccgtatcccgctgatcgtcggccgtggcctgaccgagaaggcccgcgccgagctgggcctgggcgcctccgacctgttccgcaagccggaagcaccggccgatagcggcaagggcttcaccctggcgcagaaaatggtcggccgcgcctgcggtctgccggaaggccagggcgtgcgcccgggcacctactgcgaaccgaagatgaccaccgtcggttcccaggacaccaccggcccgatgacccgcgacgaactgaaggacctcgcctgcctcggcttctccgccgacctggtgatgcagtccttctgccacaccgcggcctatccgaagccgatcgacgtcaagacccaccacaccctgcccgacttcatcatgacccgtggcggcgtgtcgctgcgcccgggcgacggcatcatccacagctggctgaaccgcatgctgctgcccgataccgttggtaccggcggcgactcgcacacccgcttcccgatcggcatctcgttcccggccggctccggcctggtggccttcgccgccgccaccggcgtgatgccgctggacatgccggagtcggtgctggtgcgcttcaagggcaagctgcaaccgggcatcaccctgcgtgacctggtccatgcgatcccttactacgcgatccagcagggcctgctgaccgtcgagaagaaaggcaagaagaacatcttctccggccgcatcctcgagatcgaaggcctcaacgacctgaccgtggagcaggccttcgagctgtccgacgcctcggccgagcgttccgccgccggctgcaccatcaagctgccggaacaggcgatcgccgagtacctgaagtccaacatcaccctgctgcgctggatgatcggcgaaggctacggcgacccgcgcaccctggagcgtcgcgcccaggcgatggaagcctggctggccaagccggagctgctggaagccgacaaggacgccgagtacgccgcggtgatcgagatcgacctggccgacgtcaaggagccggtgctctgcgcgccgaacgatccggacgacgcgcgtctgctgtcgagcgtacagggccgcaagatcgatgaagtgttcatcggctcctgcatgaccaacatcggtcacttccgcgccgccggcaagctgctggacaaggtcaagggcggtatcccgacccgtctgtggctagctccgccgaccaagatggacgcccaccagctgaccgaggaaggctactacggcatctacggcaaggctggcgcgcgcatggaaatgccgggctgctcgctgtgcatgggcaaccaggctcgcgtccagaccggttccaccgtggtctccacttcgacccgtaacttcccgaaccgtctgggcgatgccaccgatgtgttcctggcatcggccgagctggcggcggtctcctcgatcctcggcaaactgccgaccgtggaggagtacatggcctacgcgaaggacatcgacagcatggctgccgacgtctaccgctacctcagcttcgaccagatcgccgagttccgcgaagcggctgcgaacgccaagatcccggtcgtccaggcctga

SEQ ID NO: 338497 - DNA, 468 bp, Pseudomonas aeruginosa
atgtcttcgcaaagaatcaaaaccccctgcgtagggctttgctccacggtatacggcgacctggtatgccgtggctgcaagcgtttccaccatgaggtggtcaactggaacctctacgacgccgaggaaaagcgggctgtctggagtcgccttgagcagttgctggcccaggtgatggccgccaagctggaagtcttcgacgccgcgcgcctgcgcctgcaactggagcagcggcagatccgtttcgtccccgagcagtccccctattgctgggcctaccagttgatcgcccgcggttcccggctgatcaaccagatcgaagcctacggcgtggcactgctgccggaattccgcgactggagcctgccggacctgcgcgatgccatcgaccgggaattcttcctgctgtcggaagcgcattaccagcgctacatcgcgccctcgttcctgcaggcgatcgacagatag

SEQ ID NO: 338498 - DNA, 864 bp, Pseudomonas aeruginosa
atgcaagccattcgcagcatcctcgtggtgattgaaccggaccagctggaaggtctcgccctgaaacgggcacaactgatcgccggcgtgacccagtcgcacctgcacctgctggtctgcgagaagcgccgcgaccacagcgccgctctcaacgacctggcccaggagctgcgcgaggaaggctacagcgtctcgaccaaccaggcttggaaggactccctgcaccagaccatcatcgccgagcaacaggccgaaggctgcgggctgatcatcaagcagcactttcccgacaacccgctgaaaaaggccatcctcaccccggacgactggaagctgctgcgcttcgcgccctgtccggtactgatgaccaagaccgcccggccctggacgggcggaaagatcctcgccgcggtcgacgtcggcaacaacgacggcgagcaccgctccctgcacgccgggatcatcagccatgcctacgacatcgccggcctggccaaggccacgctgcacgtgatcagcgcccacccctcgccgatgctctcctctgccgacccgaccttccagctcagcgaaaccatcgaggcccgctatcgcgaggcctgccgcaccttccaggccgagtacggtttcagcgacgaacaattgcacatcgaggaaggtccggccgacgtgctgatcccgcgcaccgcgcagaagctcgacgcggtggtcaccgtgatcggcaccgtggcgcgcacagggttgtccggcgcgctgatcggcaataccgcggaagtggtgctggataccctggaaagcgacgtgctggtgttgaagccggacgacatcatcgcccacctggaggagctggccagcaaggagtga

SEQ ID NO: 338499 - DNA, 612 bp, Pseudomonas aeruginosa
atgttgcccgagatcgaccaattccttgcctgttccactcccgccgcctgggtcgaggcggccctggagcgccaggacgtcatgctgctggaccacaaggcctgcgagatgaaggccgcggcgacggcgatgcaactgatcggcaagtactccggccgcctggacctggtgaacaagatgagccgcctggcgcgcgaggagctgcgccacttcgagcaggtgctggcgatcctgaagaaacgcggtatcccggtggtcaatgtcagcgcctcccgctacgcctcggcgctgcgcgacctggtgcgcaagcaggagccgcagcggctgaccgatacgctggtggtcggcgccttcatcgaggcgcgttcctgcgagcgcttcgccgccctggtgccgcacctggacgcggagctggcgaaattctacggcggtttgctgaagtccgagtcgcggcatttccaggactacctgaagctggcctaccagtacggcgacgaggccgacgtggagcgcacgatcgaggtggtgcgggccaaggaggccgagctgatcagcagtccggacaacgaattccgcttccacagcggcgacccggtggacctggtggcctga

SEQ ID NO: 338500 - DNA, 1332 bp, Pseudomonas aeruginosa
gtgatcatctcgaagggaaacctgatcaagttcgtcgccgcccccctcggcatgctcgccctcggcttcggcctgttcaacggcgtgttcttctataacgaagccggcttcatgacccacgtaaggaccatcttcggcgacgagaagatcgtcgatgacgtcggctacgcgaccaagtggttcggtcgcgccaccacctggaagaaggccatcagcgtgcagtccgtactggtcatggacgataacgacaccaatccggacaacgacggcctcggcgccaccatcgaggctttcccgatcgtgttcctcggcaacgtcgacgccaaggtcgaatcttccgcgcgctttcgcctgcccggcggcgagccgttcctgaagatggcccaggaataccgcaacccggacaatttcatccgcaccgcactggtgccggcgatcaaggaaaccctccaggccaccgcttcgctgatgagcgccgacgactactacgccggagcccgcagcgaattcgccgccgagttcgagaaccagctcaacgacggcctgtacctgatcaagcgcaaggaagtccgtgggccgcgcggcgccattccgcaccagaccgcgatcctccaggccggcaccgagcagggagcgttcggcgacaacaacgccagccagttcgtcaccgagaaggtcaccgatgccaagggcatcccggtacgcaagcaacagcagttccgcaagttcggcgtcgaggtggtggaagcgcggatcaccaacgtcgatcccaacccgcagtacaagcagcgcatggtcaaggtccagcaggcgctcgccgagctggcggtggcgcggcagaaccgcctgaaggaagaagaggaaaagctgctggtcaccgcccgcggcgagaaggaagtcgaggccaagcgccaggaaaccctgcgcgaccagatcgaacgcaccacccaggcggaaaccgacaagcaattggcggtgatcaacgccgagcgcgagaagcagcgcgccgagatcgagaagcagaccgccgaactgctgcgcgacaaggccacggtgaccgcccaggccaccaagatcaccgccgacgccgaggcttacgcccgcgaagcggtgatcaaggcggacggcgcgttgcagccgaagctcgacgcgctgatcgcgatcaacaaggtctgggccgaagccgccgcccaggcccccgtccccagcgtaatgatgggtgccggcgccaacggcgcggcgagccgccaggacgagatcggccagctgatgggcgttctggcgaccaaggccgcccgcgacctggccctcgacctcaaggtcaaggactga

SEQ ID NO: 338501 - DNA, 723 bp, Pseudomonas aeruginosa
atgagcgtcctgttcatctcggacctgcatctcgaagcggaacgcccggacatcacccgggcgtttctgtctttcctcgatgagcgcgcccgccgggccgaggccctgtacatcctcggcgacttcttcgaagcctggatcggcgacgacggcatggacgccttccagcgctccatcgcccagtccctgcgccaggtggccgacggcggtacgcgcatctacctgatgcacggcaatcgcgacttcctcattggcaaggcgttctgccgcgaggccggatgcacgctgctgcccgacccgagcgttatcgacctgtacggcgagccggtattgctgatgcacggggacagcctgtgcacccgagacgaggcctacatgcgcctgcgccgctggctgcgcaacccgctcacgctctgggtactgcgccacctgccgctggccacccggcacaagctggcacgcaagctgcgcaaggaaagccgcgcgcagacccgcatgaaagccgtcgacatcatcgatgtcacgcccgaagaagtgccccgggtcatgcgcgggcatggcgtgcgtaccctgatccacggccacactcatcggccggccgaacacccgctggacatcgacggccagcccgcccggcgcatcgtgctcggcgactgggaccgccagggctgggccctggagatcgacgccaacggccatcgccaggcgcccttcccgctctga

SEQ ID NO: 338502 - DNA, 498 bp, Pseudomonas aeruginosa; identical to SEQ ID NO: 319036

SEQ ID NO: 338503 - DNA, 1671 bp, Pseudomonas aeruginosa
atgagcaagccagagaccaccgccgccccgaacttcctgcgccagatcgttcaagccgacctggatgccggcaagcacgcgaagatcgtcacccgtttccccccggagcccaacggttacctgcacatcggccacgccaagtcgatctgcctgaacttcggcctggcccaggaattcgctggcgattgccatctgcgcttcgatgacaccaacccggccaaggaagaccaggagtacatcgatgccatcgaggccgacatcaagtggctgggcttccagtggtccggcgaggtctgctatgcctccaactatttcgaccagttgcatgcctgggccatcgagctgatcaaggccggcaaggcgttcgtctgcgacctcggtcccgaggaaatgcgcgaataccgcggcaccctcaccgagccgggccgcaacagcccttaccgtgaccgttcggtggaggagaacctcgacctgttcgcccgcatgaaggccggtgagttccccgacggcgcccgttcgctgcgggcgaagatcgacatgggttcgccgaacatgaacctgcgcgacccgatcctgtaccgcatccgccatgcgcatcaccaccagaccggcgacaagtggtgcatctacccgagctacgacttcacccacggtcagtcggacgccatcgagggcatcacccattcgatctgcaccctggaattcgaagaccatcgtccgctctacgagtggttcctggccaacctgccggtacctgcgcaaccgcgccagtacgaattctcccggctcaacctgaactacaccgtgaccagcaagcgcaagctcaagcaattggtcgacgaaggccatgtcagcggctgggacgatccgcgcatgtcgaccctgtccggctatcgccgccgcggctacaccccggagtcgatccgcaacttctgcgagatgataggggtgaaccgtgccagcggcgtggtcgacatcggcatgctcgagttcagcatccgcgaccacctggacgccaccgcgccgcgtgccatgtgcgtgctgaaaccgctcaaggtggtgatcaccaactaccccgaagggcaggtggagaacctcgagttgccgcgtcatccgaaggaagacatgggagtgcgcgtactgccgttcggtcgcgagctgttcatcgatgccggtgacttcgaggaagtcccgccggccggctacaagcgcctgatccccggtggcgaggtgcgtctgcgcggcagctacgtgatccgtgccgacgaagcgatcaaggatgccgacggcaatatcgtcgaactgcgctgcagctacgatccggacaccctgggcaagaacccggaaggccgcaaggtcaagggcgtgatccactgggtgccggccgagggcagcgtcgagtgcgaagtgcgcctgtacgatcggctgttccgctcggccaatccggagaaggcggaagagggcggcagcttcctcgacaacatcaacgccgactccctgcaggtactggccggctgtcgcgccgagccgtcgctgggccaggcgaacccggaggatcgcttccagttcgagcgcgaaggctatttcgtcgccgacctgaaggactccaggccgggcaagccggtgttcaaccgtaccgtcaccctgcgtgactcctggggacagggctga

SEQ ID NO: 338504 - DNA, 1383 bp, Pseudomonas aeruginosa
gtgctgcagatctacaacacgctgagcaagaccaaagaagtcttcacgccgctggtcggcaaccaggtacgcatgtacgtgtgcggcatgaccgtgtacgactactgccatctgggccacggccgcagcatggtggcgttcgacgtgatcacccgctggttgcgccaccgtggctacgacctgacgtacgtgcgcaacatcaccgatatcgatgacaagatcatcaatcgcgccaacgagaacggcgaaccgttcgatgtgctgaccgagcgcatgatcgcggcgatgcacgaggacgaggcccggctgaacatcctcaagccggaccaggagccgcgcgccaccgatcacatcgccggcatgcacgcgatgatccagaccctgatcgacaagggctatgcctacgcgccgggcaacggtgacgtgtactaccgggtcggcaagttcgctggctacggcaagttgtcgcggcggcgggtcgaggacctgcgcatcggtgcgcggatcgaaccgggcgaagcgaaggaggatccgctcgatttcgtgctctggaagggcgccaagccgggcgagccgagctggtcgtcgccctggggcgaggggcgcccgggctggcacatcgaatgctcggtgatgtccacctgctgcctgggcgattccttcgacatccatggcggtggcaacgacctggagttccctcaccacgagaacgagatcgcccagagcgaggccgcgactggcaagccctacgccaagtcctggctgcactgcgggatgattaccatcaacggcgagaagatgtccaagtcgctgggcaatttcttcaccatccgcgaagtgctggagaaatatcaccccgaagtggtgcgttacctgctgatcgccagccattaccgcagtccgatcaactactcggaggagaacctgcgcgaggccaaggcggccctggaccgtttctacaacgcgctcaaggggctgcccgaggcggcgccggcggaagcggcggagtatgtcgagcgcttcgccgcggcgatggacgacgacttcaataccgcgggtgcctgctcggtgctgttcgagctggcgcgggaggtcaatcgtctgcgcgaaagcgacctgtcggcggcggccgcgctggccgcgcgcctgaagcagttggctggcctgctgggggtgctgcaactggagccggaagccttcctgcaggcgggcgccgagggcaaggtcgatgcggccgaggtcgaggcgctgatccaggcgcgcctggaggcgcgggcggcgaagaactgggcggagtccgaccggattcgcgatcggctcaccgccatgggcgtcgtgctggaggatggcaagggcggcactacctggcgcctggccgactga

SEQ ID NO: 338505 - DNA, 855 bp, Pseudomonas aeruginosa
atgaccgcacaactgatcgacggcaaagcgatcgccgccaaccttcgccagcagatagcccaacgcgtgaccgagcgccgccagcaaggcctgcgcgttcccggcctggcggtgatcctggtcggcaccgatccggcctctcaggtctatgtggcgcacaagcgcaaggactgcgaggaagtcggctttctctcccaggcctacgatcttcccgccgaaaccagccaggacgacctgctggccctgatcgaccgcctgaacgacgacaccgccatcgacggcatcctggtccagctacccctgcccgcccacctggacgcctccctgctgctggagcgtatccacccggacaaggacgtggacggtttccatccctacaacatcggccgcctggcccagcgcatgcccctcctgcgcccctgcaccccgaaaggcatcatgaccctgctcgccagcaccggcgccgacctgtacggcatggatgcggtcgtggtcggcgcctcgaacatcgtcggccgacccatggctctggagttgctgctgggtggctgcaccgtcaccgtgacccaccgcttcacccgcgacctggccgaccatgtgtcgcgcgccgacctggtggtggtcgctgccggcaagccgggactggtcaagggcgagtggatcaaggaaggcgccatcgtcatcgacgtcggcatcaaccgccaggccgacggccgactggtcggcgacgtggaatacgaagtggcagcgcaacgcgccagctggatcaccccggtgccgggcggcgtcgggccgatgacccgcgcctgcctgctggaaaataccctgcacgccgccgaacacctgcacgactga

SEQ ID NO: 338506 - DNA, 222 bp, Pseudomonas aeruginosa; identical to SEQ ID NO: 328487

SEQ ID NO: 338507 - DNA, 1287 bp, Pseudomonas aeruginosa
atgctgcgcctgttcctgcgcctctacctgctgctggccctggggttcgccgccgcgatcttcgtggtcgaccatgtcatcgacgcgttctacgacagcatcgtcgagaactatcaccgcgacgccgttcgcggccaggcctattcgctggtggaaaagctggccccgctggaccaggccggacgccagcgacagctcgaagactggcgtccccactacgggctcgagctgagcctgacggatgccaggcaggcgaagctgacgcaggaagagcaggccctcctcgacaagaacctgctggtggtacgcgaggacttcacggaattcatcagccgcatcgacgcgggcccgcaactgctcgacatcaagctgccgccggaaccctcgctgaccccactattcaccgtgctggcctacatcctgctcggcgtgctggtcggcatcgccctgctggtatgggtccgcccgcactggcgcgacctcgagaccctgcgcctggccgcgcaacgcttcggcgacggcgacctgtcatcgcgcacgcgcattttccgacgctccgacatccgcaccctggcccagcacttcaaccagatggccgaccgcatcgaaagcctgatcagcaaccagcgtgaactgaccaacgcggtatcccacgaattgcgcacgccgatctcccgcctgtccttcgaactcgagcaattgaacaagcaggtcgacgccgaagtacgccacgacctgatagaggacatgcgcgccgatctcggcgaactggaggaaatggtctccgaactgctgacctacgcccgcctggagcacggcaacgtcgggagccaccgggaaatcgtcgacgccgcgagctggctggatagcgtcgtcgccgacgtcgccctggaagccgaagccgccggagtcacctgcgagatcagcgcctgccaggtcgaacagatccgcatagagcctcgcttcatggcgcgcgcagtgatcaacctgctgcgcaacgccattcgccacgcacactcgcgcgtcgaaatcgccctcctcgatcaaggcgacagctgtcagatacgggtcaacgacgacggccccgggataccggcggacgcccggcagaagatcttcgaacccttttcgcgcctggacgacagccgcgatcgcagcaccggcggcttcggcctgggcctggcgatcgtccgccgggtcgcgcaatggcacggcggctatgcggaagcgctggaaacgccgcaaggaggcgcctccttccgcctgacctgggagcgaccccgttga

SEQ ID NO: 338508 - DNA, 708 bp, Pseudomonas aeruginosa
atggactgccctaccctcagcaaggtattgctcgtcgaagacgaccagaagctcgcccgcctgatcgccagtttcctttcccagcatggtttcgaagtgcgccaggtgcatcgcggtgatgccgcgttcgccgccttcctcgacttcaagccgcaagtggtggttctcgacctcatgctccccggacagaatggtctgcaggtgtgccgggagatccgccgggtcgcgaacctgccgatcctcatactcaccgcccaggaggacgatctcgatcacatcctcggcctggagtccggcgccgacgactacgtgatcaagccgatcgagccaccggtgctgctcgcccgcctgcgcgccctgatgcgccggcacgcgccccttcccgcctccccggaaagcctgacattcggcaagctgaacatcgaccgacggcggcgcgaagcggaactcgaaggactcggcatcgaactgaccacgatggagttcgagctgctctggctgctggccagccaggcaggggaaatactttcccgcgacgagatcctcaaccagatccgcggcatcggtttcgacggcctgaaccgcagcgtcgacgtctgcatcagcaagctgcgcaataaactgaaggacaatccgcgcgaaccggtccggatcaagaccgtctggggcaagggctacctgttcaacccgctgggctgggagctctga

SEQ ID NO: 338509 - DNA, 1269 bp, Pseudomonas aeruginosa
atgaccgttggtgtgcctgccgagcgtatcgagaccgaagtcaacaagcgtctgcagcagaccgcccgtcgtgccaagattccaggtttccgccccggcaaggtgccgatgagtgtcattcgtcagcgctacgaagcttccgcgcgccaggaagccatgggcgatctgatccaggaaaccttctacgaagccgtggtcgagcagaagctgaatccggccggttcgccgtcggtagagcccaagtccttcgagaaaggcaaggacctggaatacatcgcaaccttcgaagtcttcccggaatttaccgtttccggcctggaagacatcaaggtcgagcgcctgcaggccgaagtttccgatgctgatgtcgacaatatgctcgacgtcctgcgcaagcagaacacccgtttcgaagtggtcgagcgtgccgcccagaacgatgaccagttgaacatcgacttcgtcggcaagatcgacggcgaagccttcgccggcggttccgccaaaggcaccctgctggtactgggctccggtcgcatgatcgccggcttcgaagaagggctggtgggggcgaaggccggtgaagagcgtgtgctcaacctgaccttccccgaggactaccagaacctggacctggccaacaaggctgccgagttcaccgttaccgtcaatagcgtagccgagcccaagctgccggaactgaacgaagagttcttcgctctgttcggcgtgaaggaaaccggtctcgatggcttccgcgccgaagtgcagaagaacatggagcgcgagctgcgccaggcgatcaagtccaaggtcaagaaccaggtcatggaaggtctgctgcaggccaacccgatcgaagtgcccaaggccctgatcggcaacgaagtgaaccgtctgcgcgtgcaggccgtccagcagttcggtggcaacatcaagcctgaccaactgccggccgagctgttcgaagagcaggccaagcgccgtgtggtgctgggcctgatcgtcgccgaagtggtcaagcagcacgagctgaaggccgacgaaggtcgcgttcgcgaaatgatcgaggaaatggcctcggcctaccaggagcccgagcaggtcgtcgcctggtacttcaagaacgagccccagctgaacgaagtccgttctgttgtactggaagaacaagtcgtagatactgtcctgcaaaaggccactgtgaccgataagcaggtatcctacgaagaagcggtcaagccggccgaagctccgcaagcggcctga

SEQ ID NO: 338510 - DNA, 642 bp, Pseudomonas aeruginosa
atgtctcgcaactcttttattccgcacgttcccgatatccaggccgccggtggcctggtgcccatggtggtggagcagtccgcccgcggcgagcgagcctacgacatctattcgcgcctgctgaaggagcggatcatcttcctggtcggccaggtcgaggactacatggccaacctggtggttgcccagttgctgttcctggaggctgaaaatcccgagaaggacattcatctctacatcaactcgccgggtggttcggtgactgccgggatgtccatctacgacaccatgcagttcatcaagcccaacgtctcgaccacctgtatcggccaggcgtgcagcatgggtgccctgctgcttgcgggcggtgccgccggcaagcgctactgcctgccgcattcgcggatgatgatccaccagccgctgggcggtttccagggccaggcctcggatatcgagatccatgccaaggaaatcctcttcatcaaggagcgtctgaaccagatcctggcgcaccacaccggccagcccctggacgtcattgcccgcgataccgatcgtgaccgcttcatgagcggtgacgaagccgtcaagtatggcctgatcgacaaggtcatgacccagcgcgacctggccgtctaa

SEQ ID NO: 338511 - DNA, 1281 bp, Pseudomonas aeruginosa
atgactgatacccgcaacggcgaggacaacggcaagctgctgtattgctccttctgcggcaagagccagcacgaagtgcgcaagttgattgccggcccctcggtctttatctgcgacgagtgtgtcgacctgtgcaatgacatcatccgcgaggaggtgcaggaagcgcaggcggaaagtagtgggcacaaacttccggcgccgaaagagatccgcaccatcctcgatcagtacgtgatcgggcaggagcgggccaagaaggttctggcggtagcggtatacaaccactacaagcgcctcaaccagcgtgacaagaaggacgatatcgagctcggcaagagcaacattctgatgatcggcccaaccggctcgggcaagaccctgctggccgagaccctcgcacgtctgctgaacgtgccgttcaccatcgccgatgcgaccacgctgacggaagcgggctacgtgggcgaggatgtcgagaacatcatccagaagctcttgcagaagtgcgattacgatgtggagaaggcccagatgggtatcgtctacatcgacgagatcgacaagatctcccggaaatcggacaacccctccatcactcgcgacgtttccggcgagggtgtgcagcaggccctgctgaagctcatcgagggcaccgttgcctcggtaccgccgcagggcggtcgcaagcatccgcagcaggagttcctgcaggtcgatacgcgcaacatcctgttcatctgcggcggcgctttcgccggtctggagcgggtcatccagaaccgttccgcgcgcggcggcatcggtttcaatgccgaagtgcgcagtcaggagatgggcaagaaggtcggcgaggcgttcaaggaagtcgaaccggaagatctcgtcaagttcggtcttattcccgagtttgtagggcgtttgccggtgatcgcgactcttgatgagctcgacgaggctgcgctcatgcagatcctgaccgagccgaagaacgctctcaccaagcagtacgccaagctgttcgaaatggaaggcgtcgatctcgaattccgtccggacgcactcaaggcggttgcccgcaaggcgctcgaacgcaagaccggtgcacgtggcttgcgttcaattctcgaaggtatccttctcgataccatgtacgagattccctcccagcaggatgtcagcaaggtggtcatcgatgagagtgtcatcgatggctcgtcgcaacccctgatgatctacgagaacagcgaaaagccagccaaggctgcgcctgaggcatga

SEQ ID NO: 338512 - DNA, 2397 bp, Pseudomonas aeruginosa
atgaaaacactcgtcgaattgcccttgctgccgctacgtgacgtggtggtgtacccgcacatggtcatcccgttgttcgtcggtcgggaaaagtccatcgaggccctggaggcagcgatgaccggcgacaagcaaatcctcctgctggcgcagaaaaaccccgcggacgatgatccgggcgaagatggcctgtaccgcatgggtacggtcgctaccgtgctgcagttgctcaagctgccggatggcaccgtcaaggtgctggtcgaaggcgagcagcgcggccaggtcgagcgcttcatcgaggaggaagggcacattcgtgccgcggtccaggccatcgacgacgccaatgtcggcgagcgcgaggccgaggtcttcactcgcagcctgctgagccagttcgagcaatacgtccagttgggcaagaaagtccccgccgaggtgctttcctcgctgaacagcatcgacgagccgagcaggctggtcgataccatggccgcgcacatggcgctgaagatcgagcagaagcaggacatcctggagatcaccgacctgtcgtcgcgggtcgagcatgtcctggcgctgctggatgccgagatcgacctgctgcaggtggaaaagcgtatccgcggccgggtcaagaagcagatggagcgcagccagcgcgagtactacctgaatgagcagatgaaggccattcagaaggaactcggcgatatcgacgaagggcacaacgaagtcgaggagctgaagaagcgcatcgacgctgccggcctgaccaaggaggcgcacaccaaggccactgccgagctgaacaagctcaagcagatgtcgccgatgtcggcggaagccaccgtggtgcgttcctacatagactggctgctgaacgtgccgtggaaggccgagagcaaggtgcgccatgatctcgccaaggcggaagacatcctcgatgccgaccattatggcctggaagaggtcaaggagcgcattctcgagtatctcgccgtgcaaaagcgggtgaagaagctcaagggcccggtcctttgcctggtgggaccgcccggcgtgggcaagacctccctggccgaatccatcgctcgcgccaccaatcgcaagttcgtgcgcatggcgctcggcggcgtgcgtgacgaggccgagatccgcggtcaccgtcgtacctatatcggctccatgccgggccgcctgatccagaagatgaccaaggtcggcgtgcgcaacccgctgttcctcctcgacgaaatcgacaagatgggcagcgacatgcgcggggatcccgcctcggcgctgctcgaggtgctcgacccggagcagaaccacaacttcaacgatcactacctggaagtcgactacgacctgtccgacgtgatgttcctctgcaccgcgaactcgatgaacatcccggcgcccctgctggatcggatggaagtcatccgcctgccgggctacaccgaggacgagaaggtcaacatcgcctccaagtacctgattccgaagcaggtccaggccaacggcctgaagaagggcgagctgaccttcgaggaaggcgccctgcgcgacatcattcgctactacacccgcgaagccggggtgcgcagcctcgagcggcagatcgccaaggtctgccgcaaggcggtgaaggagcatgccaagctcaagcgtatccaggcggtggtgtccagcgagacgctggagaactacctcggcgtgcgcaagttccgttatggcctcgccgaacagcaggaccagatcggccaggtgaccgggttggcctggacccaggtcggcggcgagctgctcaccatcgaggcggccgtggtaccgggcaagggccagttgaccaagaccggatcgctgggcgacgtgatggcggaatcgatcaccgcggcgttgaccgtggtgcgcagccgcgcccagagcctaggaatcgcggcggacttccacgagaagcgcgacatccatatccacgttccggaaggcgctacgccgaaggatggcccgagcgcaggcatcggcatgtgcacggcgctggtttcggcgatcacgcagatcccggtgcgcgccgacgtggcaatgaccggggagatcaccctgcgtgggcaggtgctggcgatcggcgggctgaaagaaaaacttttggcggcgcaccgcggcgggatcaagacggtgatcattcccgaggaaaatgttcgcgacctgaaggaaattccggacaatattaagagtgatctggttattaaaccggttaaatggattgacgaagtcctgcaaattgcgctgcaatacgccccggagcccttgcccgatgcggctccggagatggttgcaaaggatgaaaaacgcgagcctgattccaaggagcgaattagcacgcattag

SEQ ID NO: 338513 - DNA, 273 bp, Pseudomonas aeruginosa; identical to SEQ ID NO: 319023

SEQ ID NO: 338514 - DNA, 1866 bp, Pseudomonas aeruginosa
atgctgcagaacatcagggataattcccagggctggatcgccaagaccatcattggcgtgatcatcgttctcctgtcgctgaccggcttcgacgcgatcatccgggccaccgaccactccaacgtggccgccaaggtcaacggcgacgatatcagtctcaatgaagtccaacaggccgtggacatgcagcgtcgccagctgctgcaacgcctgggcaaggatttcgatccatccatgctggatgacaagctgctcaaggaagcggccctgaaggggctgatcgagcgtaccctgctgctccaggccgccaaggacgacaagttcgccttctccgaccaggcgctggaccagttgatcctgcaaactcccgagttccaggtcgacggcaagttcaacgcggatcgcttcgaccaggtcatccgccagatgaactacagccgcatgcagttccgccagatgctcggccaggaaatgctcatcggccagcttcgcgccggcctggcgggcaccggtttcgtcaccgacaacgaattgcagtccttcgctcgcctcgagaagcagacccgcgacttcgccaccctggcgatcaaggccgacgcctccaagagcagcgtgagcgacgacgaggtgaaggccttctacgaaggccacaagagcgagttcatgactcccgagcaggtggtcgtcgaatacgtggagctgaagaagtcctccttcttcgaccaggtcaaggtgaagcaggaagacctcgaggcgctgtaccagaaggaaatcgccaacctttccgagcagcgcgatgccgcacacatcctgatcgaggtgaacgacaaggtcggcgacgagcaggccaaggcgaagatcgacgagatcaaggctcgcctggccaagggcgaggatttcgccgcgctggccaaggagttctcccaggatatcggctcggccgccaccggcggtgacctgggctacgccggtcgcggcgtgtacgaccccgcgttcgaggaggcgctgtatgcgctgaagcaaggtgaggtatccgccccggtgaagactccgtacggctaccacctgatcaagctgctgggcgtgcaggcgccggaagtaccgagcctggaaagcctcaagccgaagctcgaggacgaactgaagaagcagatggtcgagcagcgtttcgtcgaggctaccaaggacttggaaagctccgcctacgaagccgccgacctgagccagccggcgcaggaaatgggcctgaaggtccagaccagccagccgttcggacgttcggggggcgacggcatcgctgccaaccgccagatcgtgcagaccgcgttcagccccgaggtgctggaagaagcggccaacagtggcgccatcgagctggatccggacaccgtggtggtgctgcgggtcaaggaacacaacaagccgaaggagcaaccgctggagcaggtcgcggcgaacatccgcgagcgcctggccgccgaaaaggccgccgaggaggcgcagaagcgtggcgaggccctgattgcagagctgcgtgaaggccgtacctcttccgcagcgggtgagtcgtggaaagtggtcgaggcggcctcccgcggccaggaaggcgtcgatccgaaactgctccaggcggtgttccgcatgcagcgtccggaggccaaggacaagccttcgctttctggcgtgaccctggccaatggcgattacgtggtgatccgcctgaatggcgtcagcgagccggaggaggctatctccgacgacgagaaggccatgtaccgccgcttcctggcttcgcgcagcggacaggcagacttcgccgccttccgccgtcagttgcaggacaaggcggaagtcgagaaatactga

SEQ ID NO: 338515 - DNA, 798 bp, Pseudomonas aeruginosa
atgggatttctcacaggaaaacgcgccctgatcgtcggagtcgccagcaagctctccatcgcttccggcatcgccgccgccatgcaccgggaaggcgccgaactggccttcacctaccagaacgacaagctcaggggccgggtggaggagttcgccagtggctggggctcgcggccggagctgtgcttcccctgtgacgtggccgacgacagccagatcgaagcggtgttcgccgccctgggcaagcactgggacggcctggacatcatcgtccactccgtcggattcgctccaggcgatcagctcgacggcgacttcaccgcggtgaccacccgcgagggcttccgcatcgcccacgacatcagcgcctacagcttcatcgccctggccaaggccggacgggaaatgatgaagggccgcaacggcagcctgctgaccctctcctacctgggcgccgaacggaccatgccgaactacaacgtaatgggcatggccaaggccagcctggaggccggggtccgctacctggccggcagcctgggcgcggaaggcacccgggtcaatgcggtttccgccgggccgatccgaacgctcgccgcctccgggatcaagagtttccgcaagatgctggccgccaacgagcggcagacgccgctgcggcgcaacgtcaccatcgaggaagtcggcaatgccggcgccttcctctgttcggacctggccagcggtatcagtggcgagatcctctacgtcgatggcggcttcaacactaccgccatgggcccgctggacgacgactga

SEQ ID NO: 338516 - DNA, 1611 bp, Pseudomonas aeruginosa
atgagcgagaacattctggaaatccgcgacctcgccgtcgaattcctctccggcgagcaacgccagcgggtggtcgaaggcgtcagcttcgacatccgccagggcgagaccctggccctggtcggcgaaagcggctcgggcaagtcggtgaccgcccactcgatcctgcgcctgctgccctactccgtcgccagccacccagcaggcagcatccactaccagggcgaggatctgctcaagctcccggaacggcgcctgcgcgggatccgcggcaaccgcatcgccatggtcttccaggaacccatgacctcgctcaatccgctgcataccatcgagaagcagctcgccgaggtcctcgccctgcacaagggcctgggtggcgccaaggccagcgcgagaattctcgaactgctcgagctggtcggcatccccgagccggccaagcgcctgaaagcctatccacacgaactctccggcggccagcggcagcgggtgatgatcgccatggccctggcctgcgagccgcaactgctgatcgccgacgaaccgaccaccgcgctcgacgtcaccgtccagttgaagatcctcgatctgctcaaggacctgcaggcacgcctgggcatgtccctgctgctgatcacccacgacctcaacctggtccggcgcatcgcccaccgcgtctgcgtcatgcaacaagggcggatcgtcgagcaggcttcctgccaggaactcttcgcagccccgcgacacccctatacccgcgagctgctcaacgccgagcccagcggtgcgccggcaagcaacccgccgggtgaaaccctgttggcggtggacgacctgcgggtctggttcccgatccgcaaaggcgtgttccgccgcaccgtggaccacgtcaaggcggtcgacggggtcaatttcgaactaccccgcgggcagacgctgggcatcgttggcgaaagcggctcgggcaagtcgacccttggcctggcgatcctgcggctgctggaaagccagggcggcatccgcttcgaaggcacccggctggacggtctcgcgcaacatgacgtgcgcccgctgcgccgcgagatgcaggtggtgttccaggacccgtatggcagcctcagcccacgcatgtgtgtcggcgagatcgtcggcgaaggcctgcgcatccataggatcggcagcgaggccgaacaggagcaggcgatcatcgacgcgctggtggaggtcgggctcgatccgcagacccgctaccgttacccccacgaattctccggcggccagcgccagcgcatcgccatcgcccgggcactggtgctgaaaccggcactgatcctgctcgacgaaccgacctcggcgctcgaccgcaccgtgcagcgccaggtcgtggaattgctgcggcaactgcagggcaagtacaacctcacctacctgttcatcagccacgacctggcggtggtcaaggcgctcagccaccagctgatggtggttcgacatggcaaggtagtggaacagggcagcgccgaagcggttttcgcctcgccgcaacatccctatacgcagcaattgctggaggctgccttcatggccccggcaagcgcggaaaactga

SEQ ID NO: 338517 - DNA, 1020 bp, Pseudomonas aeruginosa
atgcgcctgtctcccatcaaccagcgccgctgggcccgcttcaagagcaacaagcgtggctggtggtcgctctggctgttcctcatcctgttcgtcggcagcctcggcgccgaactgatcgccaacgacaaaccgctggtcgtgcattacgacggcggctggtatttcccggtcttcaaacgctacccggaaaccaccttcggcggcgaattccccctggaagccaactacaagagcccctacatcagccaactgatcgccgagaaggacggctgggtgctttggccgccgatcccctacagctacgacaccatcaactacgagctgaaggttcccgcccccgccccgccgtcggcggaaaactggctgggcaccgacgaccaggcccgcgacgtgctcgcccgggtgatctacggcttccgcgtgtcgatcctcttcgccctgaccctgaccgtgctcagttctctgatcggcgtcaccgtcggcgccctgcaaggctactacggcggctgggtcgacctgctcggccagcgtttcctggaagtctggtcggggctgccggtgctctacctgctgatcatcctggccagcttcgtccagccgaacttctggtggctgctgggcatcatgctgctgttttcctggatgagcctggtggacgtggtccgcgccgagttcctccgcgggcgcaacctggaatacgtccgcgccgcccgggccctcggcatgcgcaacagcgccatcatgttccgtcacatcctgccgaacgcgatgatctcgaccctgaccttcatgccgttcatcctcaccggcgccatcggcaccctcacctccctggacttcctcggcttcggcctgccgcctggcgcgccgtcgctgggcgagttggtcgcccagggcaagtccaacctccaggcaccctggctgggcatttccgccttcgtggtgctggcggtcatgctgagcctgctggtgttcatcggcgaagccgcccgcgacgctttcgacccgaggaaatga

SEQ ID NO: 338518 - DNA, 1083 bp, Pseudomonas aeruginosa
atgctctcctatatcctgcggcgcctgctgctgatcgtccctaccctgttcggcatcctgctgatcaacttcatcatcatccaggccgctcccggcggtccggtggagcagatgatcgccaagctggaaggcttcgacgccgcttccggcggcgccaccggacgcatctccggcggcggcggcgaagtcgccgtggccggctcgcaataccgcggcgcgcaaggcctggacccggagctggtgaaagagatcgagcgcatgtacggcttcgacaagtcggcccccgagcgcttcatgatcatgctgaagaactacctgcacctggacttcgggcagagcttcttccgcgacgccaaggtcaccgacctgatcgtcgagaaattgccggtgtcgatctcgctcgggctctggagcacgctgatcatgtacctggtgtcgatcccgctagggatcgccaaggcggtccgccacggcagcgtcttcgacatctggaccagttcggcgatcatcgtcggctacgccattcccgccttcctcttcgccatcctgctggtggtgctgttcgccggcggcagctactgggactggttccccctgcgcggcctgacctcgaacaacttcgaccagctcagcctcggcggcaaggtgctcgactatttctggcacctggccttgccggtaaccgccctggtgatcggcaacttcgccaccatcacgctgctgaccaagaacagcttcctcgacgagatcggcaagcaatacgtggtcaccgcccgcgccaagggcctgacagaacgccgcgtgctctacgggcacgtattccgcaacgccatgctgctggtgattgccggcctgccggctgcgctgctggggatcttcttcaccggttcgctgttgatcgaggtgatcttctccctcgacggcctcggcctgctcagcttcgaagcggcgatgaaccgcgactacccggtggtcttcggcacgctgttcatcttcaccctgttcgggctggtcatgaagctgatcagcgatatcgtctacaccctggtcgatccgcgcatcgacttcgagaaccgggagtaa

SEQ ID NO: 338519 - DNA, 1848 bp, Pseudomonas aeruginosa
atgatccgtccccgcttcacccctctgctggcagccctgctgctcggctgctgcggcccgctcctcgccgccccgaaacatgcactgacgctctacgatgagcctccgaagtatcccgccgatttcaagcatttcgactacgtgaatccggatgcgccaaaaggcggcatcctccgccaggccgacttcggcggcttcgacagcctcaacccgttcatcggcaagggcgtctcggccccttcgctgggcctgatctacgacaccctggccttccagtcgcaggacgagccgttcaccgaatacggcctgctcgcggagaagatcgagaaggcaccggacaacagctacgtgcgcttctacctgcgcccccaggcccgtttcagcgacggcacgccggtcaccgccgaagacgtggtgttcaccttcgagacgctggtgagcaagggcgacccgatgtaccgcaactactatgcggacgtcgacaaggtggtcgccgaggacaagcttcgcgtgcgcttcgacttcaagcacgccggcaaccgcgaactgccgctgatcctcggccagatcgcgatcctgccgaaacactggtgggccgaccgcgacttttccaagaccggcatggaaatcccggtaggcagcggtccctaccgcatcgccaaggtcgatccgggacgctccatcagctacgagcgagtcaaggactggtgggccaaggaccttccggtctcccgcggactctataacttcgacaccatcaccatcgactcctatcgcgacatgtcggtcgccctggaagccttcaaggccggccagtacgacgtcaacctcgaatattcggcgaaggactgggccaccggctacgagtcgccggcattgcgcgacgggcgcttcatcaaggccagcatccacaaccacaacccggtggggatgcagggcttcgccttcaatatccgccgcccggtgttccaggaccgccgggtacgccaggcgatcagcctgctgttcgacttcgaatggtcgaacaagcagctgttcttcagctcctacaagcgcaccaacagctatttcgagaactcggagatggccgcccaccagttgcccagcgaagccgagctgaagatcctcgaaccgctgcgcggcaagattcccgacgaggccttcgaccaggtcttccagaatccggtcaatgacggcagcggggtgatccgcgagcagcggcgcaaggcctaccagttgctcaccgaggccggctacaggatcgagaacaaccgcatggtaggtcccgacggccagccactgagcttcgagttcatgctgttccaggccaacatggaacgggtcatcctgccgttcaagcgcaacctggccgaacttggcatcgacatgcagatccgtcgcgtcgacgtctcgcagttcgtcaaccgcctgcgctcgcgggatttcgacatgacctcggcgacctggccgcaatccaactcgccaggcaacgaacagcgagagttctggcattccagcagcgccgacaaggccggcagccgcaacttcatcggcctcaaggacccggccatcgacagcctggtggaaagcctgatccagtccgactcgcggcaaagcctgatcgaccatacccgcgccctcgaccgcgtactgtcgtggggctactacgtggttcccaactactacgtcgatacctggcgggtcgcctactggaaccgtttcggccggccgaaggtgacgccactctacgactggggcctgatgacctggtggcagaccagcgacaaggcgctgccgagcaaggcgcaagccgaagccacgcaagacgccgagccggaacgggagtaa

SEQ ID NO: 338520 - DNA, 1830 bp, Pseudomonas aeruginosa
atgcgtcgcctctccttcctgatcctcggcctggccgtgagcctgcccagcttcgccgcgattacccagagccatggttatgcccaattcggcacgctcaagtatccggccaatttccagcacttcgactggaccaatcccgacgcccccaaaggcggcaccttgcgcctgatggcctcgggcagcttcgacacgctcaacccctacaccctgaaaggcaccagcccgatcggcaccggcgatttcctccagtacggagtcaacgagctgaacgaaccattgatggtgggcaccggcctgtacgacccgtccggcgacgaaccagcctccagctatggcctgatcgcgaagagcgtggaatacgcggaaaaccgcagctgggtggtattcaacctgcggccggaagcgcgcttccacgacggcaggccgatcaccgccagcgacgtggccttttcctatcgcaccctggtcaagcaggggcacccgatgtaccgcacctacctgcaggaggtgaagcgggtcgatatcctcaccccccaccgggtgcgtttcgtcctgcggcgctccggcaacccgctgctgatcctgcgcctgggcgagcttccggtgctgccgcagcattactggaaggatcgcgacttccgcgccaccaccttcaccgcgccgctgggcagcggtccctatcgcatcgtcgaggtcgatcccgggcgccgcctggtgttcgaacgcgtgaagggctggtggggcgaaaaactgccggtgaaccgcggcaagtacaatttcgaccgggtcgtggtggacttctaccgggacaacggcgtcgccttcgaagccttcaaggccggcgagttcgacttctacatcgagcaccaggcgaagaactggctgaacaactatcgcttccccgcggttctgcgcggcgatgtgatccgcacggaaatcccgcaccagatccccagccagacccaggcgttgttcatgaacacccgtcgcgccgtgttcaaggagcgcgcgctacgccaggcgctgggcgagatgttcgacttcgaatggaccaatcgcgccctcttcagcaattcctacctgcgctcgcgcagctactacccgaacagcgaattcgccgccagcggcgtcccggagggccaggaatggctgtacctgtcgccgtaccgcaagcaattgccggcgcagttgttcaaacagccgttcagcctgccgaccaccgaggggcgcggcattccccgtgaaaccctcaggcatgcactcggtctactggccgatgccggctggaagctgtccggcgaccgactgctgaataaaaagggcgaaccgctgcgcttcgaaatcctgctggtcaatccgagcctggagcgtattctccagccctatcgcgaaaacctcgccagcatcggcatcgacgcgcgcctgcgcaccgtcgaccgcgcccaatacaagcagcgcctggaccagttcgactacgacatgatcctcatgaccctgccgcagaccctcagtcccggcctggaacagtggcagtacttccactccagccaggtgaaggtcaagggcagcaagaattacgcgggcatcgccaacccggtggtcgacgccatgctcaaccgcctgctcggcgcccacagccgcgacgaacaggtcgccgccgcgcgcgccctggaccggaccttgctctggcagtactacagcattcccaactggtacctcaattcgcaccgtctggcgtaccgcaaccgcttcgccttcgtcgccaccccgccctacaccctgggcctgcgcgcgtggtggcagaaaaacctggagacgtcccgatga

SEQ ID NO: 338521 - DNA, 1605 bp, Pseudomonas aeruginosa
atgccgccacagacacgtaaaacccccgatctagacgccctggctcgcgccgttcgggtgtccatcctgctcatcgccggtgcgctcgccggctgccagggcagcggccagatcaagggggaggcccaggccaaagcagcacgtcccggcgcccgagccgtcgacgtccagttcaacccctcctggctgcatacccagcccggccagaacgccgcctacaacgacatctgggaccgcatgcgcgacggtttccagctccaggatgcgatcagcaccaacccgcgcatcgaacgccagcgcctctggttcctcagcaaccagtcgttcctcgaacaatcgagcgcgcgcggcagcctctacatgcactacgtggtcgagcgcctggaagaacgcaacatgccgctcgaactggcgctgctgccggtcatcgaaagcgcctataaccccttcgccctgtcgcgcagcaacgccgccggcctctggcagttcattcccgccaccggccagcatttcaacctgcgccagaccaatttctacgacggtcgccgcgacatcaccgcctcgaccaatgccgccctgacctatctcgagcgcctgcacgacatgttcaacggcgactggatgctcgccctggcggcctacaacgccggcgaaggcactgtcagccgcgccatcgaacgcaacgagaaactgggcctgccgaccgactactggaacctgccgctgccgcaggaaacccaggactacgtacccaagctgctcgccctctcacagatcgtcatggcgccggattcctacggcatcagcctgaacccgatcaacaacgagccctacttccaggccgtccgggtcaagcgcgggatcgacctgtccagcgtcgccgcgctggcgaacctggacgaggacgagctgtaccagcttaacccggcctacaagcgccgcgtgaccatggacggcccccagcaactgctggtgccgatggagaaagcggcgttcctgaccgcctcgctggacaccctcaagccgaaggaagtcaccgcctggcagcaataccgggtgcgtagcggcgacagcctgcacagcatcgccaaccgctatcggatcaccgtagcggagctcaagagcgccaaccgcctgtccagcaaccacctgcgcaagggccagcaactgagcatccccgggcagatcgccggcggcgccgtcaagccggtctaccagcaactcgcccgacaggcttccaccccggccaggacccgctcctataaggtcaagaacggcgacagcctgtggcagatcgcccgcaacaacggcgtcgacgtcaacgacctgaagcgctggaacggcctggacaagcacgccctgaaggtcggccagaccctcaagctgcaaggcggcacccaggccctggcggcccgcaagggaaacgccgccggcaagcgcgacagcgccacctactacaaggtcaagcaaggcgactcgatgtacctgatcgccaagcgcttcaatgtcgaaatgaagcacctgcagcgctggaacccgcgcagcaagcaggcgctcaagcccggccagaccctgaccctgtacctggacaccgcgagccgctga

SEQ ID NO: 338522 - DNA, 777 bp, Pseudomonas aeruginosa
atgatacagatcgacgccctgtccgccttcaacgacaactacatctggctgttgcaagatgcgacaagccgtcgctgcgcggtggtcgaccccggcgacgccaagccggtggaagcctggctggccgcccatcccgactggcggttgagcgatatcctggtgacccaccaccatcacgaccacgtcggcggcgtcgcggccctgaaggaactgaccggcgcgcgggttctcggcccggccaacgagaagatcccggcccgcgacctggcgctggaagacggcaaacgggtcgaggtgctcggcctggtcttcgagatcttccacgtgcccggccataccctcggccatatcgcctactaccacccggcggagacgccgctgctgttctgcggcgacaccctgttcgccgccggctgcggccgtctcttcgaaggcaccccggcgcagatgcatcattccctggcgcgactggccgcgctgccggccaacacccgggtctactgcacccacgagtacacgctgagcaacctgcgcttcgcgctggcggtggagcccgacaacgcagcgctgcgggaacgcttcgaggaagcgacccggctgcgcgaacgggaccgcatcaccctgccgtcggaaatctcgctggaattgtcgaccaatccatttcttcgcgtttcggaaaaatctgttaagaaaaaagccgaccagcggagcggccagcaaaaccgcaccccggaggaggttttcgccgtcctgagggcctggaaggaccagttctga

SEQ ID NO: 338523 - DNA, 762 bp, Pseudomonas aeruginosa
atgaacgaaccgcaagccttcgcccagaccgatgccgagtggctggcatcgatcaaccgggcgcgcgactggttccagggcccgctgggcagcctgatgctggccgaggagcgacgcctgttgtgcgacgagctgacccgttacttcggtggctacctggtgcactacgggccgcatgccgaactgccgccgagcaccgggcagattcagcgcggcgtgcgcctggggccgccgctgccgggcgtggacatcgcctgcgaagagggcgcctggccgctcagcgaacatgccgcggacgtggtcctgctgcaacacggcctggatttctgcctgtcgcctcaccgtctcctgcgcgaagccgcgcgtaccgttcgtccgggcggccacctgctgctgatcggcatcaacccatggagcctgtggggcatccgtcattatttcgccggggatgccttgcgccaggcccgctgcattcctccgtcgcgggcctgcgactggctcaacctgctgggcttcgcgctggagaaacggcgcttcgggtgctatcgtccgccgcttgcgtcggcagcctggcaatcgcgcctggctcgcctggagcgctggggcgacgcctggcagtcttcgggcgccggcttctatctattggtggcacgcaagctggtcgtggggttgcgcccgttgcgccagagcaagcgcgaaccgcgcggtcagctggtgcccatgccggtggcgaaagtcagccggcgagattccgaaatttag

SEQ ID NO: 338524 - DNA, 447 bp, Pseudomonas aeruginosa; identical to SEQ ID NO: 319012

SEQ ID NO: 338525 - DNA, 741 bp, Pseudomonas aeruginosa
atgcgtagcgtcgtactggataccgaaaccaccggcatgccggtgaccgatggtcaccggatcatcgagatcggctgtgtcgagctggaggggcgccgcctgaccggtcgccacttccacgtctacctgcaacccgatcgcgaggtcgacgaaggggcgatcgccgtccacggcatcaccaacgaatacctgaaggacaagccgcgcttccgcgaggtcgccaacgatttcttcgaattcatccgcggcgcccagctgatcatccacaacgcggcgttcgatatcggcttcatcaacaacgagttcgccctgctgggccagcaggaccgctcggacgtgaccgagtactgctcggtgctggataccctgctgatggcccgcgagcgccatccgggccagcgcaacaacctcgatgcgttgtgcaagcgctacggcgtggacaactccggtcgcgacctgcacggcgcgttgctcgacgccgagatcctcgccgacgtctacctggcgatgaccggcggccagaccagcctgtcgctggccggcagcggcgcggaaggcgacggcagcggccggccgatggtcagcccgatccgtcggctcgatccggcgcgggtagccaccccggtgctgcgcgccaacgccgaagagctggctgcgcatgcggcgcggctggcagtgatcgagaagtcggcaggtggtccgtcactctgggcgcaactggaggcgccggtcggcgaatag

SEQ ID NO: 338526 - DNA, 390 bp, Pseudomonas aeruginosa
atgcgcagcgcttatcggatcgtcagcgatcactatgcggcctctagccgcggggacctcgccggaatgctggcggacatggacgaacgcaccgaatggacggaaatggccggtttcccgctggccggcacctatgtcggcgcggccgccatcggcgccggtgtgttccaggccttgcagcgggactgggagggcttcagggtcgagatcgagcgcctgatcgacggcggcgacagcgtggtcgccgtcggtcgatatgcagcgacccaccgtcgcagcggcaagtcgttcgaagcgcgtgtggcacacgtatggacggtagaggacggcaggatccgccgtttcgagcagttctgcgacaccttgctggtggaccgggcgacacgctga

SEQ ID NO: 338527 - DNA, 2256 bp, Pseudomonas aeruginosa
atgtataaagacctcaaatttcccgtcctcatcgtccatcgcgacatcaaggccgacaccgttgccggcgaacgcgtgcggggcatcgcccacgaactggagcaggacggcttcagcattctctccaccgccagctccgccgaggggcgcatcgtcgcttccacccaccacggcctggcctgcattctggtcgccgccgaaggtgccggggaaaaccagcggctgctgcaggatgtggtcgaactgatccgcgtggcccgcgtgcgggcgccgcaattgccgatcttcgccctcggcgagcaggtgaccatcgagaacgcgccggccgagtccatggccgacctgcaccagttgcgcggcatcctctacctgttcgaagacaccgtgccgttcctcgcccgccaggtcgcccgggcggcgcgcaactacctggccgggctgctgccgccattcttccgtgcgctggtcgagcacaccgcgcagtccaactattcctggcatacgccgggccacggcggcggtgtcgcctatcgcaagagtccggtgggacaggcgttccaccagttcttcggggagaacacgctgcgttccgacctgtcggtctcggtccccgagctgggatcgctgctcgaccataccggccccctggccgaggccgaggaccgtgccgcgcgcaatttcggcgccgaccataccttcttcgtgatcaatggcacttccaccgcgaacaagatcgtctggcactccatggtcggtcgcgaagacctggtgctggtggaccgcaactgccacaagtcgatcctccactcgatcatcatgaccggggcgataccgctctacctgactccggaacgcaacgaactggggatcatcgggccgatccctctgagcgaattcagcaaggagtcgatcgccgcgaagatcgccgccagcccgctggcgcgcggccgcgagccgaaggtgaagctggcggtggtgaccaactccacctacgacggcctgtgctacaacgccgagctgatcaagcagaccctcggcgacagcgtcgaggtgttgcacttcgacgaggcttggtacgcctatgccgcgttccacgagttctacgacggacgctatggcatgggcacctcgcgcagcgaggagggacccctggtgttcgccacccactccacgcacaagatgctcgccgccttcagccaggcctcgatgatccacgtgcaggatggcgggacccggaagctggacgtggcgcgcttcaacgaagccttcatgatgcacatctcgacctcgccgcagtacggcatcatcgcttcgctggacgtggcttcggcgatgatggaagggcccgccgggcgttcgctgatccaggagaccttcgacgaggccctcagcttccgccgggccctggccaacgtacggcagaacctggaccggaacgactggtggttcggcgtctggcagccggagcaggtggagggcaccgatcaggtcggcacccatgattgggtgctggagccgagcgccgactggcacggcttcggcgatatcgccgaagactacgtgctgctcgatccgatcaaggtcaccctgaccaccccgggcttgagcgccggcggcaagctcagcgagcaggggattccggctgccatcgtcagccgcttcctctgggagcgcgggctggtggtggagaaaaccggtctctactccttcctggtgctgttctcgatgggcatcaccaagggcaagtggagcaccctggtcaccgaactgctcgaattcaagcgctgttacgacgccaacctgccgctgctcgacgtcttgccctccgtggcccaggccggcggcaagcgctacaacggagtgggcctgcgcgacctcagcgacgccatgcacgccagctaccgcgacaacgccacggcgaaggccatgaagcgcatgtacacggtgctgccggaggtcgcgatgcggccgtccgaggcctacgacaagctggtgcgcggcgaggtcgaggcggtaccgatcgctcggttggaagggcgcatcgcggccgtcatgctggtaccctatccgccgggtatcccgctgatcatgccgggtgagcgcttcaccgaggcgacccgctcgatcctcgactatctcgagttcgcgcggaccttcgagcgcgccttccctggtttcgactccgatgtgcatggcctgcagcatcaggacggaccgtccgggcgctgctataccgttgaatgcataaaggaatga

SEQ ID NO: 338528 - DNA, 1356 bp, Pseudomonas aeruginosa
atggcggggggagagaaggccggcaagcgcggcatggggttctggacctgcagcgcgctggtgatcggcaacatggtcggttcgggagtcttcctgcttccctccagcctggcggcgttcggcgggctcagcctgttcggctggctggtgtcgagcaccggcgcggtgctgctggcgctgaccttcgcccgcctggcgcgggtcaaccccggcgccggcggcccctacgcctatacccgcgacggtttcggcagcttcgccggctacctgtgcgcctggacctactggaaagccgcctggatcggcaacgcggcgatcgccgtgaccctggtcggctacctgcgggtattcatcccggcgctggcggatccgctgctgatggtcagcgtggccatcgccgcgatctggctgtgcaccctgatcaacctgcgaggcatcggcaccttcagcgtggtgcagaacctgctgaccatcctcaagctgctgccgttgttgctggtcggtatcctcggctggttccacttcaatcccgagcacctggcgatcccggcgcgcagcgagctgccgaacatgggctatgcccaggcgatcgccaccaccgcggcgctgaccctgtggtcgttcatcggcctggagtcggccaccgtgccggccgacgacgtcgaggatccgcgccgcaccattccccgtgcgaccctgttcggcacgctggccgcggcggccctctacatcctctcgatcactgcggtgcagggcctgatgccgccggaggtgctggcccgctccacctcgccgttcgccgacgcggcgcggatcctgatgggcgactggggctactacctggtggctgccggggcggtgatcgcctgcctgggcgcgctcaatggctgggtcctgttgcagggccagatcccggtggctccggcgcgcgacgggctgttcccggagtcgctcggccagctcaacaagaacggcgcgccggcccacggcctgctggcctcggggctgctggtgacggcgctggtgatggtcgacgggcatggcgacctggtcgatgtgttcaacgtgatcatcctgctcggcaccatgaccggggtggtcccctacgcgttctgcaccgccgcgctgttgcaactgctggcggtgcgaccggacgagttctcgccgcgttcacgccggcaattgctggtgatcggctcgctgggcttcgcctactcgctatgggcgctgtatggcaccggccagcaggcgatcttctggggcttcctggtgctgatggccggtatcccgatgtacacctggcggcaatggcgcaaccaggtcaacggagtgccgacgctcaaagccaatgactga

SEQ ID NO: 338529 - DNA, 1503 bp, Pseudomonas aeruginosa
gtgagcagtcccctgagccaggctttcgcacagaacttcctcgggcattcgccgcgctggtacaagctgacggtgctcgccttcctcttgctcaaccccctgctgctatggctggccgggccggtgacaagcgcctgggtgctggtcggcgagttcatcttcaccctggccatggcgctgaaatgctatccgctacagccgggtggcctgttggtgctggaggcgctgctgcttggcctggctacccccgaggcgctctatgcggaattgcagcacaacttcccggtgctcctgctgctgatgttcatggtcgccggcatctacttcatgaaggacctgctgctcctgctgttttcccgcctgctgctcggcgtgcgctcgaagaccctgctatcgctcctgttctgcctgctggccgccctcctctcggccttcctcgacgccctcaccgtgaccgccgtggtgatcagcgtggcggtggcattcttcgccgtgtatcaccgggtcgcttcggggcagcgcgccagcgaggactacgatcccgccaccgaccgccaggtccccgagctgcaccgggcccatctcgaggaattccgcgccttcctccgcagcctgctcatgcacgcggcggtcggcaccgcgctgggcggcgtctgcaccctggtgggagagccgcagaacctgctgatcggccacgaggccggctggcatttcgtcgagttcttccgccaggtcgcgccggtatccatgccggtactggcggccggcctgctgacctgcgtgctgctggagaagagccgccgcttcggctatggcgcccagttgccggcggcggtgcgccaggtgctcgccgagtacgccgccagcgaaagccgcaaacgcggagcgcagcagaaggccgcgctgctggtgcaggccctggcggcgctggtactgatcgtcgggctggccctgcatgtcgccgaggtcggcctgatcggcctgttggtgatcgtgctgatcactgccttcaccggcgtcaccgacgaacaccagatcggccgcgccttccaggaggccctgccgttcactgcgctgctggtggtgttcttcgcggtggtcgcggtgatccaccagcagcacctgttcaccccgatcatccaggcggtgctggcgctgccggcggaacgccagccgggcatgctgttcatcgccaacggcctgctctcggcgatcagcgacaacgtattcgtcgccaccatctacatcaccgaggtgaaacaggcgctggatgccggccacatgagccgcgagcatttcgataccctggcggtggcgatcaataccggcaccaacctgcccagcgtagcgacgcccaacggccaggcggcgttcctcttcctgctgacctcctccatcgccccgctggtgcgcctgtcgtacggccgcatggtctggatggcgctaccctacaccctggtgatgggcggcctgggctggtgggcggtcagtcattggctttga

SEQ ID NO: 338530 - DNA, 813 bp, Pseudomonas aeruginosa
gtgaccgagtacaacgcattccgtgtggagctggcagacaagatcgcccacgtccagatcaaccgtccggacaagatcaatgccatgaaccaggacttctggcgcgagatcatcgagatcttccgctgggtcgacgataccgacgaagtgcgggtggtcgtgctgtccggggcgggcaagcatttttcctcggggatcgacctgatgctgctggcccaggtcggcagccaactgggcaaggacgtcggccgtaacgccgacgccctgcgtcgcaagattctcgagctgcaggcctcgttcaacgcggtcgacaactgccgcaagccggtgctcgcggcgatccagggctactgcctgggcggcgccatcgacctggtctcggcctgcgacatgcgctactcgaccgccgacgcgcagttctcgatcaaggagatcgacatcggcatggccgccgacgtcggcaccctgcagcgcctgccgcggatcatcggcgatggcatgatgcgcgagctggcctacaccgggcgcatggtcgacggcgaagaggcacggagcatcggcctggtcaatcgtacctacgcggaccaggccgcattgatggatggggtcttcgaactggcgcggcagatcgccgcgaagtcgccgatcgccatccgtggtaccaaggaaatgatccgctatatgcgcgaccaccgggtcgacgacggcctcgagtacgtcgctacctggaacgccgccatgctccagtccgccgacctgcgggtggcgatggccgcgcatatggccaagcagaagccggaattcgctgattga

SEQ ID NO: 338531 - DNA, 1689 bp, Pseudomonas aeruginosa
atggtcacaggagccacgtccctcagtctggtgcgcgacgagttgttcgccaccatggaacaggccgaacagggtcttgagcagttcattgccgagcggcagaacggcagcctgctgcagcacgccgtcgaatgcctgcaacagatccgcggcaccctcaacctgatcgagctggccggcgccgagctgctggcccaggaagccctgcagctggcgaccgacattcccaccggcgtcagcgaggagcgcgacggccagctggcagccctgggcaacgccctgtacgtgctgcgccgctacctggagaacgtcgaggccaatcgccaggagatccccgagctgctcttgccggcgatcaacgaagtgcgctgtgccgcagggcagccggcgctgccggaaagcttcttcttcagcgcccgcctggatatcccgcggccgccgagcactgccatcgaccacctgccttccgaagccgaactgggcgaggaaagccggcggatgcgccacatgtaccagatcggcctgctcggcctgatccgcgaacagaacctctatcccagcctcaagctgatgggccgcgcgctggcgcgcctcgacagcctgcacggcggggtggcccgttcgcggctgtgctggatcggcgccgcggcgatcgagtcgatcgtcgatggccaactgttgccgcgcaagtcgcgcaagcaactgttctcgcgcatcgaccgcgagctcaagcaattgctgatcggcccggcctacgaggcgccgcgccatctgctcaaggaactgctttacctggtggcgctgtccgacggccagggcccgcgttcgcgcgaggtccgcgaactgcatgggctggcgccgctgccgttcaccgaccacctgctggaagaggaatcgcagcgcctgtccggccccggccagtcggtgatgcgttcgctgtccacggcgatccgcgaggaactcgccggggtcaaggacatgctcgacctgatcgagcgcggcgtggcccagccggatagcctgaccaacctgcatgcgcaactgggcaagctgagcaagaccctcggcatggtcggcctgaactcggccggcaccgccctgcagacccagctacccaccgtggccgcctgggctgccagcggcgtcgccgattcgccgccggcgttgctgcgcctggccgatgcggtgctctacgtggaaagcatggtcggcaacctcgagcgcggcgagcgccgcatcatccggccgactccggcggagcccgggcaggaagccgatgcgttcgccgtgcaccagttggccgaggcgcgcatcgtggtgatcgaggaggccaaggccggcctggccctggccaagcgtgcgatcaccgcgtacctggaatccaatggcgacaagctcaacctggccaacgtcccggccagcctgcaggcggtccggggcggtctctggttcctcggtcaggagcgcgccgcgctgctggtcggcggctgcgccgactacatccagcagcgcatgatcgagaccgcgcagatgccttcggagcagatgctggaaaccctcgccgacgccctgaccagtctcgaatactatctcgagggcggtgccgtgctgcgtccgcagggccagccggacgtcctcgacctggccagcgccagcgtcaaggcgctcggactgccggtggccgcctga

SEQ ID NO: 338532 - DNA, 837 bp, Pseudomonas aeruginosa; identical to SEQ ID NO: 319004

SEQ ID NO: 338533 - DNA, 780 bp, Pseudomonas aeruginosa
atgcccttcgaactcgcgatagaccccagcaccctgatcatcctggccgtggtggcctttctcgccggcttcatcgacgccatcgccggcggcggcggcctgttgaccatccctgcgttgctcaccgccggggtcccgccgcacctggcgctgggtaccaacaagctgagctcgaccttcggtgcggcgaccgccagctacaccttctaccggcgcaagctgttccatcccgggaaatggcgcaacggtctgctcgccaccgcgatcggcgccgccataggcgcctgggcggctcacctgctgcccgccgagtggctgaaccggatgctcccggtggtggtattcacctgcggcctctacatgctcttcggcggcacgccgaaggcgccgctggacgccgatgcgccgctcggacgcaagcgccagtggccgcagggcctcgccctgggcttctacgacggcgtggcgggaccgggcaccggagcgttctggaccgtcagctcgctgctcatgtacccgctggacctggtccgcgccagcggtgtggcgcggagcatgaacttcgtcagcaacatagtggcgctggcggtgttcatcgcctccggccaggtgatctggttgctcggcctgtgcatgggtgcgtcgctgatggtcggcgcctatttcggcgcgcgcactgccatcggcggcggggcgaagttcattcgcccggtgttcatcctggtggtcctggcgctgaccgcgcggctagcctggcagcactggttcagcggcgcctga

SEQ ID NO: 338534 - DNA, 645 bp, Pseudomonas aeruginosa
atgcagtacgacggtctggcctgggcattcgcgttactggccttgctggccgccctggtcgcggtgcgcatcctcttcgaacgcacctggttcctcggctggctgcgcggcacctgcggcttggccttcgtcgccgtggcggcgctgctgctggtgctcgcctgggacctgcgcagctattcgctgctcaagcccgagcagccgatggccaccctgagcttccaggccgaagggccgcagcgctaccgggtgctgatccaggagggcgccaacgagcgcagcgtggtgctggacggcgaactctggcaactggacgcgcggattttccgctggaaggggctggccgcgttgatcggtctggcgccgggctatcgcctcgacgcgctcagcggccgcttcctggccctcgagcagcagtcccggggccgccgcctgggcttgtcgcagagtccgctgggggtcgatctctggcgctggctgcgggccggcgagcacgacctgttcctgttcgagccgctggcggggcgggtgactttcctgccgatggcggacaaggcggtgttcgcggtgaactacggcgtcgccgggctgcttgccgagccgatgaacctggcggccgaggaggcgctcagggactggcgctag

SEQ ID NO: 338535 - DNA, 906 bp, Pseudomonas aeruginosa
atggccgacttacgccagttccgccagttcgtcgcggttgccgaggagctgagcttccgccgcgccgctgagcgcctgcacatggcccagccaccgctgaccactgcgatccggcggctggaagaagaagtcggcgccagcctgctggagcgtgacaaccgtatccaccgcctgacgccggcgggccgcgcgttcctcgacgaagcccggcgcaccctggcccaggccgaacgcaccctggcggccgcgcgcagcgccgccagcggacgcagaacgttgcgcctggcgttcgtcgacagcaccatcaatattctgctaccgcgcatactccaggcgttccgccaacagcatggcgcgctggacttccagctccaggaagacaccaccgcagggcaactggaggcgttgcgagaagaccgcatcgatgccggcctgatcgttctgccggtcgaccgccagcccggcctgtacacacatctactggtggacggcgacatgcgcgtggcattgcccgaagggcatcggctggcacgccatgcgcgcctgcgcctggaacaactggccggagaaccctggctgctgtttccacggcactatgggccgggcatgcacgacctgatcgtcgccgcctgcgcggcagccggcttcgtcccggaggtggtgcaggaggcgcggcagatgcagaccatcgccgggctggtggccggcggcatcggcgtcgcgctagtgccttcgctgctacaaccgttgcgcccgccgggggtcacctttcgtcccctgcaagggcggcgggcgcgaattccctatcggctggcgctggcctaccgcacgccgtcggaactcatcgaacgctttcgcgaaaccgcccaggcgatcgccgccgccccggcttttcgcatggcctag

SEQ ID NO: 338536 - DNA, 762 bp, Pseudomonas aeruginosa
atgcacactcattctccaatcccccgtaccgccctggtcaccggcggctcgtcgggcatcggcctggccatcgcccggcgccttcggcaacagggttatcggatcgccctggtggcccgtgattcccagcgcctgcaacgcgctgccgccgagttgggcggtgtgccctggatggccgccgatctttcccgccgcgaagctgtcgaggcggtggccgcctgggttggcgacaccttccaggggctcgacgtgctggtgaacaacgccgggttcacccgaaggatcgccgccaccactccgctggctgaggccgagcgggaatgggatgcgctgctggacggcaacctgaaaagcgcgttcctcatgtcgctggcggtgttgccgcatttcgcggaagagggcgggcggatcatccatatcggatcgatcgctgcgcagaccggtagcggcagtcctggtgcgctgggctatgcggcagccaaggccggcctgcatggcttcggcgtggccctggcgcgggaactcggttcgcgcgggatcacggtgaacagcgtggcgccgggttacatcgccgacacccggttctttcccggcggcctcgatccgcaacgggtcgccgccatcgtcggcgagaccccgctgggcaggaccggccgggtcgaggacatcgccgcggcggtggcctggctggcctcgcccgaggcggggttcgtcaccggaacggtggtgtcggtgaacggtggctggcgggtcggcaactga

SEQ ID NO: 338537 - DNA, 768 bp, Pseudomonas aeruginosa
atgtccaagacccacctgttcgacctcgacggcaagatcgccttcgtttccggcgccagccgcggcatcggcgaggcgatagccaagctgctggcccagcaaggcgcccacgtgatcgtctcgagccgcaagatcgatggctgccaggcggtcgccgacgcgatcaccgcggagggcggcaaggccaccgcgatcgcctgccacatcggcgagatggagcagatccagaacgtcttcgcacagatccgcgagcagttcggccgcctcgacatcctggtcaacaacgccgccaccaacccgcagttctgcaacgtactggaaaccgacctcggcgccttccagaagaccgtcgacgtcaacatccgcggctactacttcatgtccatcgagggcggcaagctgatgaaggaacacggcggcggcagcatcatcaacgtggcctcgatcaatggcgtatcgcccggcgagttccagggcatctactcggtgaccaaggccgccgtgatcagcatgaccaaggtcttcgccaaggaatgcgcgcagttcggcatccgctgcaacgccctcctgccagggttgaccgacaccaagttcgcttcggcgctggtgaagaacgacgcgatccgcaacctcgccctgcagcgcatcccgctcaagcgcgtggccgagccgagcgaaatggcaggcgccgtgctctacctggctagcgaagcgtccagctacaccaccggcgtggcgctgaacgtcgacggcggcttcctttcctga

SEQ ID NO: 338538 - DNA, 1071 bp, Pseudomonas aeruginosa
atgtcgctgaccgaccaatccactcgcatccgcgccggcgaagaactcgacgccgccgtcatcgacccgtacctgaaagcccatatccccggcctcgaaggcaccccgaagatcagccagttccccggtggcgcgtccaacctgacctacctgatcgagtatccgcgccaggagttcgtcctgcgtcgcccgccattcggccacaaggccaagtcggcccacgacatgggccgcgaataccgcatcctgaaccagttgaacgcaggcttcccctactgcccgaaagcctacctctactgcaccgacgagtcggtgatcggcgccgagttctacgtcatggaacgggtcaagggcatcatcctgcgcgctgaactgccgcctgagctgaatctcgacgaacaacagacccgcagcctgtgcaagagcttcatcgacaagttcgtcgaactgcacaacgtcgactacgccgcctgcggactggccgacctgggccgcccggacggctacgtgcagcgccagatcgccggctggaccgaccgctacgagaaggccctgacccccgacgcgccgctctgggaaccggtcaaggcctggctcaaggacaagcagccggccgatcaccacaagccgggcatcgtgcacaacgactaccgcttcgacaacgtgatcctcgacccggaaaacccgatgcagatcatcggcgtgctggactgggaactggccaccctcggcgatccgctgatggacctcggcaataccctcgcctactgggtggaagccggcgacccggctccggtgcagctgacccgccgccagcccagccacctgccgggcatgctgacccgccgggagttcgccgactactacgccgagcgggccgggatcccaccgatcgacaacctggacttctactacacctatggcctgttccgtcttgccggcatcgtccagcagatctactaccgctactaccacgggcagacccaggacaagcgtttcgcccagttcgtgcagatgaacaagctgctggagcagatgagcctgcaggccatcgagcgctcccgcctgtaa

SEQ ID NO: 338539 - DNA, 315 bp, Pseudomonas aeruginosa
atgaccaccgttgctgacatcgtctccaccatgaaaagcaagttcaacgccagcgcggccgccggcctggatctggtgttccagttcaacatcgaagacggcgacaaccactacctggtcgtcaaggacggtacctgcgaagtggtacagggcgacgccgagaaccccaacgtcaccctgatcatggacagcgaaaccctgaagggcatcaccagcggcgagaccgacggcatgcaggccttcatggccggcaagctgcgcgccgaaggcgacatgatgctggcgatgaagctgggcgaactgttcccggtctga

SEQ ID NO: 338540 - DNA, 711 bp, Pseudomonas aeruginosa
gtgggcagcatctacctgattcgacatggccaggcgtcgttcggtgccgacgactacgacgtgctgtcgccgaccggcatccgccaggcggaaatcctcggcgaccacctgctgaacctcggcgtccgtttcgaccgcgtcctcagcggcggcttgcgccgccagcagcacaccgcccgcgccgccctcgaacgcctggagtcctccgggctggccacgccggagctggaagtcgatccggcgttcaacgaattcgaagccgacgcggtaatccgcgcgcacctgccggacctgctcgatgagcagccggaagccttgcacatccttcgccatgcggccgagcatcgggccgagttccagcgcctgttctccaccatcatcgcgcgctgggtttccggcaaccatgagaaagatgggctggaaagctggcaggaattcctcgataaggtccatgacggtcttcgtcgtctgctggcgcaggccagcggcaaggacagggtcgccgtgttcacctccggcggtaccattaccgccctgctccagctgatcgtcggcgttccgccgctcaaggccttcgagctgaactggcagatcgtcaatacctcgctgactcgcctgaaattccgcggcgaggaagtgtccctggcttccttcaacagtcacgtgcacctggaactgttgaaggcgccggaactcatcacctatcgatga

SEQ ID NO: 338541 - DNA, 1026 bp, Pseudomonas aeruginosa
gtggagttcattgccgaatatgcgggctttctggccaggaccgtgaccgtgctggcggcgatcatcgtggtgctggtggtgatcgtcgccctgcgcggccgcggccggcgcggcgcaggcgggcacctcgacgtgcagaagctcaacgatttctacaaggacctgcgcgagcgggtccgccacagcgtcctcgacaaggccagcctcaaggccttgcgcaaggaggagagcaaggcggcgaagcaggcgaagaaacatcctgaacagaagtcgcgggtctacgtgctcgatttcgacggcgacatcaaggcctcggctaccgagcaactgcgccacgaagtgactgcggtgctgagcatggcgggcaaggacgacgaggtggtgctgcgcctggaaagcggcggtggcatggtccatggctacggtctggcggcctcgcaactggcgcgcatccgccaggccggcgtgccgctgaccgtgtgcgtcgacaaggtggcggccagcggcggctacatgatggcctgcatcggcgatcggatcctttccgcgcccttcgccatcctcggctcgatcggcgtggtggcgcagttgcccaacgtccaccggctgttgaagaagcacgatattgacttcgaggtgcttaccgccggcgaatacaagcgtacgctgacggtattcggcgagaacaccgagaagggccgggaaaagttccaggaggacctggaggtgacccacgaactgttcaagaacttcgtggcccactaccggccgcaactgaacatggacgagatcgccaccggcgaggtctggctgggccaggccgcactgggcaagctgctggtggacgaactcaagaccagcgacgagtacctggccgagcaggccagggagcgcgatgtctaccaggtgcaattcgtcgagcgcaagagtctgcaggaacgcgtcggcctggccgccagcgtggttatcgaccgcgtgctggtgacctggtgggggcggctcaaccagcagaagttctggcaatag

SEQ ID NO: 338542 - DNA, 993 bp, Pseudomonas aeruginosa; identical to SEQ ID NO: 318994

SEQ ID NO: 338543 - DNA, 876 bp, Pseudomonas aeruginosa
atgaaccctccgcaaccacgcctcatcgataacggcaacggccatccgctggccagccattggtaccggcctgccggggagccgcgcggctatctcctgatcgtcccggcgatgggagtggaacagcgcttctacgcgcccttcgccgcctggctggcagagcgcggctacctggccatcaccttcgactacctgggcatggggcaatcgcgcaacggctcgctgcgcggtctcgaggtcgatgtgctgggctgggcccgtcatgactgcagcgccatgctcgccgccgcgctcgccgagagcgggagcaagcccctgtactggatcggccatagcctgggcggccagatcctgcccttcgtcgaagggcgcgagcgtatcgatagggtcttcagcatcgccagcggcagtggctactggaaggaaaacagcccgcggttgcgcaacaaggtctggttgttctggtacctcgtcgcgcccctgctgacgccgctgctcggctattttcccgggcgccgcctgggcatggtcggcgacctgccgcgcggggtgatcgaacaatggcgacgctggtgcctgcatccgcagtacgccctcgcggatggcgaggccatccgccgcgccttctccgccgtacgcacgcccatcgtgtcgctgtcgttcaccgacgatgaaatgatgtcccgacgcagcatcgagtcgctgctgggcttctaccgcgaagcgccgaaaaccgcctggcgcatcgctcccgaggaaatcggcgcccgccacatcggccatttcggcttcttccggccgcagttcgccgaatcgctatgggcgggctacctgttgccggagctgggctccggcaacgccctcagccgaggttga

SEQ ID NO: 338544 - DNA, 438 bp, Pseudomonas aeruginosa; identical to SEQ ID NO: 318992

SEQ ID NO: 338545 - DNA, 582 bp, Pseudomonas aeruginosa
atgggccgttcttcccgcaaagacgagattctccaggccgccctggcctgcttcagcgagcatggcgtagacgccaccaccatcgagatgatccgcgaccgttccggagcgagcatcggtagcctctaccaccatttcggcaacaaggaacgcatccatggcgaactgtacctggccgggatcggccagtacgcggcgttgctcgaagccggcttcgccagggcgcgcagcgccgaggaaacggtcaggttgctggtcaccagctacatcgactgggtcgtggcgaatcccgactgggcacgcttcatcctgcacagccgcgggcgggtggaggcgggggagctgggcgagcgcctgcgggccgacaaccaggcgcacttcgcacggatccatgcggcgctggcgggatatcgggccgagggcctgttccgcgagatgccggacgactgctttgcttcggtggtgatcggcccggcccacgaccttgcccgccagtggctggccgggcgaacccgggtggcgttggccgactgtcgcgaactgctggcacaggtggcctgggacagcgtgcgggcggcctga

SEQ ID NO: 338546 - DNA, 498 bp, Pseudomonas aeruginosa
atgcagcgaatcattaaggaccgccaggtggtcgacgaccgctggcacttgctgcccaaggacgcgaccctggaaagcgtacccaacagcgacgacgtgatcatcccgctggccctgtggctcgagcacggcccggccctgcgcggccgcgacggcggcctgggggtctggctggacgcggacgaggagccggaaagcatcgccggcgacctcgacaggttccaggtgatcgcggtgaacttccccgcctttaccgatggccgcggcttcagcagcgcgcgcctgctgcgcgagcgctacggctacaagggcgagatccgcgcgatcggcgacgtgctgcgcgaccagttgttcttcatgcgccgctgcggcttcgacgcctatgccatccgtgccgaccgcagcccggaagacgccctggccagcctggacgacttcagcgaggtctaccagacctcggtggagcagccgctaccgctgttccgccgccgcggctga

SEQ ID NO: 338547 - DNA, 1659 bp, Pseudomonas aeruginosa
atgtacgtatacgacgagtacgaccaacggatcgtcgaggaccgcgtcaagcagttccgcgaccagacccgccgttacctggcgggtgaattgaccggtgaggagttccgcccgctgcgcctgcagaacggtctctatatccagcgctatgccccgatgctgcgcatcgccgttccctatggcctgctctcctcgcgccaactgcgcaagctggcgcagatcgcccgcgactacgacaagggctacgcccacatcagcacccggcagaacgtgcagttcaactggccggagctggaagacgtgccggaaatcctcgccgagctggccaccgtgcagatgcacgcgattcagaccagcggcaactgcatccgcaacaccaccaccgaccagttcgccggcgtcgcccgcgacgagctggtggacccgcgcccctggtgcgagatcatccgccaatggtcgaccttccaccccgagttcgcccacctgccgcgcaagttcaagatcgcggtgaacggcgcggtgagcgaccgtgccgccatcgaagtgcacgacatcggcctggaggcggtgaagaacgaggccggcgagctcggcttccgcgtctcggtcggcggcggcctgggccgaacccccatcgtcggcagcttcatcaatgaattcctgccctggcagcacctgctcggctacctggatgccatcctgcgcgtctacaaccgctatggccggcgcgacaacaagtacaaggcgcggatcaagatcctggtcaaggcgctgaccccggaagtcttcgccgagcgcgtcgaggccgaatgggccaacctcaaggacggaccgagcaccctcaccgaggcggaagtccagcgcgtcgccgcgcatttcgtcgatccggcctacaaggccctcgacgacctcgacgagtccctcgcccggctcgacgcggagcaccccggcttcgcccgctggcgcgcacgcaacaccttcgcccacaagaagcccggctacgtcgccgtgacgctctcgctgaagcccaccggcaccgcgccgggagacgtcaccgacaaacagctggaggccatcgccgatctcgccgaccgctacagcttcggcgaggtgcgcaacagccataaccagaacatcattctcgccgacgtcgagcagggcgaactcttcgccctctggggcgaactccgcgaactgggcttcgccacccccaacgtcggcctgctgaccgacatcatctgctgccccggcggcgacttctgctccctggccaacgccaagtcgatcccgatcgccgaagccatccagcgccgcttcgacaatctcgactatctattcgacatcggcgacatcgacctgaacatctccggttgcatgaacgcctgcggccatcaccatgtcggccacatcggcatcctcggggtagacaagaaaggcgcggagttctaccaggtctccctcggcggcagctcggcgcgcgacgccagcctcgggcagatcctcggcccgtccttcgcccaggagcagatggccgacgtgatcgacaagatcatccaggtctacgtggaacgccggaccgaggaagaacccttcatcgacaccttccgccgtatcggtatcgacccgttcaaggagcgcgtatatgcagcgaatcattaa

SEQ ID NO: 338548 - DNA, 228 bp, Pseudomonas aeruginosa; identical to SEQ ID NO: 318988

SEQ ID NO: 338549 - DNA, 1041 bp, Pseudomonas aeruginosa
atgcgtagccaagacctccaccagcgcctcgccgatctcggcgccaagcccctgcattgcgggaggatcgtccgcgcctggctgcagggccgcgccctcgatgcctgcaccgcccgccagcgggccgaggacttcctgccgctgggcgtacgccatggtctgccccaggtagcagcggaactggaaggcatcgcccgcctgcacagcgagcatccggcgagcgacggctcgtcgcgcctgctggtggaactggccgaccggcagatggtggaaagcgtgctgctgccgcgcggtgggctgtgcgtctcgacccagatcggctgcgcggtcggctgcgtgttctgcatgaccggccgcagcggcctgctgcgccaggtcggcagcctggagatggtcgcccaggtggtcctggcgcgccgtcggcgagcggtgaagaaagtggtgttcatgggcatgggcgagccggcgcacaacctcgacaacgtcctcgaagccatcgacctgctcggcaccgatggcggcatcggccacaagaacctggtgttctccaccgtcggcgatccccgcgtgttcgagcgcctgccccggcaacgggtgaagcccgccctcgccctgtccctgcacagcacccgcgccgaactgcgccggcaactgttgcccaaggcgccgccgctgagcccggaagaactggtggaagccggcgaggcctacgcccgccgggtcgactatccgatccagtaccaatggaccctgctcgaagggatcaacgacagcctggaggaaatggacggcatcctgcgcctgctcaagggccgcttcgcggtgatgaacctgatcccctacaacagcatggacggcgacacctaccggcgcccgagcggggagcggatcgtcgagctggtgcgctacctgcacagccgcggcgtgctgaccaaggtgcgcaactcggccggccaggacatcgacggcggctgcgggcaactgcgcgccagggccacgcaggccacggtggaacggcgcatccccgcccgccaggcctga

SEQ ID NO: 338550 - DNA, 303 bp, Pseudomonas aeruginosa; identical to SEQ ID NO: 318986

SEQ ID NO: 338551 - DNA, 486 bp, Pseudomonas aeruginosa
atggacgagcaggcgcttctggcgttgctccgcgagctggccatcgacagccagcgggtcgagcatcccgcgatcgcctccatcgaggaatattacgcgcagggcatcgaattgcccgaccagggcatcaagaacctgttcctgcgcaaccgcaagggtactcgccactacctggtgctgctcgacgagcgcaaggaggccgacctgccgggcatcgctgaacagatcggcgaaagccgcctgtcgttcgcctcggtcgagcgcctgcgcgaatacctcggcgtcgaactgggctgcgtgacgcctttcgcgctggtcaacgatccgcatcacagggtcgaggtgttgctcgacgatgccatccgccaggaccagttgctcggtttccacccgttggtgaataccgccaccgagtgcatccgctacgcagacctgctggctttcctcgcccacacggggcatgaaccgcgcctgatccgggcgtag

SEQ ID NO: 338552 - DNA, 363 bp, Pseudomonas aeruginosa
atgaaattcctcactcccgagcagatggaaaagccgcgcaagcgccgcctgcgcaagaaactgcgcctgggcgagttccaggagttcggcttcagcttcgaactgacctacgaccgcaacgccctctcccacgacgatgcgctggaccatctgatcgacttcgtcgaggcccagggctgggtgttcggcggtggcggctcgccggaacaggcggagatcagcggctacctgtgcctggcgcgggtcggcagcctggacgaggcggaccgggaaagcgcccgcctgtggctggaagcccaaccctggtgcaagaccttcgaggtcggcccgttgagcgactgctggcacaacttcttcgagtga

SEQ ID NO: 338553 - DNA, 3705 bp, Pseudomonas aeruginosa
atgtccagcccgctcaccgatcgcagcgcccgcctgcaagccctccagcacgccctcagggaacgtatcctgatcctcgatggcggcatgggcaccatgatccagagctacaagctggaagaggccgactaccgcggcgagcgcttcgccgactggccgagcgacgtgaaaggcaacaacgacctcttgctgctgagccgcccggacgtgatccaggccatcgagaaggcctacctcgacgccggcgccgacatcctcgagaccaacaccttcaacgccacccaggtgtcccaggccgactacggcatgcagtcgctggcctacgaactcaacgtcgaaggggcgcgcctggcccgccaggtggcggacgcgaagaccgccgagaccccggacaagccgcgcttcgtcgccggcgtgctcggcccgaccagccgcacctgctcgatttccccggacgtgaacaaccccggctaccgcaacgtcaccttcgacgagctggtggagaactacgtcgaggcgacccgcggcctgatcgagggcggcgccgacctgatcctgatcgagaccatcttcgacaccctcaatgccaaggcggcgatattcgccgtccagggcgtgttcgaggaactcggcgtggagctgccgatcatgatctccgggaccatcaccgacgcctccggccgcaccctgtcgggccagaccaccgaggccttctggaactcggtgcggcacgcccggccgatctcggtaggcctgaactgcgccctcggcgccaaggaattgcggccgtacatcgaggaactgtcgaccaaggccgacacccatgtctcggcccaccccaacgccggcctgccgaacgccttcggcgaatacgacgaatcgccggcggaaatggccgtggtggtcgaggaattcgccgccgccggcttcctcaatatcgtcggcggctgctgcggcaccaccccggcgcacatcgaggcgatcgccaaggcagtggccaagtacccgccgcgggccatcccggagattccccgggcctgtcgcctgtccggcctggagccgttcaccatcgaccgcagctcgctgttcgtcaacgtcggcgagcgcaccaacatcaccggttcggccaagttcgcccggctgatccgcgaggaaaactacgcggaagctctcgaggtggcccagcagcaggtggaagccggcgcccaggtgatcgacatcaacatggacgaaggcatgctggactcgaaggcggccatggtcaccttcctcaacctgatcgcctccgagcccgacatctcgcgcgtgccgatcatgatcgactcctccaagtgggaagtgatcgaggccggcctgaagtgcattcagggcaagggcatcgtcaactcgatctcgatgaaggaaggcgtcgaggccttcaagcaccatgcccacctgtgcaagcgctacggcgccgctgtggtggtgatggccttcgacgaggagggccaggccgacacccaggcgcgcaaggaagaaatctgcaagcgctcctacgacatcctggtcgacgaagtcggcttcccaccggaagacatcatcttcgatgcgaacatcttcgccatcgccaccggcatcgaggaacacaacaactacgcggtcgatttcatcaacgcctgcgcctacatccgcgaccacctgccctacgccctgagctcgggcggggtgtccaacgtgtccttctcgttccgcggcaacaacccggtacgcgaggcgatccactcggtgttcctctactacgcgatccgcaacggcctgaccatgggcatcgtcaacgccggccagctggaaatctacgacgagattccgaaagcgctgcgcgaccgggtcgaggacgtggtgctcaaccgcacgcccgaggccaccgaggccctgctggcgatcgccgacgactacaagggcggcggcgcggtcaaggaggccgaggacgaggaatggcgcagctacagtgtcgagaagcgcctcgagcatgcgctggtcaagggcatcaccacctggatcgtcgaggacaccgaggaatgccgccagcagtgtgcgcgtcccatcgaggtcatcgaaggtccgctgatgtccgggatgaacgtggtcggcgacctgttcggcgccggcaagatgttcctcccgcaggtggtcaagtccgcgcgagtgatgaagcaggcggtggcccacctgattcccttcatcgaggcggagaaaggcgacaagccggaagccaagggcaagatcctgatggccacggtgaagggcgacgtgcacgacatcggcaagaacatcgtcggcgtggtgctcggctgcaacggctatgacgtggtcgacctcggcgtgatggtgccggcggagaagatcctgcagaccgccatcgccgagaaatgcgacatcatcggcctgtctggcctgatcacgccgtcgctggacgagatggtccacgtcgccaaggaaatgcagcggcagaatttccagttgccgctgatgatcggcggcgccactacctcgaaggcgcataccgcggtgaagatcgatccgcagtacagcaacgacgcggtggtctacgtcaccgacgcctcgcgcgcggtaggcgtggccaccagcctgctgtccaaggagctgaaggccgactacgtggcccgcacccgcgccgactacgcggtggtccgcgaacgcacggccaaccgcagcgcccgcaccgagcggctgagctacgaacaggcgatcgccaacaagccggcgttcgactgggccggctaccaggcgccgacgccttccttcaccggcgtcagggtgctcgacgagatcgacctcgcggtgctcgccgagtacatcgactggacgccgttcttcatttcctgggatctggccggcaagtacccgcgcatcctcaccgacgaggtggtcggcgaggccgccacctcgttgttcaacgacgcccaggcgatgctgaagaagctgatcgacgagaagctgatcaaggcccgtgcggtgttcggcttctggccggccaaccaggtcgagcacgacgacctggaggtctacggcgccgatggcgagaccctcgccaccctgcaccacctgcggcagcagacgatcaagccggacggcaagccgaacctgtcgctggccgatttcgtcgcgccgaaggaaagcggcgtgcgcgactacatcggcggcttcatcaccaccgccgggatcggcgccgaggaagtggccaaggcgtacgaagccaagggcgacgactacaacagcatcatggtcaaggcgctcgccgaccgcctcgccgaagcctgcgccgagtggctgcacgagcgggtgcgcaaggagtactggggctacgcccgcgacgaacacctcgacaacgaggccttgatcaaggagcaatacgtcggcatccgcccggcaccgggctacccggcctgccccgaccataccgagaaaggcactctgttcgaactgctcgatccgcagggcctgtccggcgtcagcctgaccgagcactacgcgatgttcccggccgcggcggtcagcggttggtatttcgcccacccgcaggcgcagtacttcgcggtcggcaagatcgacaaggaccaggtggaacgctacagccagcgcaagggccaggaagccagcgtcagcgagcgctggctggcgccgaaccttggctacgatgactga

SEQ ID NO: 338554 - DNA, 465 bp, Pseudomonas aeruginosa; identical to SEQ ID NO: 318982

SEQ ID NO: 338555 - DNA, 519 bp, Pseudomonas aeruginosa
atgaaactgctcgccggcagcttcgccgctctcttcctgagcctttcggcccaggcggcggactgtactttcacccagctggaaatcgtgccccagttcggctcgccgaacatgttcggcggcgaggacgagcacgtccgcgtgatgttcagcaacgaggatcccaacgacgacaaccccgatgcctttcccgaaccgccggtctacctggccgaccgcgacagcggcaacgattgccgcatagaggacggcggcatctggtcgcgcggcggcgtgttcctgagccaggacggccggcgcgtgctgatgcatgaattcagcggctccagcgccgagctggtgtcctacgacagcgccacctgcaaggtggtgcaccgcgaggacatctccggccagcgctgggcggtggacaaggacgggctgcgcctgggtcagaaatgctcgggcgaatccgtcgacagctgcgcgaagatcgtgaagcgttcgctcgcgccgttctgccagaccgcaaagaaatga

SEQ ID NO: 338556 - DNA, 2289 bp, Pseudomonas aeruginosa
atgttgccaagaccgttggttgggttggccttcgttttgtcgtcttttatccagtctgtttccgctgctgaaatttcctatagccgtgacgtccagccgatctttaccgccaagtgcgtcgcctgccacgcctgctacgactcgccctgccagctcaacctgagcagcgccgagggcgcgcagcgcggcgccaaccaactgccggtctacgacggcacgcggaccaaggcgcaggaaaccacccgcctgtacctcgatgcgcacggtgccgacgcctggcggcgcaaggacttctggtcggtgctcgaaccgcaggacggccaggccgcactgatggcgcggatgctcgagcttggccacagccagccgttgcagccgaatgcgaagatccccgaaggcctggacatttcgatcagccgcgccaaccagtgcccgacgccggccagcatcgatgcgttcatccgcaagaacccaggttccggcatgcctttcgcggtggccgggctgagcgacgacgaatacgccaccttgcagaagtggctggccgcgggcgccccggtcgaccagcagccgttgcggccgaccgccgccgaggcgcgccaggtggccagctgggagcgtttcctcaaccagcctggggccaagcagagcctggtctcgcgctggctctacgagcacctgttcctggcgcacctgtatttcccggagcagggcgcgcccggccacttcttccagctggtgcgttcgcgcacgcccagcggccagccgatcgacccgatcccgacccggcgtcccaacgacgatccgggcaacagcttctattaccgcctctggccgatccagggcgtgatcgtacacaagacgcacatcacctatccgctgacggcgaagaagctggaacgcgtccaggagctgttcttcggcacccagtggaacaccgacaaggttcccggctacggcgtgcagagccgtgccaacccgttcgccaccttcgccgcgatcccgccacgggcgcgctaccagttcatgctggacaacgccgaatacttcacccgtaccttcatccgcgggccggtgtgccgtggacagatcgccaccgacgtgatccgcgacaacttctgggtggtattccaggaccccgagcaggacctgttcgtcaccgacgccaacttccgcgcgcagagcgagccgctgctggccttgccggggcagatcgacgagctgaagaacctgctcggcctgtggagcgcctaccgggacaagcgcaacgagtacgaagacctgcgccaggacgtctacgccgacgcgccgccgccgacctggaacacgatctggcacggcaacgacaacgccctgctgagcatcttccgccagttcgacagcgcctcggtgcgcaagggcctgcttggcgaggtaccgcagaccctgtggctgatggactacccgctgttcgagcgaacctactacgggctggtggtgaacttcgatgtcttcggcaacgtctcgcaccaggcgcagacgcggctgtacttcgacctgatccgcaacggcgccgagcagaacttcctccgcctgatgccggtcgacgcgcgccagccgttgctcgacgactggtaccagaacagcggcaagctgaagatgtggatggactaccaggccttcgacgacgacacgccgagcgcgctgagattgccggagaagcagccgaagaaggccttcgccgaagaactgctgcgtcgctacggcgacctcaatgcgcgccccgacccgatcaaccgctgcctggacggcaactgctatcgaccgggcatcgaccgcgaactgcaggacgccgagcaggccttcagtcgcctggtgagccggccggcggccggcctcaaggtcatcaagcgcttccccgaggcgaccatgctgcggatacgtacgtccagcggcaagcgcgagatctataccgtgctgcgcaaccgcgcgcacagcaatgtcgccttcatgctcggcgagtcgctgcgctaccagccgggcctggacaccctgacgatctacccgggcgtgctgtccagctacccgaacttcatgttcgatctgccggcgacggatgccgagtccttcgtcggcgccctggaggcggcgaagagcggcgaggacttcgacaaggtggtcgtacgctggggcgtgcgccgcagcaatccgcagttctggagctacttccacgatctcgaggcgtacatccgcgaaaccgagccggtcgaggcgggcgcactggacatgaaccgctacgagaacctctga

SEQ ID NO: 338557 - DNA, 585 bp, Pseudomonas aeruginosa; identical to SEQ ID NO: 318979

SEQ ID NO: 338558 - DNA, 1170 bp, Pseudomonas aeruginosa
atgctgctacgcaacccgaccctgctcctgctgttctgcggccaggccctgtactggtcctgttcgctgatcggcataacactgacctcgctggtcggcgtccagctggcgccgttgaacagcctggccaccctgcccctggccctgctggtgctgggcaacctgctggcggtgcagccgttgtcgcacttcatgcagcgccacggccgacgtcccgggctgatgctcggcgccggcggcggcgtgctcggcggcctggtctgcgccgccggcgtctggactggcgatttcctctggttctgtctcggcgcgctgggcatcggggtctaccaggcctcggccatgtactaccggttcgccgcgctggaggcggtggatgccgggcggaaaggccgcgccagcgcctacgtgctcgccggcggagtactcgccgcgctgctggcgccgagcctggcgctgtggtcgcgcaacgcgctggcccagcccttcgtcggcgcctatctgctgatcgccgtgctggccctcgccggcctgctgctgatggccctgctccgcgaaggccaggcgccacgcccggcacggctcgcctggcgcgacataggcggcctgttgcggcggccggtggtccgcgcggccatcgcctgcaccgcggccggacacgggttgatgatcctgatcatgaacgccacgccgctggccatgagcttctgcggcctgccgctggaacagtcgagtcgggtcatccagtggcacgtgctgggaatgttccttccggcgttcttcgccggagcgctggtcgaccgcatcggcaaccgtcgcgtcgccctgctcggcgcgttcctgctcgccgcaagtgccggcatcgccctggacgggcagtcggtcacgcatttcctgctcagttcgctggccctgggcagcggctggaacctgatgctcatcgccggcaccaccctgctcggcgagggccacgccgaaagcgagcgcggcgccgcgcaaggattgatggagcaaggcaacagcctggtggcggcgctgatgtcgttcggctccggcgccctgatcaccagccttggctggaacgcggtgaacctgctggtctggccggcgctgctggtggcgctggcactgctctggccggtacggcgaacgcggacgctgtcgcgctga

SEQ ID NO: 338559 - DNA, 243 bp, Pseudomonas aeruginosa
atgctggaactgcgccccaactgcgagtgctgcgaccgcgacctgcccggcgacagcggcgacgcgctgatctgcaccttcgagtgcaccttctgccgcgattgcgcgacgacccgcctgggcggccaatgcccgaactgcggcggcgaactgctggcccggccaaggcgtccgcgggatgcgctggtccgtcagcccgcctccagccggcgcgtcgtcaggcccggcggttgtccggagtga

SEQ ID NO: 338560 - DNA, 1005 bp, Pseudomonas aeruginosa
atgcccgaaccgcgcctgattgcctgcctgatctatcccgacgtgatgagcctggacgtgaccggaccgctgcaggtattcgcctcggccaacgtcgaacgccagcgccagggcctgccgcctttctaccggatacaggtgctcggcgagcgtagcgaagcggtgcccagttccgcgggcatccgcatctgcgccgacctcgcctggcgcgactgtccgccggaaagcctggacaccctgttggtgcccggcggcctcggtgtcgaggcgcagacccgcaacgccgacctgctcgcctggctgaaagccgccgaaccgtgcatacggcggctcggctcggtgtgttcgggagcgctgatcctggccgccgccggggttctcgacgggcgcccggcgaccacccactgggccgacgtggcgacgctgcgccaggggtttcccggcgtccatgtgcaaggcgaccgcctgcacacctacgacccgcagtgccgcgacggcgacgcccacatcttcacctcggccggcgtcacggcgggaatcgacctggccctggcgctggtcgaggccgacctcggccgcagcctggcgctcagcgtcgcgcgacgcctggtgatgttcctcaagcgtcctggcggccaggcccagttcagcgcctggctgaccccggaaccgagccgcaccccgcgcctggccgcgctgctggagtggattcccgccaacctcgccggcgacctgtccctggaagccctcgccgaccgggcctgcatgagcccgcgtacgctgtcccgggtatttctccaggaactgggcgtggcgcccggtcgctacgtcgagcgggttcgcctggaggccgcgcgcgccctgctgcaggacgcccaggcatcgatcgccacggtgtcccggctgtgcggcttcggccatccggaaaacctccggcggacgttccacaagcatctttcggtcagcccccaggaatacgccgaacgcttcggcatgctggcctga

SEQ ID NO: 338561 - DNA, 1206 bp, Pseudomonas aeruginosa
atgcttgcacgcgacagcctggtacaggctggtctgccggataatccgtatgcgcgccagttgcgcaacggctttcgttggttgcggttcgaaaaggagctggaaaacgagtttcgcgagtttctcagctggaactcgctgatgcagcggcgcgctgccatcggggtggcgttcctgatctgggcgctgttcatcgtggccgactggatgatggtggacatccgcctgcaccccagcctgttcgagcaactgctgggcgtgcgcctgggaatgatcggcctgctgctggtggtctggccggcggccttcctgcccagcctgcgcaaggtcggcgatgccatcgcgccctactgcctgctgctgatcaacctggcggtgctggcctgcgacgtgctgttcgagtggcatggggtgccgcgcttcacccaactgggcgcgaccctgggcatcctcgcggtgttcttcccgctcggcctggcgttctgggcctgcgtgcgcctggcgttgctgtgcctggccctgaacctggcggtattcctgcttttcggcggcgaagagaacctgcgtaccaacctgctgaatacgctctacaacggcctggtggtcctgatctgttcgttcgccctgtacctgcaggactacgcccagcgcgagcagttcctcggccggcggctgctgggcatgatggccgaacaggacagcctcaccggcctggtcaaccggcgctactacgagctgctcgcccagcgggccctggagcagggcgcccgcgaagaaaagggggtggcgctgatcctggtggatgtcgacgacttcaaggcctacaacgaccactacgggcatccggccggcgatgccgccctgcgccagcttggcgtcgtgctccggcagggcgcgcggcggccgctggatatcgccgcgcgcctgggcggggaggagttcgccgtgttgctctacgacagcgaggagggcaacaccctggccatcgccgagcgcctgcggcaggcggtggaggcgctgggcatcgagcacctgggctccagcgccggcccctgcctgaccatcagcctgggggtggcctattcgacctccggcatgggcctggacgcgctctatcgcgaggccgaccgcgcgctctacgaggccaaggatgcagggcgcaacgcggtgcgcgtggcgttccggcagcacgaccgcctcgaatag

SEQ ID NO: 338562 - DNA, 276 bp, Pseudomonas aeruginosa
atgaacgctacgctccgtttcaacgaggctttgctgatcaccgggcgcgccttccagccataccagtgcgttgcctggtccgagctaggcagtgacggcggcctgagcctgtccgtagtcgatcgcactggcacccgcctgctgggccgtgcacgcattccgagctccgcctactccgatccggagcagcttgccggcctgctgcaacaggcacgcgaagaactcagccacaacggctacaacctgcaggactggagtatgcccagccaaggctga

SEQ ID NO: 338563 - DNA, 864 bp, Pseudomonas aeruginosa
atggatatcgacctcgcccgtaccttcctggagatcgcccgcagcggtagcttcgtcgctgccgcggaacgcctgcacctgacccagaccgccgtcaccgcgcgcatccagaacctcgaagggcaactcggctgccggctgttcgtgcgcaaccgcgcgggcgcgcgcctgaccgccgacggcgagcacttcctcggctacgccagccaactggtgcagacctgggatgcggcgcgacgcgacctgccgctgccggacggcttccgcaacctgctcaacctcggcggcgaggtcagcctgtgcaatccgctgctgcttaactggatgcggcgcctgcgcgaggcgattcccggccacgccgtgcgggtcgagatcggccagggtgccgacctgctcaagcaactggagcagggcgcgctggacgccgcgctggtctaccagccggaatactggccggggctgcaggtcgagcagttgctggaggaaaagctggtgatggtgcgttccgtgctatccgcggagccttatctgtatgtcgactggggcccggatttccgcagccagcacgatgccgcgctgccggaccgggccaaggccgcgctagcctgcaacctcggtccgctggccctgcagtacatcatgcagaacggcggcagcggttatttccgtacccgggtggtgagcagctacctggatggcggcaccctgcaacgggtcgagcaggcgccggagttcgcctacccgacctacctggtgtactcccgcgagcgcctgtcgccgaccctgcgccatgcgttccagttgctgcgcgaagtggtccgcgaggacagcgactggtcgcagcgctgggactacgtgatctga

SEQ ID NO: 338564 - DNA, 1158 bp, Pseudomonas aeruginosa
atgaacgactcccccagcaccgccgtacgcacctggctgaaaggcttccgccccctgaccctgaacgctcgaccgcgcgactgcctgcgcgccggactcggtgcctgcatcggcgcgctcgccgcggtattcgcctgccaggcgttgttcggcagcgaactggcgctgcgcctggcagcgccgctcggcgcatccgccgtactactgttcgccctcgcctccagccccctggcgcaaccctggtcgatgctcggcggcaacctggtcgccgccctggccggcggcctcagcgcctattggttcggacacgatctggccccggccctggtcggcatggccctcggcatgctgctgatgttcgccctgcgctgcctgcatccgccgagctgcgcgctggccctgagcgtggccctcaacccgtccctgagcgaactcggcatcgacgtggtctggccgatcctgctctccaccctggtgctgatcggctgcgcgctgctctacaacaacctgatgcgctctccctacccgcgcccctaccagtcgccgcgggccaatctccatggcacccgcgacctggcgccgagcgcgcgtacggacttctccgcccgggacctggaccaggcgctgcaggacttcggcgaatacgtcgacatcacccgcgacgatctcgagcgactgatccaccatacagagcgctacgccttgcgccggcgcatgggcgagctgaccgcggcacggatcatgtcccgcgacgtgcagaccgccagcaccgagaccttcatcgacgacgcctggaagcagttgcaggaacaccgtctgaaggccctgccggtgctcgacgagcatcggcggctggccggcatcgtcacccagagcgacctgctcaagcacttccgccccgacggcagcccgttcaagcgcctgcgcttcctgcgcgggaccaagctgaagacgatcatgaccaccccggtggtctgcgtacaggccgacacccacgccgtcgaactggtctcgctgctatccgacgaaggcctgcactgcctgccggtgctcaacgaggccggctacctggtcggcatcgtcagccagaccgacctgatcgccgcgctctaccgcaactggctgcagcacctgggccaggccgatcagatcacgtag

SEQ ID NO: 338565 - DNA, 222 bp, Pseudomonas aeruginosa
atgctgttgtccctgctgtgcctctccaccctggcgctcggcctcgccctcaggctcgccggcagtacccgcgaggaacgcgaacaggctgccctgctgccattcgccgacgatcccgaggccgcccgccgggtcgcccgggataccggcaagatctgccggcaggtggtccgccccctcgaggaatcccgcgaggccgccggcccgccgttcctcgcctga

SEQ ID NO: 338566 - DNA, 1443 bp, Pseudomonas aeruginosa
atgaacgatacggatagcagaaaagatccggacggctacaactacgacgtcgtccgccagttcaccctgatgaccctggtctggggcatcctcggcatgggcctgggggtgttcatcgccgcccaactggtctggccggcgctcaacctcgacctgccctggaccagcttcggccgcatccgcccgatccacaccagcctggtgatcttcgccttcggcggcagcgcgttgttcgccacctccttctacgtggtgcagcgcaccagcggcgtgcggctgatctccgatgccctggcgcgcttcgtgttctggggctggcaggcggcgatcgtggggatgatcgtcagctacccgctgggctataccacctccaaggaatacgccgagatggaatggccgctggcgctgtggatggcgatcgtctgggtggtctatgcctacctgttcttcggcaccatcgcccgtcgcaaggtgaagcacatctacgtcggcaactggttctacggcgccttcatcatcgtcaccgcgatggtccatatggtgaaccacgcattgctgccggtgagcctgggcaagtcctactcggcctattccggcgccaccgacgcgatgatccagtggtggtacgggcacagcgtggtcggcttcatcctctcggtcggcttcctcggcatgatgtactacttcgtgcccaagcaggccgggcgaccgatctactcctatcgcctgtccatcgtgcatttctgggcgatcatctcgatctacatctgggccggtccgcaccacctgcactacaccgcgctgccggactgggcgcagtcgctgggcatggtgatgtcgctgatcctcctggcaccgagctggggcggcatgatcaacggcatgatgaccctctccggggcctggcataagctgcgcgacgacccgatcctgcgcttcctggtggtgtccctggcgttctacggcatgtccaccttcgaaggcccgatgatggcgatcaagacggtcaactcgctgtcccactacaccgactggaccatcggccatgtccacgccggcgccctcggctgggtggcgatgatctctatcggcacgctctaccacatgatcccgaaactctggggccgcgagcggatgcacagcgtcggcctgatcaacgcgcacttctggctggccaccatcggcaccgtgctgtacatcgcctcgatgtgggtcaacggcatcacccagggcctgatgtggcgggcggtcaacgaggacggcacgctcacctactcgttcgtcgaggcgctggtggccagccatccgggctacgtggtgcgcctgctcggcggcgccaccttcgccagcggcatgctgctgatggcctacaacacctggcggaccctgcgcagcgcgcaggaccagcggcagccggtcctggcggccggccagggggcctga

SEQ ID NO: 338567 - DNA, 924 bp, Pseudomonas aeruginosa
atggccggagccagcctcctcaccctcctcgacgatattgccgcagtgctcgacgacgtctcgctgatgaccaaggtcgccgcgaagaagaccgccggtgtcctcggcgacgacctggccctcaacgcccagcaggtcaccggggtcaacgccgaccgcgaactgccggtggtctgggcggtagccaagggctcgctgcggaacaaggcgatcctcgtccccgccgcgctgttgatcagcgccttcgcgccctgggcggtgatcccgctgctgatgctcggtggcgcctacctgtgcttcgaaggcttcgagaagatcgcccacaaatacctgccccatgacgacgagcacgccgacgaggcagcgctggcggccaatgtcgacgtggccgccctggaaaagcagaagatcggcggcgcgatccgtaccgacttcatcctctccgcggaaatcatcgccatcaccctgggtaccgtcgccgagtccagcttcaccacccaggtactggtgctggtcggcatcgccctggtgatgaccatcggcgtctacggcctggtcgccggcatcgtcaagctggacgacgccggcctctacctgtccaggcgcgacagcggctttgcccaaggcctcggcggcgccatcctgcgcaccgcgccatacctgatgaaaggcctgtcggtggtcggcatggcggcgatgttcatggtcggcggcggcatcctcacccacggtatcccggtggtccaccacgccatcgaacaggccgcgcagagcgtcgccggcatcgccacgctgggcccgctgctggcggcgatcaccccgaccttgctgaacttcctgttcggcatcgtcgccggcgcggtggtcctggcgggggtgctgctggtcaagcgcctgctgccgaagaagaaaaagactggctga

SEQ ID NO: 338568 - DNA, 834 bp, Pseudomonas aeruginosa
gtgaacgaatccctcgatttcttgccctacctcgagcgctgggcgttgcaacccgacggcgagcccttcgccacccacagcagccgcctgctgccggtgcgccatcgcggcgcagcggcgatgctgaagatatccagtgccgaagaagagcgtttcggccacgtactgctcaactggtgggacggccagggcgcggccagggtgctggcctacgaccaccaggcgctgctgatggagcgtgccaccggcgggcgctcgctgctggaaatggtcaggcgcggcgacgacgacgacgacgaggctacgcgtatcctctgccaggccatcgaacgcatccatgccccgcgcccgggtccgttgccggagctgaccccgctggagcgctggttcgactcgctgtatgccgccgagcgccgctacggcgggctctacgtcgactgcgcgaatgccgcccgctacctgctggagaccgctcgcgaacagcgcccgctgcatggcgacatccaccacggcaatgtgctcgacttcggcgagcgcggctggcaagtcatcgaccccaagcggctctacggcgagcgcggctacgactacgccaacctgttcaccaatcccgacgcgaagaccgcccaggcgcccggccgtttcgagcgccagctggagatcgtaatcgccgccagcggcctgcagcgccgccgcctgctgcaatggatcctggcctggaccggactctcggcggcctggttcgacgaggacggcagccgcgaggagaccgaagccgagctggccatcgcccgcctggccctggcaaacctcgctcgaacgcctgcgcaatga

SEQ ID NO: 338569 - DNA, 888 bp, Pseudomonas aeruginosa
atgaaagccaactccgatgaactgcaaagcttcgtcagtgtagtcgacagcggttccatcagcgccgccgcggaacagatgggactgaccgcctcggccgtcagccggaccctctcgcgcctcgagcacaagctcggcaccaccctgctcaaccgcaccacccggcgcatggagctgaccgaggaaggccgctacttcctcgaccaggcacggcagatcctgcagcagatggagacgctcgaggaacgcctggccctgcgccggcagagccccgccgggcgcctgcggatcaacgccgcctcgcccttcatgctgcacgcggtggtgccgcacatcggcgagttccgccggctgtacccggacatccagctcgaactcaacaccaacgacctgatcatcgacctgttggagcaacgcaccgacgtggcgatccgcatcggtgcgctcagcgactccaccctgcacgcgcgcccgctgggcgccagccgcctgcacatcctcgccagcccggagtacctggcccgccacggcacgccggcgagcatcgaggggctgcgagggcacaccctgctcggcttcacccagcccgagcacctcaaccgctggccggtggtgcacgccgacggcgatcgcctggagatccagccggatgtctctgcctccagcggcgagacgctccgccaactggtcctgagccaccagggcatcgcctgcctggccagcttcatgaccgaccgcgatatccaggatgggcgcctggtgccgctgttcgccgaacagatgagcgaataccggcaaccgatccacgccgtctactatcgcaactcgcaactggcgctgcgcatccagtgcttcctcgacttcatccagcagcgcctgggcgcctga

SEQ ID NO: 338570 - DNA, 1086 bp, Pseudomonas aeruginosa
atggacggcctgcgcctgcgcttccgccgcgcctaccccggcttcgaactggacatcgacctggctcttcccggtcgtggcgtgaccgctctgttcggccattcaggctccggcaagagcacttgcctgcgctgtatcgccggcctggaaaaggccgccgagggcgaggtgacgatcaacggcgagacctggcaggacagccgccgcaacctcttcgtcgcgccccaccggcgtgccctcggctacgtgttccaggatgccaacctgttccgccacctgacggtgcggcgcaacctggccttcggtctcaagcgcatcgccgccgccgaacgccgcgtcgagctggaacaggcctgcgccctgctgggcatcgagcacctgctggaacgcatgccggaacgcctctccggcggcgagcagcaacgcgtcggcatcgcccgggccctcctcaccagcccgcgcctgctgctgatggacgagcctctggcatccctcgacctgaagcgcaagggcgagatcctgccctatctcgagcgcctgcacgaggaactggacatcccggtgctctatgtcagccactcgccagacgaagtggcgcgcctggccgatcacctggtgctgctggagaacggcaaggtccgcgccagcgggccgatcggcgaaaccctggcgcgagtcgacctgccgctggcgctggacgacgacgccggggtggtgatcgagggcacggtcagcgaccacgacccggcctacggcctgctgaccctggtcctgcccggcagcgcgctgcaaatgcgcgtcgcccacgccccgctggcccccggcaagcgcctgcgcttcaaggtacaggcgcgcgacgtcagcctgaacctgcgcgacgacgcccagagcagcatcctcaaccgcctgccggtacgggtcctggaattggtcgataccgacaccgcggcccacgtcctggtgcgcctggatgccggcggcaatccgctgctggcgcggatcacccgttactcgcgggaccagttgcaactacgacccggccagctgttgtgggcgcagatcaagtcggtggcggtgctcgcctga

SEQ ID NO: 338571 - DNA, 687 bp, Pseudomonas aeruginosa
atggcgttgccactcgacagtacggacctggcggccatctggctgaccatcgagctggcttcgctcaccaccctcctcctgctgctgatcggcacgcccatcgcctggtggctggcgcgcacccgctcctggctgaaggggccgatcggcgcggtggtggccctgccgctggtgctgccgccgacggtgatcggcttctacctgctggtcagcatgggtcccaacggtttcatcggccagctcacccagagcctcggtctcggcaccctgcccttcaccttcgccggtctggtggtcggctcggtgttctactcgctgcccttcgtcgtgcaaccgttgcagaacgccttcgaggcgatcggcgagaaaccgctggaggctgccgcgaccctgcgcgcgagccccgtcgaccgtttcttcagcgtggtcctgccgctggcccggccgggtttcgtcaccgccgcgatcctcggcttcgcccataccgtcggcgagttcggcgtggtgctgatgatcggcggcaacatcccggagaaaacccgcgtggtctcggtgcagatattcgatcacgtcgaagccatggaatacgcccaggcccactggctggccggcggcatggtggcgttctccttcgtcgtcctcctcgccctctattcgggccggcgccgccggccgggctgggcctga

SEQ ID NO: 338572 - DNA, 756 bp, Pseudomonas aeruginosa
atgaccacccgcctgccccagctattgctcgccctcctcgccagcgccgtatccctggccgccagcgccgacgaggtgcaggtcgccgtcgcggccaacttcaccgcgccgatccaggccatcgccaaggaattcgagaaagacaccgggcacaggctggttgccgcctacggcgccaccggccagttctatacgcagatcaagaacggcgctccgttccaggttttcctctccgccgacgacagcactccggcgaaactggagcaggaaggcgagatcgtgcccggctcgcgcttcacctatgccatcggcaccctggcactctggtcgcccaaggccggctacgtcgacgccaagggtgaggtgctgaagagtggcagcttcaggcacctgtccatcgccaacccgaagaccgcgccctacggcctcgccgccacccaggcgatggacaagctcggcctcgccgccacgctcgggccgaagctggtggaaggccagaacatcagccaagcctaccagttcgtttccagcggcaacgccgaactgggcttcgtcgccctgtcgcagatctacaaggatggtaaagtcgcaaccggctcggcctggatcgttcccgccgagctgcacgacccgatccgccaggacgcggtcatcctcaacaagggcaaggacaacgccgccgccaaggccctggtcgactacctgaagggcgccaaggccgccgcgctgatcaagtcctacggctacgaactctaa

SEQ ID NO: 338573 - DNA, 651 bp, Pseudomonas aeruginosa
atgaagaagatccgccaacgcaacctgcaactgatcctcgacgccgcctgcgaagtcttcgccgactgcggcttcagcgccgcccggctcagcgacgtcgccgagcgcgccggcgtggcgaaggccaacgtgctctattactaccgctccaaggcgcaactctacgaggcggtgctggacagcatcgtcgagcccctgctggaagcctcccggccattcgccggcgaccagccgcccgccgaggcgctacgcgcctacgtcgacaacaagatgcgcatcggcgccgagcggccgcacgcggccagagtcttctcctgcgagatcatgcgcggcgcgccgcgcatgccggcgccgctgctggaacgcctcgacgcccaggcggaacgcaacgccgagcgcatccgccagtggatcgacgaaggcctgctggcgccgctggatccgtaccacctgctgctcaacctgtgggcgatgaccgagtcctatgcccttggcggctggcaactggcgcgcctcaccggccaggccgggctggacgcaagcgactaccggcaggcggcggaaaacatcgtccgcctggtctgcgccggctgcctggcactccccggcgaggccgcgccgcgtcggcgtttccgcgcgctggccggctga

SEQ ID NO: 338574 - DNA, 1650 bp, Pseudomonas aeruginosa
gtgaattccccagcgcttcccgaacccttctactacctgcacaacttccgcgcggtgctcgcctggatcggcgaacgctatgccgatctgctcgacgatcaggaacgtgccttcatcgccgcgttcgccgagctgcccgaggccagccaggccctgctggtgcgcatggtgatgcgcaagggcacgctgttccgcgaaggcaagctggcctatgccgagatcggcgacacgcgcgccgccgtgcaaccgctgttggcattgggctgggtggacgcgcagccgaccctggaactggcgcaactgttcggcttgctgaagaaggacgaattgtcgcagctgttcagggaccatctcgggcgcgcgaacctgcgcaaggatgcgttgctggaacggctccagccgttgttccccgaggcgcggcggctcgccgagtggcaggccgacttcgccgaaccggtctacgagttgcgctgcatggcgctctgcgaccgcttgcggttgatgtatttcggcaacctgtggcaggactggtcggagttcgtccttgccgacctgggtatctatcgttacgaaagcgtcgagttttccgccgactctcgcggctttcgcctgcgcgccgacgtcgacgcctatctccacctgttcgactgccgccagcgcttcgacctcggcgagccgctggaggaactgctcgccggcctgccgggcgaaccctacgccaatccctggctggaagggcggcgggtcaagctgctgttccagttcgcccagcactgcgaaaagcagcgggatttcgacctggcccagcggctctatcgccaatccagccaccccggcgcgcgcctgcgggcgattcgcagcctggaacgcggcgagcgcttcgccgaagcccatgcattggcgcgggaggccagctgtgcgccggaaagcgacgccgaacgccagggcctggcccgattgctgccgcgcctgcaaggcaagctcggcctgccgcgacaggcgcgggcggcggctcctgaaatcgaccgcctggacctgtgcctggcgtacccgagcgaaccctgtagcgtcgagtgggcggtccgcgagcacctggaagagcccgattgcgcggtgcactacgtcgagaacggcctgatcaattcgctgttcggactgctctgctgggaggcgatcttcgccgccattcccggggcgttcttccatcccttccacagcgcgccggcggacctgcacagcgccgacttccgccagcgccgcgccgccctgttcgaggcctgcctgggacggctggaggacggcagctaccgcgacgcgatccgctgtcgctaccgcgacaagttcggcctgcagtcgcccttcgtctactgggaactgcttggcgaggaactgctcgaacaggcgctcgattgcctgccggcggcccacctgcgcgcctggttcgaacgcctgctggaggatatcccgggcaaccgcgccggcctgccggacctgatccagttctggccggcgcagcggcgctaccggatggtcgaggtcaagggaccgggcgaccgcctgcaggacaaccagttgcgctggctgcaattctgctgcgagcgggagatgccggtggcggtctgctacgtgcgctggcatgtcgatgactga

SEQ ID NO: 338575 - DNA, 1782 bp, Pseudomonas aeruginosa; identical to SEQ ID NO: 332345

SEQ ID NO: 338576 - DNA, 1107 bp, Pseudomonas aeruginosa
atgcagttgcaagggcggttcgaagaagacgcctggacccatacccgcaacctcgatccgcaccggccgctatggcgggtgcagaccgcggacgagcagggccggctgctctacctgtcctcgcagaccggcgaggtggtacgcgacgccagccgccgggagcgtgcctggaactggctcggcgcctggttgcactggctctatccgctgcgcggcggcgggttcgacgggcagtgggcgaacctggtgatcggcctgtcgctgctggcgaccctggtgaccgtcctcggcatcctcgtcggcctgctccgctggcgcttccgcaagccctaccgcagcggctcgcgctcgccctatgcgggcggtttccagcgctggcaccacctcgccggcctgctcttcggcgcgctggtgctgagctggatcttcagcgggctgatgtcgatgaatccgtggaacctgttcggccgcggcacgccgctcgacctcgcggcctaccagggcggtagctgggaccgggcgctgcccgccggactggaggcggacgctgtcctgcggcgcttgcgtgccgccgggttgcgggtgcgcgagctggagtggcgggcgctcgacggcgagccctatgcgctcgggcgcagcgccagcggcaacagcctgctgctgacggcggatggcgaaatcctccgcgagctacccgcggatcgcctgctggcggcggctcgcgcgctgctgccgggcgtgccgatgcaggccgaacggttggaacgctacgacttctattactacccgcgcgaagaacacagcatgatgggctacctggagcggcgcctgccggtctggcgcctgcgtttcgacgatccccggcatacctgggtgcacctggatccctacagcggcgcggtggttggcgtgctcgacgacggtcggcgcggcagccgctggctgttttccctgttgcatagctgggactggctgccgctgctgacccggcgtccgctgtgggacctgtggatgctcggtttcagcctcggcggcctggtggtctgcgccagcggctgctggatcggctggcgtcgcctgcgcggccgccgtccgaagcgtcgctga

SEQ ID NO: 338577 - DNA, 1089 bp, Pseudomonas aeruginosa
atgattgttgttcaaggtagagcttatccggctgcaatacgtaatgccattgttgatctgattcctgctaacttaaatgaaataatagttgcttcggcttacgtcactcgtggtggctgcgacttgctgttggatgctgtttataatgctgtggggcaagcagtttttgaagaaataccaaaaacgctattgacatcaattgattatggtctcacagagcctgcagctctgcgtttgtggagtgagttgccaaattccggaatttatgtttctggtcttgatatgctgcagcgcagaacgctgatgccccagcgtgcctttcatcccaaaatatactcgttcggatgtgatgactctgaaacatacaacaccctcgttggttctgcgaatcttactggtcgagggttaagtgtgaactcagaggttgcttatgcgcaatggggcgttccacgcatcgaagttgattcagccttcagtgctattttaagcgagacgaccgcattgagtttggggttattggcagactatgaaagattacgtagggtggtgccgccgccacctgaaatagctctggaggtcgagcctctggctcctccgagagttgctggtggtggtagtttgccgctctttcggctggctatcgagagtgggcgtgttgatccaagcgtattttctgcaatgtgggtgcagggtgaagcacttcagggtggttctcgcaatcaattagagttgccgcgaggtgctcatcgattttttggtttcaatttcgatcaatatgaatttgcacacaatgcaatcattggaatgcctttgctttggagtggccaaagggtctggagggacaggccgttaacttggcatggtaacaatcgtatggaaagaattaacttgcccacgcgtaatcatggggggtttgattacaccaatactgttgtcatgtttcggcgcgtcctggatggatctttcgaattaattgtaacgccttgggactcggagttggcgtcttcctgggtgtcggcatcagaatcccggggtacgctctttcggttgggaatgatagcaactaaccgagttgtggggctgatatag

SEQ ID NO: 338578 - DNA, 1857 bp, Pseudomonas aeruginosa
atgcccccccagcagaaaatggcccatctaaccccgatggcgagtctctcgaagagtgcagccaagtcgtatcaggatattgaggcgctttactcaaagccactcccttcgactcgctctggccccttatacaatgctttctcctatccgacgaagatctcgccggaggcgatagcagttttcattgccacccacacgcggcctggagccagggtcctcgacgtctttgggggtagtgggacgaccggacttgccaccctgctttgcgacaggccaacggaggcgatgatccgaatggccgacgagctgggagtagagcccgaatggggccccagggaggcagaaatctacgaactgagcacactcggctctttcgtcgcgaagaccctctgtgctccgcctgaccccgttacgtttgcgaaggccgtgaagcagctcctcgctctggcggaagagcggtttgggtggatttactctgccaaagggccggacggatgtgctggaaaaatccgctacacgatatggtcagacgtactctcatgccaccactgcggcgcggaaacgtcctactgggacgccgccgtacgtagggcgcctctgtccttgtcggggcggttcgaatgcctggactgcggaaaagaagcgcaggtagatttgtgttcccgtgtgccggaaacttacagagaccccctgcttggcaggagcctcgaacggaagaagcgtgtccccgtacggatatatggcacctctggcgccgggaactggagtcgggatgccacggttgaggacttcgagatccactcccgcgttgccagcgaaaaactcccgtcctgcgctccgattgcggagatcgagtggggcgacctgtaccggtccgggtaccacaagggcatttcgcatctgcaccatttctacacgcctaggaatttctttgccgtttccgcgctttgggagcttgttacggagtttcctgaggacgtgcgcgacgccctcaggttgctcattcttagctacaactcgactcattcgaccctgatgacccgggtagtcatcaaacagggaatgtctgatttcgtgcttacaggcgcgcagagcggcgtgctttacgtcagcgggctccccgtggaaaagaatgttttcgacggaatcaagcgtaaggcggtgtccctaaggaaggcgtttgaaaccgtagcgggcagtcgcagttccgttagggtgaccaacgcgagcagcgagtcccttgacctcggcgacgaaagtatcgactacgcgttcacggacccacctttcggggattacatcccatatgcagagatcaaccagttgaacgaattctggttggggcgcaatacggatcgggcaagcgagataatcgtcagctctgcccaagggaaaagcatcagcgattatggacggatgatggctcgcgtgttcggtgaggtagcgcgagtcctcaagccttgtgggaaggctaccgtcgtattccattcggccaaggcatcggtatggcaggcgctcgctgaggcttacctgtctgcgggactttcggtgcgcgctacgagcgtcctcgacaagattcaggcgagtttcaagcaggttgtttcgactgtttcggtcaaaggcgacccgctgctgctgcttgctaaaggggatcctaacgatcgttccgtctcgtttttgacggccgaagaagtggtggaagagatcctccgtagcgcgagagccgccgaatcgtcagagcgtaatccgcagcggctctactcccgtttcgtatctcgatgccttgaactcggcctttccgtccgcattggggcaaaggaattctacgggcgggccgaaatcgcacttcaggattag

SEQ ID NO: 338579 - DNA, 2064 bp, Pseudomonas aeruginosa
atgaacgcatcgaggaatctagcaatccgcgaaggtttcgcgaacgaggacgagaggcgcaaacgcctcgggcagtattttaccggtggccaattagccaggcttctggccgaacttgcggctgccggcgacgcccagtccgtcatcgatccgatggcgggcagcggggacatgcttgtcgcctgcgggcgaaatagcccgcagaagcgggttttcggagcggtggagatcgatccgatcgcagccgctacctgttccgagcgcgcgccttgggcggtttctgtcctcggaagcgccttcgacgcggcgacgctctccatgcttccggccagacgttgggacctggtaataacaaaccctccgtacgtgcgataccaaagcctcgcgaaatccgctggatccaagttctcgctcccttccggagtcgaagtgaggaacggactcctgagcgtgcttggggagtgtgactcactggattcggaagaccgtgctctctttcgcgaactcgtttccggctattccggcctggcagaccttgccgttccgtcatggatactatgcgccgcgttgtgtgccccgggcggaacgctcgcgcttgtactgccggagtcctggctgagccgagattacgcctccgtggtccagtacctgctgctgcgctggttccgaatcaagtatgtcgtcgaagacgcgcacgcggtctggttcgacgacgcccaggtaaagacgaccctcttggtcgcggagaggacggaccggaaggaaagtgcattcggtccgttcggaaacgagtcattcttgcgtctgcgtgtatacggatctgctaaaggagagaacagcattgtaggccggatgttttccgactcgtccgagaaccccgaccatctcttcgcgcgtatggccgctgaactcattgctaccggaaaaggcatgcgcaccgagatgctggaagccgacttcgtcccctattcggtcattgcggacaaccttaaaagtgcctgcggtaggcagaaatggctcccgaaggtcgaaacgagcccccgtccgcggatagggcctgtcgcgtactccgttcctccgccccttgcggcttggctgtcgttttcagggagcgtccctcgtcttactactcttgagagagtcggtatttcagtcggacagggcctccgtaccggagcgaacgagtttttctacgtcgacgccgtgtccgtatcggagcgggaaacgggaatagaggcaagcagaacgcttgaccggatggcggcgacggtcccgagcggactggcgcttccggcgttgaggaaacaatcagaactccccgatgggctggtcgtaaccgcggaggacctcgctggccgggtcctcgtaatcggtacctgtgccctcccggaggatgctgtcaggggcgggagcggtggcagcgtctacgctgccatgccggaaggcctcgctcgcattgtcagaaaagcggctgttgccgatttcaagggcaagcggatctacgagctttcggctgtggcgaccaatgtccggagcggtaaccaggcgaaggggggtatgccgaggttttggtacatgctgcctgatctcgcgcctcggcatcgccccgacctcattgtgcccagagtaaacagtgaaacgcctaaggcctacctcaatgccgggcggaaagctgtcatcgacgcgaatttctcgacactctggacggagggcggtggtccggctgatccctgggctttgcttgcgttactgaactcgtcctggtgcgccgcggccctggaactctcagcgtcggttatggggggaggtgctttgaaagttgaagccacgcatttgcgacggcttcctgtgcccgacttgcctcccgaagggtggaggcgtatcgcggcgcttggtcgggagatggcgcagggggcacaaggcgcgaaagaagccgccgacagtgcggtcgcggccgccgtcttgggtagaatgccgaaagaatacgaactgctcgccctgtccgaacttgcggaaaacgccaggatccggagatcgcgacaccgaaaatacgatatgaaataa

SEQ ID NO: 338580 - DNA, 3036 bp, Pseudomonas aeruginosa
gtggactcgctcgtcgggctcactgccattgagtacgagaaagacatttctcaatcggcgattttccgccatggcctcaatcaagtccgtgattactgtgccggtcttctcaacaaagggcacgctccggaccttatcgtcggcgtattgtcggacacggtccgttggcgggcttaccggatatcctcggttctgccccttgatcccaccgcaagcgggatcttcggcagggtgcatgtcgaactggaagaaatcgactctttagacgcgtcggccgccgacgagagtgccgctgcgcgcttgggagaattcctcgtacggcatctgggacgcgaaggcgccaggcccctcggcgctgaaaccttgtctcgggacttgggattcgaaagccagttctgcgaacggtatgtcgcggaaatttggaacttggtcggatccgctttcgcttcgaatccgaagtattccggtctcattaagaagctctggctcgatttcgtcgcctatctgggtgacagcgccaccgccggtgagttcgacaaagacgtttacgtccgcgaactatacctgctcacgctagcgaaactgctctgcgcgaacgtgatatccaaaagcgctctcacgagcgatgaatatgaaatccgcgcgatcctgaacggcgaccacttcaagatgaaggggctcgcgaacctcgtggaatacgactacttcggttggctgagcgaagacccgcacgtatcagggcttataccggtagcgaaggcgatccaagacgacctccgggcttacgacttcgtctcgcctcccgctgaagatctgttcggcgcgaccatggcccaacttgcgaagcgttcccaacgacttctcctggggcaggaatggaccccgtcctggctcgcggccgaagtagtgaagcgcactatggaggcccttcccgaaggggaggccccgcgcctggtcgacatgtgttgcggctccggagcgatggtcgtcgaggcggtcaagcaatccaagctccgcctggacgccgcaggagccgccgtggatgccgcatatgtcacgtgcctcgcgcacgccatcaccggtttcgatatcgacccgttggcggtcatgctgtcgaaagtcggctgggttgtctccgcccgtgacaggctggagcctttcggaacgttccaagtgtccatcccgatctaccacgcggactcgcttttcgccgcgacgccgctttcgaagagtgtggacgaggacaccgggtccgctagttatgacctcgtactggacgacctccacgtcgcccttccgtcctacctcgtttcgcccgagcacagggctttgttcgacgcgttgcttagcggctgttattccgtagcgatggaaagcgcgacgggggctttccctgcattctcagcgtcggacctgtccgacctgctgaaagcgtcggaagccaatgcgggcacagcgctgaacacggaacagcgggaatcggcactggcgttctgcggccagctcgtcggagcgctggacactctccagagggacggcaggaacggcatctggtccttcgtcctccggaacagctaccgaccagccctggtatcaggccttttcaatgggctcgtatcgaatccgccatggcttgcactgagcaagatcgccgacaacccatatagggaagccctccggaagcgggcggaaaactacgagatcaaaccagcgggaccgtcgcacctccacatcgagttggcaaccatcttccttctccacgcgatagaacgctacctgcttccgggaagcacggtgggctgtatccttccggaaaccttgttgagtggacaccaccacaacccgtttcggaccggagccttcctctcgggcaggaggcgagtccctctagcggtcgacgagctttggcgtatcgagaaaggcacgttcaagaacgaagccatcgtgttgttcggcacgaaggaatccagaggacacttagtcccggctgcgactccgggccacttggtttcgaaaacgggcaagcaggccatcagttttcgccaaatcgctcaggggacccgcgtagcttggacagatcgagggtcggtcgggaccggaggggtcgggttcttttcccctgcggagttccgtcaaggcgcggacatcatgccgcggaccctaattttccacgaagtatccactgcgatggctggcaagtggtctctcggtccgatcgaccgtggaacaagccgactccgctacctagttgctggggcgaaaaagcatgaggacttctcacttcccgcctgtttggttccggaccagttcgtttttgacgttctcatgtcgaaccacctgacgccgttcgatatcgcgactcccgcaaagggctttctgcccatcgagaaggaccacagtggaaagtggtctccggtcgcggcgacgaaactcgcgacgcaaaccgctgccaagatcgctttcgatcgaatattttcagtggccgaaacgaacgccaacggcttcttcgagatgctcgacagcaagcggaggaaattgaccgcccaggacgtccccacaaccgggtggcttattttcatgggcgccggcggcgactacgtctgcgctgcctacgcggacgcgtccttttacggcgcagagaagcttgtcgtcgatcagacgctttattggacctcggtggagtccgaagatgaagcgctttacctggtcggattgctcaacagtgacgctgttaatgaaatcatcaaggagttccagcctcgcggacagttcggcgcgcgccacgtccatacacttccaattggcgtcacgcccgaatacaacccttccgacgctgcccacgcggacgttgttgccaaaaccagaatcctgctggatcaatgggaagttgccaaagtagcggatgcggaaattacaggccttttggatcccaataagtctcttgctcagcggcgtaggaggctccggctcaaggttcaggcgcttcctggatatctagagtacgctctcgcttgtcgcaatttatacggcgtctaa

SEQ ID NO: 338581 - DNA, 1161 bp, Pseudomonas aeruginosa
atgaatgactctctctggatctggcaacagcccaactggccgcacttcagctggcaagccgatgcgctcgccccgctgctgcgcgcttgcagccaggctcagggccgcttactcggaatgttgggcgccgtaggtagtgacaccgaagtgcagagcagcctggatgccatgctgcagaacatcgtcacctcatcagctatcgagggtgagcagttgaatgtcggctcggtgcgttcatcactggcgcggcgcctggggctgaacgaagaaggccgcaccacctcacgctacgaaggcctggcggaactactactcgatgccacccgcggctatcagcagccactcgatctgcaacggctgttcacctggcatggctggctgttccccaccgatgactacctgctggcccgtccgctacgcatcggcatgctgcgcggcgaagatcccatgcaggtcgtctccggtcgcctcgaccgccctaccgtgcatttcgaggccccaccccgcaccgggctagaagcgcagctggacgacttcctctcctggttcgagaacagccgcagcgataccagtctcgatccctttctgcgcgccggcatcgcccatttctggttcgttaccctgcaccccttcgatgacggcaacggtcgccttacccgcaccatcaccgacctggcactggctcagggcgaacagcaggccatccgcttctacgccatgtcggcgagcatcctcgacgaccgcgccggctattaccgcatcctggaagccagccagaagggcacgctggatatcaccgcctggctgcagtggttcctcgcgacactgctcaagagcctggatcaggcccttgcgcgtatcgaccgagtgctggtcaaggcccgtttctgggaggctcaccgcagccatgccttatctgccgagcaaattaaagtgcttaaccgcctgctcgatggcggcgaacgcggcttcgagaacggcatcagtgccgctcaataccaagccgtggccaaggtttctaaagctaccgccacgcgccatctgagcgaccttgttgagaagggttgccttgcccggctaccgggcggcgggcgcagtactcgataccgcctcaacatcaccgccaactcgccaggtttactctgctctactacgaattga

SEQ ID NO: 338582 - DNA, 1089 bp, Pseudomonas aeruginosa
atgtcggcagtcagatctttcctgggagcggtttggtcgtatggcgtttctctgccgctgtacgtgatgtggagcgttgtcctcagttctgtaagggccgctttcgacttcttctatccgcgcggctacaggtcatgcaatgaactggcagatgtgttcgtcgaagagtgcaccaatcgccctgccgggcagtccgtccgcctgccttgggtggatagctcggcaacgcattcactggtgatgaacaacactggccgcctgctttcctatgtggccatcgccagcggctggttcggtgtggcagtgaagggctccggcaccaagtaccagcctaagcgtacctatcgctactactaccgccgcagcctgaccggcaactggcttgccgaaatctggtcggtaccgaagtccggcactatcgcagcaatcttggcgcttccgttcgttgatatggcgcgtgctgtgatgaaaagccaagctcacggccatgaaggtctgttgctgctggtttctggcttgctgttggtgctgtgcttcctgccgcgcgcgatcctgggccggggtacccactttgcggcaattgcgccgatcaacggtggtgctttcggtggctatggctgtgctcaggtcatcaactggtgggcgtcgttgggcggcctttcctatctctgggtggcaatgggcgctgagtggaatgtctcgccagccgccagctatgtagcaggcttcctctccgggcaagcacagatgtttgcgcatgaggttgcgaccgacggcgtgctgataacagtggttatgacccctctttgggtggtgctcggctgcctgtttggtatggcgtggacggttctgccggcagcggctttctggtatgtctccctgcgtttcatcgctgcgcgcaacgccaaggctcagcttgagggcctgccgttcaactcgattcaggtcgctatgtatcggggcagtgattttgagagagtcgccgagctagtcgccccgcaggtaacccttggctacttggtctacatcagtctgacggttggcatcatcctctaccccatccagacatgggtgcggtcacttttctga

SEQ ID NO: 338583 - DNA, 252 bp, Pseudomonas aeruginosa
atgaataagaacctgggtgcggcagcggaaacatcggtgctcttgtctgatgggctgactgacgcggagattgaagtgcgcctggccatagccggctacctgatcccccgactcgctgggactccgaccgcgcgcgaggccttcaatgcgttggtcggcaagtttcaagatcgctacccgcaccataagctgctcactcatctgctgatttcactcgaatacctggagcacgcccctgacacccagccgtga

SEQ ID NO: 338584 - DNA, 216 bp, Pseudomonas aeruginosa
atgacagttggcaagaaaacgatgaccctcaacctgacaagccaagaaatgcaggtgctggaggatctgtgtgccaaaaaggacctaacaaaaaccgctctgattcgccaagcgctgcgcctgtaccaggctgtggaggctagagctgagttgggggataagctcttcttcgaggatgagaagaccaagcagaaggctgaggtgatgttgctatga

SEQ ID NO: 338585 - DNA, 621 bp, Pseudomonas aeruginosa
atgacgatcaatatttatcccgccactctgcttgaggccagtactggtcgcgtggtagacgcagagatttgggatgccataactgatcagcacattgctgattggaactgtcagtggaagcctgcaatgcaggctgcggtcaatgcaaggcgagctttgggggtggggcaagcgctgcttccgcagagctcccattggttgtgggatgaaaaagctagagcaaccaaggggttgctggcctatccgagcttcgctgtcgtctctgaggggggcactcaggggctgatgatcactgagctgctaggtagttgtcgctgcccaactcaatttgggaagccacttgtgtatgtgcattttattgaggtcgctccctggaaccaggttggtttgatggtcggtgctccgaggttgagtggcgtaggttcggtacttctgagcaccgcaattcagttgagtcgatacgagggttttgaggggcgaattgggctccactctctgcctcagtccaatagttggtatggaaataagtgcggcatgatcgattttggtcctgatgtgtccaaacaaggcatgcactatttcgaaatgactccagagcaggcgaaagccttcactgtgtga

SEQ ID NO: 338586 - DNA, 927 bp, Pseudomonas aeruginosa
ttgcagaatctaatattaacacctaaaactgtggctgatattgatcagcgagtggagcgcgtacttcgtggcttgggtaatcctgagccgcctctaaggctggaagatgttagagagttgctaaggcttgatcgacacttctatactgcggacaatcctggggttttgtctgaagccattagtaagattcgagttgcaacaattcaggtcttcaagcgtcctacaattctggctgaggctataaagaagctgcagcttaaagccttgtatctaccggatcgaaagcgaattttattagatggcgacttgccggaaaagaagcatcgctggaacgaagctcatgaggttggtcacagcattttgccttggcatgatggtctgatgcatggtgatagtgaccatacgctctcgatgagttgccatgagcaaattgaggctgaggcaaattttgcagccgcgagactgttatttctccaagaaagattttctaatgaggcgctttcgcttccgccgagcttctcaactgtgaagatgcttcatggggtatttggcaatacaatgactactacgctttatagatttgtagagtcgattggcgaagatattcctgttgttggagttatttctgggcatccacatgttcgccatcgctcggctgattttgatccggcgaacccatgcaggcatgttgtgcattcgaaggcatttcgtgctcgtttttgtggtatcacgccggttgatctattttcggctattgctagttactgtgggtctatgcgaggtgggccacttggcgattctgaactaatcctaacagatgataatggtgaagatcagcgatttgcgttcgagactttctataatcggcatgacgctttaactcttggagtgtatcttgggcctgaacgaactatggttgcattttga

SEQ ID NO: 338587 - DNA, 975 bp, Pseudomonas aeruginosa
atggacgacatttctcccagcgaactgaagacgatccttcactccaagcgtgccaacctgtactacctgcaacactgccgggtactggtcaacggcgggcgggtcgagtacgtcaccgacgaaggccggcattcgcactactggaacatccccatcgccaacaccaccagcctgttgctgggcaccggtacctccattacccaggcagccatgcgcgaactggccagggccggggtattggtaggcttctgcggcggcggcggaacgccgctgttcagcgccaacgaagtggacgtcgaggtgtcctggctgacgccgcagagcgaataccgccccaccgaatacctgcagcgctgggtcggcttctggttcgatgaggaaaaacgcctggtggccgcccggcacttccagcgagccaggctggagcggattcgccacagttggctggaagaccgcgtattgcgcgacgccggcttcgccgtcgatgccaccgcgctggcagttgccgtggaagattccgcccgagcgttggagcaggctcccaatcatgagcatctactgaccgaagaagcgcgcctgagcaagcgcctgttcaagctcgcagcccaggccacccgctacggcgagttcgtccgcgccaagcgcggcagcggcggcgacccggccaaccgcttcctcgaccatggcaactacctggcctacggcctcgcggcgaccgccacctgggtgctgggcattccccatggactggcggtactacacggcaagacccggcgcggaggcctggtgttcgatgtggcggacctgatcaaggactcgctgatcctgccgcaggcatttctttccgccatgcgcggcgacgaggaacaggacttccgccaggcctgcctggacaacctgagccgcgcacaggccctggacttcatgatcgacacgctgaaagacgtggcgcagcggagcacggtgtccgcatga

SEQ ID NO: 338588 - DNA, 1326 bp, Pseudomonas aeruginosa
atgaggctgtcgcgctttcccatctcgacactgctggactcggcctcgggacatctcgaggcccatttgtataagaagcggcttgctgccgaaagcggcgaaccgctggctcaacaatattccggcatcattttcagcggcaatccgcatgaaaccgttccacggcgcctcctcctagataagcgtcttactccgctggagcggaactgctggcaagttttccgcttgctcatcaacgacgacggactgaccgcgttcccgacatacgagcaactgcgcccctatctcggcatgcagccaggcaagatcgcctcgcgcgaaaccatcgccaaggcactcatggtccttcgtctgacccgctggctcagcctcggccgacgcctgcgcaacgacctcaacggacaggtccagggcaacgtttacattcttcacgacgagcctgtctctccagccgaagccttggagctggacaccgactacatgccgttgctgagccaatccaccggccacggcaaccgagccatacgcgaaatcgggcagatcatctggcgggagttcagggatgatccggacgtgggtcgccgcctccctacccatctggagaagctcgagggacgcttgaaccaccagcaatgggctatcgatagtcagctcgaagcggatccagcggcagagttcggcatccgaactctgtcggatttacctcattccacccctagttcggatgccgaactcagtgaaatcagcggcaagcaatgcgctctaccgctgagttcggatgccgaacccagacagaatccgccgagtacgcccttggttcggatgccgaactcatatagtacgtatacatacaaacaagattctgtatgtaaaaagccagtacaaccgcgagcacgcgaggaagcccatccaaactggcaggatctcctgcacgcactggaggccgagcaacggatccaggcggtaagcgcgctccgacgggtgtccgaagatcttcggctacccatcatcgagcagtggcagcaccgttgtgccggcggaacagtcagcaatccgttcggctacctcatgacgctcatccagcgtgcagtccagggcaagttcaacgcctcttgggctccggaagaaccggctgagcgaaccatacccgcaacggaacgccccattcgtgctccggcaccatcaagccccatagcgcctacacagcctcaggtccagcccaggggggatacccggacagggagcgaggtcctcagccggctcaaggacctcattcgtcccaggcacggatcgagcgtgccatccgagcggggtgatgagccatga

SEQ ID NO: 338589 - DNA, 249 bp, Pseudomonas aeruginosa; identical to SEQ ID NO: 330535

SEQ ID NO: 338590 - DNA, 573 bp, Pseudomonas aeruginosa
atgcaccgcctgcagggtggtgtgctggtgcagcgggtcgagcgccgaggtcggttcgtcgagcagcagcacctgccccggctcgcccggccacagctgcgccagcacccgcgccaggtgcacgcgctggcgttcgccgccggacagcgccaggtagctgcgcccggccagatggctggcgtcggccgccgccaaggcctcggcgacgatctgcacatcgcgctcgcggccgctggaatggggcagccgaccgaagccgaccaccgcctccaccggaaaggcgaagcccagcgacgaactctgcggcagcaccgccaggcgctgcgcgcgagcgacgcccggccagtcgtcgaggccgcgctcgtcgagcagcaccagcccttcggccggctccagttcgccacagagagcgccaagcaaggtgctcttgccagcgccgttggggccgagtacgccgagcatctcgccaggccgcagctccagttcgaggccttccagtacagtctttccgccacggcggatggacaggttctccacgcgcagcatcaggcccgcccccgcaatagcagataa

SEQ ID NO: 338591 - DNA, 1563 bp, Pseudomonas aeruginosa
gtgagccagaccctgatcgccgccctgcagaacccggccctctacccccacccggtggagcgcttcgaggtcatcgagacgcatatctcctgggtcctgttgaccggtccctacgcctacaagatcaagaagccgatggatttcggctttctcgatttcaccagcctggacaagcgccgtttctattgcaacgaagagctgcgcctgaaccagcgcctcaccgacgatctctacctggaggtcctgccgatcaccggcagcgaagaagcgccgcggatcggcggcgacggcgaggcaatcgaatacctgctgaagatgcgccagttcccgcaggacaacctgctggcggcaatccagggccgcggcgaactgtccaaccagcatatcgacgaactggccgagcagatcgcgcacttccaccagaacactccgaaggtgccgctggagcacccgctgggcaccgccgagtcctgcatggcgccggtgcggcagaatttcgagcaggttcgcccgctgctcaaggacaaggccgacctgcaacagctggatgccctcgaagcctgggcggaaagcagcttcgaacgcctgctgccggtgctccaggagcgcaaggcgaagggcttcatccgcgaatgccacggcgacatccacctgggcaacgccgcgctgatcgacggcagggtagtgctgttcgactgcatcgaattcaacgaaccgttccgcttcaccgatgtctgcgccgacttcgccttcctcgcgatggacctggaagatcgcggcctgaagtgccacgctcgacgcttcgtcagcctctatctggaacacaccggcgactaccaggccctggaactgctgaacttctacaaggcctaccgcgccatggtccgcgccaaggtcgcgctgttcagcctcggctaccagaccgatgccgtgcagcgcgcggcgaccctgcgccagtaccgcaactacgccaacctggcggaaagctacagcgccattccctcgcgcttcctggcggtcacccatggtgtctccgcggtcggcaagagccaggtggccatgcgtctggtggaggctctgggcgccgtgcgcctgcgctcggatgtcgaacgcaagcgtctgttcggcgagcagccggaacacgacaggggccagttcgccgccggcatctatagcagccaggccagcgaagcgacctatgcgcaccttcaccagttggccgcgaagatcctccaggccggctatccggtggtgatcgatgccgcctacctgaagcagaatcagcgccaggccgcttgccacatcgcggaagaaaccggcgtgccgttcctgatcctcgactgccaggcgcccgaagcggtgatcgccggctggcttgcgcaacgccaggcggaaggcaaggatccgtccgacgcgactctcgacgtgatccgcacccagcaggctacccgcgagccgctgacagcggcggagacagtccagagcaagcgcgtagacacccacgacgcggccagcctcgacgggctggtcgacggcattcgccagcgcctgcccggtctctga

SEQ ID NO: 338592 - DNA, 165 bp, Pseudomonas aeruginosa
atggtaggggacgccgctaggaagagcctcaagatgcaggacaaacgcgacagggaagcgaatagaggcgtgcgaaagaccatgaaagagtgcatcaagccaggaaacaccattgatgaggacgtaaaagagtgcatagaaggactaaaagataaaacttggtga

SEQ ID NO: 338593 - DNA, 2199 bp, Pseudomonas aeruginosa
atgattaatggtataactattaaggatgttgcgagctatgaccgagccggtatctcttttatagagatggctaaagttaattttatttacggggcgaatgggagtggtaaaaccactatttctaactttttagatggtgccagtttggatcgttataaaagttgctccataagctgggatgccggtggtgcgttagatgttctggtttataataagggttttagggaaagaaactttggtaggtcaacaattgagggggtatttaccctgggtgaggccgctattgatattcaagagaaagtggaggagaagcaaaagcttcttcaagcgattgttgatgatggtaaaggtaaaaaggcaacattagaaaaattaaagggggacctcgttcaagctgaggaggcttttagagagaaagtatgggctgcatactataaggtctatgaggatgagtttaagcctgcttttagaggtaatgcacagaaagaatcttttaagcagcgattgattatggagtgttctagtagtgctccgttggacgtaagcctggatcagatgcgagatttggcgcgtactgtctttggagtttcgccaaaaactatcgagcctcttgtgttatttcctgtttttcattttgaaagatttcatgtagatagtgtttggcgcgaaaaggttattggtaaagatgatgttgatatagctgggcttattaatagattggggattagtgactgggttagctttggtagaggattcgttgagggagagacttgtcctttctgtcaaaagtctacgatcacggctgagtttaaagaaaagcttgatttgtactttgatgatagttacaagaaaggtattcaacgcttgaataaagcggtagaggattacaaggcggaagtgggtagggttaagagcttcttgtcacggatagaggaagaggttagccggcgtgacgagttgaaattcgatgtggattcatataaggctgagtgtcgagcgatttttgcattagtagactctaatttagaaattgtttatgggaaattaaaggagccaagtcgtactgttgagcttcactcgatgcaagagtccttcgataaaattgctttgttgttcatggagtcattgcgcaaggttgatgaacataaccgtattgtggataacctgaggcaagagaggaacaaacttgtaaactcattgtggcgctacttggcacatcaggctcaagatgattttaaagagtattctagaaagattgctgggataaaaaaaggtattgagaatgttgaaagaataattggtgagaaacgattggagtacaaagcgttggaggggcaggtgagagagctagtcgctaatagcgcgggagttcagcctgctgtggaggagataaatagacttttattaggatgtggttttaatagttttcagattgttcctgcggactctgttgctaatcactaccagataaagcgtgaagatggtagtctggctgagcctacgttaagtgaaggggaggtttcttttattacatttctctattttctgcaattggctaagggtgggacgcgcttagaaaaagttagaggggcaagggttctggtagtagatgatccaatatctagtttggatagcggtattctttttgttgtaagcactttgatgaagggtgtaatcagagagataaaagctggtgttggagatataaaacagcttatattgcttacccataatgtttattttcataaggaggtgtcttttattgatggtaggacaagaattgatgcggatgttaaattctggattatacgtaaaaatgatcgattttcgaaaattttctgttatggcatggataatccaattagcacgtcttatgaactgttgtggcgtgagttgagagaggtggcagatgatgcacatgtcactatacagaatgttatgcggcggattattgagaattactttaaaattttagggagttatggtgatgatgaactgattggtagttttgctactaaggaagataaggatatctgtcgctcattgttgtcatgggtgaatgacgggtcacattgcgtttcagatgatctgttcattcaatcggaaggggttgagttatctgcatataaaagggtcttcaaagagatatttattaggactaaacatgaggcgcactatgagatgatgatgcgtgtttga

SEQ ID NO: 338594 - DNA, 510 bp, Pseudomonas aeruginosa
atggccgaactgaccctccaggagcgcctgcagccgtcgctgctcgaccgcctcaccgacgacgagccgggcaacctcaaggaagccgcggagcgccgggtgctgaccctgaaccagctgaaggcctcggtgctgcgcgacctggcgtggctgttcaacaccacttcgctgttcgaccacggccccgccgcacggatgccggccggcaactcggtgctcaactacgggctgccggcgctggccgggcacaccgcgtcgagcgtcgacgtgcatgccatcgaggcgctgctcaccgagaccatcgccaccttcgagccgcgcatcatccgttcttcgttgcgggtgcgcgcgcaactgctgcccggcgagatggaccacaacgccctgagcttcgagatcgagggcgacctctgggccgaaccggcgccgctgcgcctgctgctgaccaccaacctggacctggagaccggccacgtgcgcgtcgcccagggcgagcggaggcgtacatga

SEQ ID NO: 338595 - DNA, 966 bp, Pseudomonas aeruginosa
gtgacagaaaaaaattttccctcctataaagccaagagcggcgagttcgatctgatagagattatgagtgggttgtggtccctgagatggctgattgctttgctggcagtgttgccggtgttgttggctattgtttatctattcatcaccaagcccgtctatgaggctcgtgtctcgacgctgcctccttcactcagcgatatagctggtttcaacttgggaagatcggaaaacgggcttcccgcgttttcggcaaatggtgtctattcaatcttcgtgcgaaatctccagtccgaagagactcgccgtcagttctttcgagatgtatatattccttccttggaggagggggcttctgttggttcgcgggatcagctttatgcgcttctcatgaattcggtaactattcagaagcctagcaaagaggatagcgagcgctacactgtcgtcatcgagcggcatgatccttcgcaggcggcggagtggggcgagaaatatataggaattgcagtcaagcgttccatgcaggaaatgcaagaaggagtacgccgcgagtttcaagtgaagaatcgcaatatacagcaacagatcgacatcttgcgtgaaactgcgaaggctcgccgtgaagatcgtatctctcgactgaaagtgtacatgcgtggtgccaaggctattcgggcagaaataaaaacgctgcaagatcgtgtctccgatgatcctttcattcccgcattacgaggcttgcaggagaagtatgctcttctggaggggctgacgctgaatctcgataaagtcgctgtttttcgtcaggatggtacgatagaggtgccagatgatcccgtccgtccaagaaaaggcatagtgcttatcctaagcatgcttgctggtggttttttgggggttgcggtggctctagccatccttatggtgagaggtgggtttaggcgcacggtcgatgctgcatga

SEQ ID NO: 338596 - DNA, 3114 bp, Pseudomonas aeruginosa
atgagcaccacagtgctaaccgagaacatggtggaagaagttgcgctcgcattcttccaggagtcgggtctctctacccgactgggcacggagctcgacgacgccggcgagcgcgccagcgccacgcagtgcgtcctgtcagggcggctcagcgcggcgctgcaccgactgaatccggcactatcgcacgatgccgtcgaacaggtcgtccgcaccctgtcgcatccgccgcaaccaacgctaatacagaacaaccgttggttccactcgctgctgctcgatggcgtggaggtggagtaccgcgacgccaagaccggagaaacccgcggtggacgggcgcggctggtcgacttcgagaacccgcgccagaacgactggctggtagtgcggcaactgaccgtcaccggaccttcgggcaagcatatccgccccgatctggtggtcctcctcaacggcttgccgcttgctgtcatcgaactgaaagaccctactgacacagcagccgacttgaatgcggcgatcgcgcagttggcgcgctatcgcgacaccgctcccgacctcttcctgtccaacctgctactggtcgcctccgacggcctgctgacgcgcgtcggttcaatcaccagcggcgccagccgctacacaccctggcggccagccgagggtgggcagccgacgctggaagcgttgattcgtgggctgctcgagcccgagcgcctattggattacctacgctcttgcgtggccttcgaggaggacgagcgcggcgagatcgtcaagaagattgctggctatcaccagttccgcgccgtgcgtaaggcccgcgtcggtgtgctggcccaactcaaggcccccatcggcaatggcgacgggcgcggcggcgtggtctggcacacccagggctcgggcaagtctctgactatgctgatgctggccggcgcgctggtgcgcgagccgctgatggcgaaccccaccatagtcgtggtcaccgaccgcaacgatctcgacgaccaacttttcggtacctttgctgctggccgcgccttgctgcggcaggtgccagtacaggctgaggaccgcgagcacctgaaggaattactcgaccgtgccgccggcggtgtggttttcaccaccatccacaaattcaccgaggcgcacggtgaaatctccacgcgcgcgaacgtggtggtgatagccgacgaggcgcaccgcagccagtacggctttgttgaaggcggcgcgcgttggatgcgagcggcgctaccgaatgcgacttttatcggcttcaccggtacaccgctagagcgcgacgacaagaacacgattcacgtcttcggcgagtacgtcgatgtatacgacatccgccaagcggtcgaggacggcgcgaccaaaccgctttactacgagtcgcgtatcgtcaagctgacggtggacgacgctggggccaatgcagccgaggcagaactaaagcaggcgacccgggccgacgcctcgggcgaggagatggtcgagcgcatccgcattccgctggaaggcttagtcggcgcgccggagcgcatagcccaactcgccgccttcatcgtcgagcattgggagaaacgccgcgccgcaatggaaggcaaggcgatgatcgtcaccatgagccgtgaaatttgcatcgcactctatgagcggatcatcgcgcagcggccggactggcattctgacgacgatcagggcggcctcattaaggtgattatgaacgagggattgcctccccggcggcaaggcgaaacggaagaggtatatcagaggcgcattaagccactcatcgaaccaattaggaaacacgggagaaccaaggcggcgcgcaagcggctggcggagcggttcaagaaccccgccgacgactttcgtctagccatagtctgcgacatgtggctgacaggcttcgattgcccccccgcgcacacgctctacctggacaaaccgttggccggacacaacctgatgcaaaccattgcacgggtgaaccgggtctacggagacaagccgggcggtcttgtcgtcgatctgcttggcctcgcagaccagttggcggacgcactcgcgacctacacccaagcaggtggcaccggtgaggcgatccgtcaggtgcaggacgaagccgtgccagctatgcaaacggcgttcgagaagctcgacgactttttccatggctgtgactaccaggccgcgctgagcgccgaaccgcaagcaatgctgccaatttatttgcatgccatcgatcacgtgctcggtcaggacgatggctggacgcgctttcgctcgctggtgaaggagctgtcgaccgccttcgcgctggccgtgccgcgcccggagacggaggccatagtcgagcatctggcatttttccaacgcatagcggcgatgatccgcaagcggctagcggatgagtccagcggcactctgcgagcccagcaaagcgatgtcgatgcggccgtacgccaggtcatcggcggcgcggtagatgcggaccaagttatcgacctgttcgccgttgccgggctcgacgaggcgcgtctcgacatcctgagcgacgaattcctgcaacgcgtcgccgcgctagagcagaagaacctggcgctggagaccttgcgaaagctattggccgaccagattcgcgtcaccgaacggaccaatatcgtccagagcaagaagtttcgggaagcgctcgaagacgcaatgctgcgctacaccaacaaagcgatcaccacagcggagatgatcgcgcgcctcatcgatctggcccaggagctacgtgccgctcagcagcacggcgcagagctaggtctgaacagcgaggagacagctttcttcgatgcacttgcggagaacggctcagcaaagtccgtgatgcagagcgacaccctgcgtctcatggctcgcgagctagtggagatggtcaagaaaatgcctaagctcgattggactcagcgtgaatccgttcgtgcagacttgcgacgcagtgtgcggcgtttgttggccaagtacggttacccgccggatctatccgacgacgcaacccaactggtgttgcgtcaagctgaggtatcaacagaaagcaaggcataa

SEQ ID NO: 338597 - DNA, 660 bp, Pseudomonas aeruginosa
atgacccgccagctcaaaccttgggcgtatgggccctttgaagtcttgctgcacgccgaaactcactaccgcatcggagaagacctcgatcggcgcgtcgccatgatcggcttcgacaacgctatcgaagtggcgatcacgacctatctgaacctgcacccgatgcagcggggcaatcggacttacccgaaggtcgacgtagaaagatggctgaacaactttcacaccaaggccgagttcttcttcattgagtgtggcactcgcagcatcaccgccaacgcaaaacaggatgaagtcatttggtttcatgatgtccgcaatggccaataccacgtcggtggcgccaccgtgccgcagcggcgcgagctcgacggcgtgcgcgccgctgcgttggaagtgttctcggtattgttcgacgagccggatgttatgtccttactggcggagtatctcgccgagatgagcccgcttccaccgccaccgcgtagtgacgagcacgatcgactgatcgacggcgagcacggtatggtcgacgtgtgcgggcagccggaatacgccagcgacgtactctatgcactcgacccaaatcgctaccgtgaggtagccctagaactgcaagtcggctctgtaccacctacggacgaggaggccggagcatga

SEQ ID NO: 338598 - DNA, 1221 bp, Pseudomonas aeruginosa
gtgaacatgggtgagcttttcgcatacccacgtttacgtgcagttccgatgcgtcgaattgagttaaatggcaatgagctggagcgtttcggacttcaaaagcacgatctactatttgcccgacgctcacttgtggcggaaggcgcaggcaaatgctcaattgtaatggatgtagacgggcccaccgtattcgagtcatcgattattcgcgcacgcccggacccaagcaaggctaatcctatttttctgtactacctgtggtcgtctccacttggggcacatctactcggaacgatacgtcgccaagtagcggttgccggggtaacaggcaaagatctcgaacagctagaatttcctttgccgccaatctccgagcaggagactattgcttctgtgcttggggcattggacgacaaaatcgagcacaaccgcaaaacggcacaagagcttttgcatcttgcgcatgcgatcttccgagcttggttcgtggatttcgagccggtcgcggccaaggctgccggcgcaacctcgtttccctccatgccgcatggtgtttttgacgtgctgcccacaggctttgttgactccgatatcggccctgtgcccgaggggtgggaagttgggagggttggcaatttagctgaactgtcaaagacacaaattaatccgcagaactatcctgaggagatgttcgagcatttcagcattccagcctttgacgctggaatgctccccgtagctgagaggggcggcgcgataaaaagcagcaaattctctgttgtgcccggctgcatattgctatctaagctgaaccccagaattccacgtgtttggttgccgtcaccagttagtagccgacgtcaaattgcttcaacggagtttttggtatttgtgccacgctccccattagaccggcactacctctattgccaattcgagcagccaagctttcgggaggagcttgcgcaagatgcgaccgggacgtcgaacagccatcagcgtgtgcgaccgaatgatctattgaataagcccgtgcttgttccgcctgagacgatccgcagtggattcgccagtatcgtcgacccattatttgctctgattgctgcacatctttctgagtcaaccaaaatggctgagatgcgtgactatttgctacctaagctgctgtcgggcgatgtccgcgtgaaagttgatacggctacacccgaggtagcgccatga

SEQ ID NO: 338599 - DNA, 1689 bp, Pseudomonas aeruginosa
atggctggcaatgacgcgaccgaatccgactacatctatgctgataccctctggaaatcagccgacaccctacgtggccagatagatgcggctgaatacaagcacgtcgtccttggcctgctatttttgaaatacatctccgactcgttctctgcgcgccgtgacgaactcaagacagagctggaggcagatggcattacaggggcgcaatgcgaggcgctgctcgaaaaccgcgacgaatacacggccgagcgagtgttctgggtgccgccggaggcgcgctgggccaacctacaagaccaagccgcacggccggacatcgcgacgttgatcgacgatgccatccttgccgtcgagcgcgacaaccccaacctcaaaggcaagctgccgcgcgactatgcccgccgaggtatcgagccggtcaagcttaagggcttgatcgacctgatcgctgatattggcttcaagggtgatcgtgcaaaggcccgcgacacgctgggccgggtttacgaatacttcctcggcaagttcgcccaggccgagggcaagctgggcggcgagttctatacgccacgctcggtggtccgcgtgctggtcgagatgctcgagccctaccaaggccgcgtttacgacccagcctgcggctcgggtggcatgttcgtgcagtccgagcgctttgtcgaagcccacggcggccagaaaaccgacctctctatctttggccaggaatccaatcccaccacctggcggctggcgcacatgaacctcgccatccgctcgatcgaggccaacctcggtagccagcctggggacagcttcttgcgcgacctacacccggatctcaaggctgattacatcctcgccaacccgccgttcaacatctccgactggtccggagaattgttgcaggatgacgtacgctggcgatacggcacgccgccgctgggcaacgctaactacgcctggatccagcacttcatccaccacctcgctgtacccaacggtcgcggcggcggtgtcgccggcttcgtgatggccaatggttcgctgtctagcaacagcggcggcgagggcgatattcgccaacgcatcgtcgaggccgacctagtggactgcattgttgcgctgccggcacaactcttcttcacgaccggaattcccgtctgcctgtggttcctaacgcgcgacaagaccggccgtaacctcaagaacggctgccccaaccgccccgatggccgtaggggcgagacgctgttcatcgatgcccgcaagctcggcaccatgcaaactcgcaccttgcgcgtgctcaagggctgcgaagacggtgacacgctgctccccgacggcatgggcgaccccaaacctgataccgacatcggtcgcatcgtctacgcgttccgtaagtggcgtggcgagcctaagccggaatggtgggatgaagccacacacggtgaatggctctatcgcgatactccgggcttctgcaaggcggccaatatcgaagaaatcaggaggcatggctttgcgcttacaccaggtcgttatgtgggcgccgaagagcaggaggaggatggcgaaccgttcgaagataaatatccccgattacttgctgaagtagaacagtgctttagggagtccgagaggttgacactcgctgtccgaaagctgctaggggaaatctcgttgtga

SEQ ID NO: 338600 - DNA, 996 bp, Pseudomonas aeruginosa
atggcgaagatgtggatgatccggggtgaaagcgggcggctctacgatgactttcgtgatcggaaagtggccgctatcgggtggtcgcagttggccgcagtcgccaagccgaacatgacgcgtaaagaactcacgactctttatcaagggatggagcccaacatcaaatccgggacggccatttctggtgcctctcaggtttggcgtttcatcaatgaaatcaagcctgaggactgggtcgtcacctattccccaaccaatcgcacctatctggtaggtaaggtcaccggcgcctatgagtaccgccccgactgggcagccgaagacatgcccctggtccgtcccgtgcagtggcaaagcaaagaaatcgagcgcgacagcctagctaccgctagcaagaacagtctgggctccacactcaccgtgtttgtggtgccggactttgccatgcaggagctgctggccaacgccaccggcaagcctgcaccggccccgccagaaactgctgaagaggaagccgacaccgacccgctggccgggctggaaagcctcgccatcgagcgcatcaaagacctggtcaactctctcgattgggacgagatgcaggagctagtagccggactgctacgcgccatgggctacaagacccagatttccccggccggctccgaccgaggcaaggacatcattgcctctcctgacggttttggcttcgaaaatccgcgcatcattgtcgaggtcaagcatcgcagtggccagatgggtagccaggcgattcgcagctttctcggtgggcggcacaaagacgaccgtggcctatacgttagcaccggcggcttcaccaaagatgcatattacgaggctgatcgcgcaaatgtgccgctgactttgtggacactagacaacatcgtccgagcattggttgagcactacgagctgaccgactctgagaccaaaaggctggttccattgaagcgtgcttacctaccagcctga

SEQ ID NO: 338601 - DNA, 540 bp, Pseudomonas aeruginosa
atgaggctggtatgggagctgttgcggacgctatgggccgtcgggtgcattccggtcggagcgctgctgctagttgtcatggtgctgtgtggtttcaacgtgcccttcttcctaggcatcagcggcggtgctgacccggttgtgcgctggttgttctgggccttggtcttgtatttcgtcggcggggtttggttgttcttgtgggtcgatcaacgctatgccggcaagctgaaacagctagctgcagagctccaggttcaaggcttccgaccccaggtcgaggtattcgcgaagatgagcgatgcctacctaggcattgatggctcagcacgcagattgctggcctaccccgtcgatggcgcagggcatttcttccagctagatgaaatcaactcttggcgcattgtgccgatcgggaagcgtaaccatcgactagagctactgaccagcaatctccgggttccggcgttcggccttgtgctgaaaccggctgaggtgcttaccactgaagctaggttggtcgctttgctcggcagatag

SEQ ID NO: 338602 - DNA, 309 bp, Pseudomonas aeruginosa
atgctgagcaacaactctccgctttcaatcgccgcaggcgtgctagcaagcgacacgattgaggctgtacggcgttcgccgtccttccatgcacgagcttggcaaatactcgatcgctgggcattcaacagcctggcgcagcttcgtcagatggaagcggacggcgaaatcattctgctggaaaggctgctcattcagcaggaactggagcatcggactctgtgttcagaggaagggctaaatcagcagcgtcatggcctcacagagcacgagatcctgacgctgcacggggtttcaagctgcctctga

SEQ ID NO: 338603 - DNA, 270 bp, Pseudomonas aeruginosa
atgactactcatctgatcaccctagtcatcaagcagccgagcgacgctcaggcacgccaactcatgtaccaggagttgctcggactgatctcacgctacggcggtgaggtgacgtcaaaggccttggaggacgagtcgaccctctgcgagctgctggtgcagatgctgcctgatgatgaggtagagcaagccaggaaacaggtgctcgaacttcatgccaagcgccgccgcccgggccgcctgcagtcgccggcaagcctgaaggtgtaa

SEQ ID NO: 338604 - DNA, 906 bp, Pseudomonas aeruginosa
atgcaagatcgtttgactcgcttcgaagtcgctcaaattgagcagtttcttgaaaaccatttcgaaaaaaatggccaggacatcctaggcgcacagcttggccaattcgtccgacgtgccatatcacctaaaaccatcaagtcggtcggcgggcttaaaagtctcgtcgcggtggagctgtcacggagcgtagagctcgtgggggcgcttccgtcggatagcttgtaccgcatcaatgtactcggtaaagatgccactcatacctcagcagagtgtgagtcagtgactctaccgcagttttggaacgcgttttcgaacccgaatcttgaatgtattgtcgcggttaatcccgtaactgaaacgcttcatgtgggcctcccaagtgagtccctcatgcccgacgccaagccattacgcaaaatgtcctctgaagagttccgcgtgctggctaaggactatgccgagagccaggaagatagcgaactgagcaatgagttgcttgcaacgctcaatcagccagtcttctatcataagtggatttccgtgctccgcgctcgacgaactgctacggaaaaccatctgaaaagctgggaggtcgctcgcacccggcacgtcattagccgcttgaaagaagagcttgagcgggtgggagtgagttctactcgggcaacccaaatggctgcagaaatgcgccctaagcgctccaaagcccctaaaacccttcactccgaacagactcgcctagagagtcctgacatcgcgcccgctatcggtaagataccagctctgcaagagctacgtgcactgatgcatcgggcaattgatcgcatgtcgttggctgacctgaaagaaatccgcgtacctgcaggtttactgctcgaaatctatcaaaagcctgtggattga

SEQ ID NO: 338605 - DNA, 1362 bp, Pseudomonas aeruginosa
atgcggccgttgctgatcgtatctgaaaccagacatgcgcttaaagtttcagagattgtccagaaatatggccatccggcggtcgtggagcgctttgttcatcggctcgaggtagaccttgaggtagaaaacgatatctccgctttccacttcgccatcatgaaagtgctccaggaaaagaagcctgtcggggcctccaatggatatcttgtttgcgctacccacgaagttgaacggcagtttaggctgcgtagctttctcagaactcagcaagtggaatttgccctatacaacgcgaaagagctgagcaagtctctttcggaacgggcacaagacaaaccccagttagcaaagctgcttgggaactgcgaattgtccgtccttacggcggcgtccagtatccttcgttcgtggacacatgctcatatcgatgtcaatgcattggccaactggaagagccagtttggacagttgggcaaatttgcttgggttgcagatgcgatcctggcgaggacgacgctgatgaccgcgcccgagctcgccgactgcctggtcagctcgccgcttaccgaagccgatattgctgcattcaatcgggacggtcggggagtcagtaaaagtggagatatcatagccaatctactagcaaagcgattgccacaactgaaagtccttgactctcctgctgaggccatcgaactgcatccgcatggtcgcgttgtcgtagtggaggatggtttgtggagcggtactgaggcgatcggtgtcttcgacagtctattaggtcgacggggcggtcgtgaaaaaacgaaaccccttaaggatccgacgcttctcagtaatgtttcgctgaccttgatgtatggcatgagtaccgactacggaacggctatggtcagacgctaccttcacgatgaaggttttaccaacatttccgttaaaagcaacaatacgcttgccttagcctcagatgagttgttgagtcgcatcgccaaccctgctttcaatatccaagcgctacgagataatggaccttccgtcggcacgatcaagccacatctcttcgaaagcttgaaagcagcctttacctccgagcaatgcaatgaagccgatcagtttttgcgcgcagtcggccgacaactgtggcgcaactatttgctcaaaatgaacaaacttaaaggctggacaatgtggagtgacgagaggctggacaacagcgcgcttggcatgcatgggctgggacttactcatgcgttcggacactcagtacccaaagctacacttccgttgctatggggagatggccccgttacatggaacggtcgctcggtaaactggacaccgcttttgctgaatgcatga

SEQ ID NO: 338606 - DNA, 1434 bp, Pseudomonas aeruginosa
atgaaaaggaacatcaagtctattccgctcaatctgataaaacttgatcaagagaacgttcgattcggcaatgatatagctcaaaatcagcgtgaagccatagacttaatcatggccgatcctgaagacgcaaaaaagctattacgtctagctgaacatattgccgagaatgggctggacccaactgaattacagctagttactcctgatggagatggtaactacattgtgcttgagggaaacagacgcttaaccgcactaaaacttctacaaaggccagacctttgccccaacgaaaagctattaaaagcatttattgcagcccacaacaagcttcgcggaaatattccaaatgaaattgagtgcagtatagttcctactcgcgcagatggcgaaatgtgggtcgaattgaagcacactggtcagaatgccggggtgggaagagtacagtgggacagcgatatccgcgacgaacgccgagcacgtcagaccggagttgagtccattgggcggcaaatccgtaacctcatcaaagataacgctggagtattctcctctactactattgcgggcgtttacacaataccagtcacaactttaactcgtcttttttcctccgcaccagcacaagaagccttccaaatcaaaatcgaaaacaaggaaatcaccaccagcatcagcttaaaatacattgcaccagcagtagagttcgcaataaacctatttatcgacgaagactacaacgtaaatgacattcgcagcgatgaagacagaaaaagatttttgaaacatatccctccagagcttgacccactatatctcttgaaaaaagacaagcaggatccaaattcgcaaaaaccttccgacccgaacaccaatggatccgaagatgcggataaagaaaatgctaaagggggtgatgagagtggaaacaagagcactggaggaactagagccaagccatcctctagagcaagaaaattcttgctaccctggtcacttaacattgcaaacaacagaatcaatgaaatataccgcgacttaagaaaaacccttgtagttgaaagctgccccaatgccacagcagtaacctttagagtattcatcgaaattagttgcgacgacttcacaatccagcaacaaaaacaaaacacaccagtactaagaaatgacaacaatcgaccactgaagacaggagctgatgataagctatcaacaaaagttcaatcggtagccaaacacttagaggctcaagagaaaatcacaaaagcagagtgtaaaacaattataaaaagggctagctctttcgactcagtaggctccatagaccatttcaaccttttcattcacagttcggccagcgcgccgataccatcagaattgaaagatattgctgatgagtatcgcccattgctagaggctatctgggcatga

SEQ ID NO: 338607 - DNA, 882 bp, Pseudomonas aeruginosa
atgggtgccacaaagattttttccacccctctcagatatccgggcgggaagggtaaattttcccacttcattaaacagatatttacatctaacaatctatttgatggacactatgttgagccatatgccggaggagcgggggttgcactagagttattatttcacgagtatgcctccaccatccacatcaacgacatagatcccgctatctacagtttttggcatgctgccacgcaacaaaccgagcagctttgtaaacttatacatgacacacctgtcaccatggaaaattggaggcattacaaacagatactggagaacacccaagaccactcgacgttagatgtagccatggcaacattctttttaaacagaacaaatagatctggaatactgaaagctggagttattggcggccaagatcaagctggaaaatggaaactagatgccagatataacaaaaaagacctgactagcaggatagagcttattggtagattcaaagaaagaatcaaagtttacaaccaagacgctatacagcttcttacagaaaccatacctttgctacctgaaaaaaccttgatttacttagacccaccttattacgtcaaagggtccggcctctatcgaaactactatactcatgatgaccacgtacaaatatccgaaacaatggctaaagtcaagcacccctggcttgtatcatatgacaatgtcaaggaaattaaagacatttattcaaaatacaggcaggacgaatacatcctgagttacacagcacaggaaaaaaagaaaggctcagaagtcatgatatacggcccatcgatactaccaccacattttgaccttagagaaaagccagttaaaaatgccacaatataa

SEQ ID NO: 338608 - DNA, 402 bp, Pseudomonas aeruginosa
atggcccgtcgcaaagagattcccgctgcgctgtggaagcgcatcgaaccgttgatcccgccagtgaagccctcgcccaagggagggcgaccgcgcgtcagcgaccagcaagccctcaatggcatcatctacgtcctgcgcaccggtattccctgggaagagctgccgctggaactgggctacggcagcggcatgacctgctggcggcgtctgcgtgactggcaggcggctggggtgtggcatcgtttgcatcaggtcctgctggccgaactgcgccgggccgacaaactggacctgagccggacaagcctggatgcggccagcgtggcctccccccggggggcgcttataccgggccgaacccgaccgatcgcggcaagctcggcagcaaacggcacctga

SEQ ID NO: 338609 - DNA, 1791 bp, Pseudomonas aeruginosa
atggcggctattcccaagataaaaaaactaatcattaagaacttcggctgcgtaggaaacacaccgattgaacttgatatcgataggatcgttgttctcgtaggagcaaacaactcaggaaagagcacgatccttcgtgcatttgaagtggtaacagagtcatccaagctggaagttgatgactttcataaccggcaggttttggcagacaactatcctgaaattgaaatccactccattgccacagatgaaaacaagcctggagatgagtggtgcgtaaaactcccaaacagcgagtttcttgttcgggagcgttggcaatggttgggggtcaacgttgagccgactcgaaccgggtataatgttgacctcgaccgctggcctgagaaagccgataaagaaaagatgccttggggctttaacgcggtagccaaatcaagaagaccgaagccgcaccgtgtaaacacattcgacaaccctgtcgaccaaagcaaagccattatctcactcctcaaaagtcttcttgaagacaatatcaagacgctaaaggccagtgatgaggcagaaatcactcgctacgacgagatagtaaacgccttaacagagctgaaaaaagacggtaaggcagggcaaaaagatcgaatcaacgagcttgaaaaacaagccaacagcatcctggataaaatattcccaaacaacaatatattcttctcttcaaaggatggtgaagctcctatttctgtagatttgcttggcgacgaatttacggtagaaatgggaccgcaaggtggagcggcatttccactggagaagcaaggaagtggcacgcagcgaactgcactttgggccatacttaaattactagccgaccaaggatataaagctaaaccaaatggcagaaagggacatcatgaggggctaggcgaagtctctgctcatgtattacttctcgacgaaccagaggttagcctccatcctaaagcagtacaaaatgcgagggacgttctttactctctaccggacagtgaaaactggcaggtaatgatcaccacacactcgccaaacttcattgacctcacaaaagatcacaccacaataattagagtcgaaaagaattctcaaaataaaattgaggcaacaacactattccgacctaacgtagcccagctcgacaatgacgacaaagaaaacctaaagctcatgaacctttttgattctcatatttccgaagcgttctttggcggtaggattttgatcgtagaaggagacacagagtattctgccttcaactacataaagagtcgagagagagacaatggaagttccaaatacgatgacctaaacattattcgagcccgcggaaaagtcacggtcgcctctatgatgaaagttttaaatcactttaaagcaacgtattttgtcatacacgacaccgaccgcccaaaaacgatgtcgaggaaattcaaaggaaaagataaagcgggcaatcgcatctacgaggaaatagaaatcaataaccctgcctggacaaataactcaaagattctcgatcaaatgagcggatactccaaggtcgccgcttcaattgtaaacttcgaagtagcgtacttcgcagaggctgctgatagtggcaagccagaaaattgcatcaccaaaatgaaagacagccaagaacactacgacacggttaagaatctgatcgatggcattcttgaagacggggagcttccggaaggagcaattcgctggaagagcattgaagagttaaaagaagccatcaaaggatggtaa

SEQ ID NO: 338610 - DNA, 999 bp, Pseudomonas aeruginosa
atgaactcaccgaaagatggaaaaacaaaaaaaagaatcgccatacccaaaagcctagtcgatgaaatactctataaatcagcaaagacttgctgcacatgcagaatcccgagactgcctgtagaagtccaccacatcgaccaaaacccttcaaacaacacctatgacaatctggttgtactttgccggaactgccatagtgacgcgcattcaaaaagcgcaatgtccaaaaaccttacccctgaacgacttacatacaacaagaagcaatgggaaaaagatgtagcggagcgagcggcgctagcgatgaccccaggagcaaacctatcgcaagcagtttggacctttacgaaccaccagaggcttccgcaaatattaaaagcaagaggcatagcttttaataatgaaatattcaacaatctattagaaagaaagatcatcgactcttttggaataccttaccaatccaagaagcctgaaagtggcctgacaaccatctacgactatttggaatatctagatggtcacaggcttcactacatgtattgcgaagcagtagatgatctaatcaagtcttgcaaccctattgagcttggcgcaatttggtcgcgcacagagatcaaaaacctcgtatcgccgggcgacatatgcttctgcatgcggggcttcagatttaaacgcggcgagattaagaacaatgcagaagacagagaggtatatgcaattgcagacggaattgaaatacgactactagccaacacccgacatatgttcggcagctctgcgctctacgactcgtttgttgggaatagatttgtggcaatactcatgctggtgaaaaatattgacatagaaggtaatcgacttgtcatcagagccactcctcttgcaatgggtgccggtttcgtgccggatgcgtaccaatgcccgtaccctcttaaatatggttggacaaaattccatcttccacatcgagagagaaaagcgacaaatatataa

SEQ ID NO: 338611 - DNA, 225 bp, Pseudomonas aeruginosa
atggatgtggaagaaacccccttcgagatgccgtacctctcaagccccccgccaatgatgccctggagagactttgccaactggatacgtatgggtgaccgccatgacgttgtctggggctggattcgcaatggctacattccgtcccagaagtacggcaaacacatgatggtcaatctgaccgcgttgaacagccagctactggagaaaggagaacgattgtga

SEQ ID NO: 338612 - DNA, 216 bp, Pseudomonas aeruginosa
gtgagcaaggcgaaatggaatctcgacctatgcggcatcgccaccttcgcggagatgtgcggcgtgtcgcatgacgaaacggcccaatgggcggaagacgggaccctccccagcttgcagatggggtgtttccgcatgatcaacctcgctcgttttcgtgccgatctggagcgaggtaaagctaccttcgacgcaggggattacagccatgaatag

SEQ ID NO: 338613 - DNA, 390 bp, Pseudomonas aeruginosa
atgaatagtgagcgtgcagtcctggatgctcagagcgcactgcgctatctggatcagaccgtcctgatcgaaatggtgttcgatgaagagccggacccaatctggcgctgggtacgtgtcgtcggtgtcgtgctccctgccgaagggctgcgcggtgggccgcacttcctgaccctcaagcccggagcagaaaaagcattcgcggatgaagccttctgggaagacattcgcacgatccgggtgatgcggtaccgcgaccggcatggttccggcaacgtactgggccgcgtcgcccaccctaacgatccgcgctcaagggccgcgctcccggctcgtcggaacagccccaccgttccggcgaacggaagcacgggcgcagcgaacccttga

SEQ ID NO: 338614 - DNA, 174 bp, Pseudomonas aeruginosa
atgagcttagagggactgatcaacgtcgttgctctcgtgctgatgacctacctcctgggcggcggcactcagctcaagcaacccaccatcccttcctgctggatcagcccggtgcagctggagtgctggacgttcgccgcgacgccggccgggagcgccaggcacgagcggtag

SEQ ID NO: 338615 - DNA, 1293 bp, Pseudomonas aeruginosa
atgagaaaagtgacccatcaacaccgcctccacatcgaagctgacggccgcatcctcgatgttcccaacggccgcatgttcatggattcgaaggcgggccacttcactgacctctccggtgttcgcatcctgcgctgtggcgttgatacggtgcgtcagctgtacaagggcatggttcgccccgaggtcatggcgctgttcgatgacaaggaacccatcgccaagtttgccgggcaccagtggtccaaagggcgcgtcggccgtgattcgggttaccagttccgtctgcagaacgccgacctcggcctgatcctgttgatcaagaactacaacatcaagctcgacaccatcggctctcacctgaagattgaagtctctccgcacgctatcgacggtgtggatcccaaggcgctgcagaaggtgctcgacgacctcgccgctgcggtgctcacccactgcgaaaccaaccagtgcgccgttcacatcgccctggatgttcagggctggaccccacccgctgatatcgtggatcgcatgcattgtcggtcgaaccgagtccgccagttcagcggcatcgaccgcatcgagttcgatggcaatgcctcggtgtacggacgtggcgagacctacatgttcggctcgcccaacgggattcagttgtgcatctacaacaagacgctgcaagcccgcgcaacggacaagctggattactggaatgccgtatggtccggcctcaatggcgatccattcggcgcgggtgacgccgcctacgatccacaggaaacggtgtggcgcatcgagttccgcttccaccactcggtggtcgaacagttcgcgcaaggcacctgcctgccctctggcgcggtgatcgcaacgcggacctatgccggtatctgcccgcacctgcaaggcctgttcggctacgcctgcgaggcttacaagttgctcgcccgggatgccgtgtacgatccgttctggtcgctgatcatgcaggacgtgaaggtccaggtcgaagccgacccgctgatcgaacgcgtcgaataccgccgctaccacaaaacggccatgggcttttccggcaagaactgcgagatgttcctgggccagttcatcagcctgatcgcacgggagcgcattcccgcaaaaaaggcgattgagtccgcccaccgactggagttctggcacgtcatcgaagaccactatctggccaggggttggactcgccgtgaactggagcagcacatcaagaacctcatttccgatcgctacctgaggcgaggttatgccgtctga

SEQ ID NO: 338616 - DNA, 1041 bp, Pseudomonas aeruginosa
atggcgatcactaagctggaagacggccgttggctggctgatatcgaacccatcaagggcaagcgcttccgcaagcggttcaagaccaagggtgaggctcagcgcttcgaggccatggtccgctcgcagaccacgcaggatcccgcatggaaccctcgcccgaaggatcgacgccgactgctggaactgatcgcccgctggaagctgctgcacggccacgccctggtcgacgtcgaacgcacggacctcgtgttgcgccgcatggccgaagcacttggcaatccggtggcggctgatctcacaggggctcagtacacaacgtaccgggcacgtcgtatgagttcaggcgtcagtggcaagaccgtgaacaaccagctcggctatctgcgctcgatgttcagcgtgctccggcatctgggcgaaatcgattaccccgatccgctggaaaaggtccgcccgttgaagcttcaagagcgcgaactgtcgtttctttcgaaggccgacatcgccaaggtgttccactcgctcaagcaccatagccgcactccgcacgtcgagatggtggcgaccatctgcctcgctactggctgccgctggggagaggcgcaagggttggtccctgagcgtgtcaaagccggcgcagttcacttcatcaacaccaagtccaagcgccgccgatccgtaccgatcccgcccgagatggaagaacgcatccacgatcacttccaggaacacgggccgttctccaactgccgggacagcttcgactatgcggtaaagatgtcaggcgtgaacctgccgccggggcagaagacgcacgtgctccgccataccttcgcgagccattacatgatgaacggcggaaacatcctgacgctgcaacgggtactcggccacgcctcgctcaacatgaccatgcgctatgcgcacctcgcgccggatcatctcctggacgtgctgacgctgggaccgatcagggactttcgacacttcttcgacaccaacgaagaactgtcctcccgggctgaaccgaaagtctag

SEQ ID NO: 338617 - DNA, 1530 bp, Pseudomonas aeruginosa
atgagcgaaagcagcagcttctccccgcccagcctggtgatggcgaccatcggcctgtccctggcgactttcatgcaggtgctcgacaccaccatcgccaacgtcgccctgccgaccatctccggtaacctcggggtgagttcggaacagggcacctgggtgatcacctcgttcgccgtgagcaacgccatcgccctgccgctgaccggctggctggcccggcgggtcggcgaggtgcgcctgttcatcgccgccgcgctgctgttcgtactcgcctcgttcctctgcggcatcgcccagtcgatgccttctctggtcggcttccgcgccttgcagggcttcgtcgccgggccgctgtatccgatcacccagaccctgctgatctccatctacccaccggcgaagcgcggcatggccctggccctgctggcgatggtcacggtggtggcgccgatcgccgggccgatcctcggcggctggatcaccgacgactacagctggccgtggatcttcttcatcaacgtgccggtcggcctgttcgccgccttcgtcgtctaccagcaactgaaggcacgcccggtggtgatcaagaaggcgccgatggactacgtcggcctgatcgccctggtgatcggcgtcggcgccctgcagatcgtcctcgacaagggcaacgacctggactggttcgagtcgaacttcatcgtcggcggcgcgctgatcgcggcgatcgccctggccttcttcatcatctgggaattcaccgaccgccatccgatcgtcaacctgcgcctgttcgcccaccgcaacttcgccgccggcaccctggcgctggtgctgggctatgccgcgttcttcggcatcaacctgctgctcccgcaatggctacagacccagatgggctacaccgccacctgggccgggctggccgccgcgccaatcggcatcctcccggtgttcctctcgccgctggtcggccgctacgccaaccatttcgacctgcgcatgctcgccggcctgtcgttcctggcgatggccatcacctgcttcatgcgcgccaacttcaccaccgaggtcgactaccagcacatcgccatcgtgcagttgatcatggggctcggcgtggcgttcttcttcatgccgatcctgagcatcctgctctccgacctgccccccgaccagatcgccgacggctccggcctggccaccttcctgcgcaccctcggcggcagcttcgccgcctcgctgaccacctggatctggaaccgccgcgccacgcaacaccacgcctacctcagcgaaaacatcagcctctacgacccggccacccacgaaaccctcgcccagctcggcggcaacacccaggcgaacgcggcgctgctcgaccggatggtgcagagccaggcctacatgatgtccaccatcgactacttcaccatgctcggctggctgttcctcgccctgctggtgatcatctggctggcccgcccgccgttcggcgccaagcccggcgcggccgcctccgggcactga

SEQ ID NO: 338618 - DNA, 261 bp, Pseudomonas aeruginosa
atggagaagaaaacaatctccgattataccgagactgagtttttagagtttgttagaaaaatctgcctagcgtcagggtataagactgaaggcgaacatactaatgcggttttgaaattcgaaactttatctgaacaccctgatggctccgaccttatttattacccgaaagaaggtcaggatgacagcccggagggtatcgtaaaagaggttaagaagtggcgcgccgccaaaggccttcctggctttaaggccggctag

SEQ ID NO: 338619 - DNA, 2301 bp, Pseudomonas aeruginosa
atgaccgcattgaccctcggcctgatcggcaatcccaactccggcaagaccaccctgttcaaccagctcaccggctcgcgccagcgggtcggcaactgggccggcgtcaccgtggagcgcaaggagggtgcgttccataccgtccgtcacgcggtacgcctggtcgacctgcccggcacctattcgttgaccagcgtttccgcccaggcctcgctggacgagcagatcgcctgccgctacatcgccagcggcgaagtggacgtgctggtcaacgtggtggatgcggcgaacctggagcgcaacctgtacctcacggtgcaactgcgggagatgggcatcccctgcatcgtcgcgctgaacatgctcgacatcgcccgtagccagcgcatccgcatcgatatcgacggtctggcgcggcgtctcggctgcccggtggtgccgctggtatccacccgcgccgatggcatcgacgaactgaaggcggccatcgactccctacagctcccgcaggcggcgctggcggtggattacccaccggccatccaggcgcaggtcggctaccttctggaaacgcgcgctccggcggcctcggccatcgagccgcgctggctggcgttgcaggcgctggaaggcgacatcttcaacggcccggcgctgggcttgccgcccgccaccctggaacaggcgcgccagggctgcggcgaggagcccgagctggcgatcgtcgatgcgcgctaccgactgatcggcgagatctgtgcggcggtctgcgaccaccagcaggctcagccgcaccggctgacccaatggctcgaccgggtcgtcctgaatcgctggctgggtctgccgatcttcctgctggtgatgtacctgatgttcttcttcgccatcaacatcggcggggcgctacagccgatcttcgacaagggctcgtcggcgatcttcatcgacggcatccagtggctgggtatccgcttcggcctgcccgattggctcacggtgttcctcgcccagggcatcggtggcggggtcaacacggtgttgccgctggtgccgcagatcggcttgatgtacctgttcctctcgctgctcgaggattccggctacatggcacgcgcggccttcgtcatggaccgcctgatgcaggcgctgggcctgccgggcaagtcgttcgtgccgctgatcgtcggtttcggctgcaacgtaccgtcgatcatgggcgcgcggaccctggacgcgcagcgcgagcggctgattaccatcatgatggcgccgttcatgtcctgcggcgcgcgcctggcgatcttcgccgtattcgccggggccttcttcggccagggcggcgcgctggtgatcttctccctgtacctgctcggcatcgtcgtggcgatcctcaccgggctgttgctcaagcacaccttgatgcgcggcgaggcctcgccgttcgtcatggaactgccgctgtaccatgtgccacaccttaagagcctgctgctgcagacctggtcgcgcctgcgcggcttcgtggtgcgggccggcaaggtgatcatcctggtcagcctggtgatcggcggcctgaacagcatcaccctcgacggcaagccggtgcagggcgacatcggccattccgcgctggccagcgtcagccagcgtctcactccgctgctggcgccgctcggggtgcagccggacaactggcaggccaccgtcggcctggtcaccggggcgatggccaaggaagtggtggtcggcaccctgaacaccctctacaccgccgagcagatccagggcgaggccttcgactacgaaggctacgacctgcccgggcaactgcgcgaggccctggtcgagacctgggacggcctggtcgataccttcagcctcagcgtgctggccaacccggtggaggcgagcatggccgacggcgacatggagaccggctcgatgggcaccatggcgagcaagttcggcagccccatcgcggcctacagctatctggtcttcgtcctgctctacgtgccctgcgtgaccgccatgggcgcgatcgcccgggaaagcagcaagggctggatggctttctcggtgctctgggggctgaacgtcgcctactcgctggcgaccctctgctaccaggtcgccaccttcgccgcgcaccccgagcgtagcgtcctgaccatcgccgtggtgctgctcttcaacctgatcctgatgacctgcctgcgtctgttcggccgtgagcaggtactgcaactgccaggccgaatggccgatgccccgagcgggcagggaggatgtcactga

SEQ ID NO: 338620 - DNA, 1059 bp, Pseudomonas aeruginosa
atggccagtcactggatgatctacggcgccaacggctacaccggccggctggtcgctgaacaggcgcagcgcgagggcctgacgccgctcctcggcggacgcaacccggccgccctgcacgcgctcggcagccagctcgggctggagtgccgggtcttcgacctgggggatccgcaggcctgccgcgaagccctggaccaggtgaaggtggtggcccattgcgccggtccgttctctgccaccagcacgccgatgatcgccgcctgccgcgccgccggcacccactacgtggatatcactggagagatcgcggtgttcgagcaggcccacgccggcgacgccgaggcccgcgaggccggcatcgtggtctgcccgggcgtcggcttcgatgtgatccccaccgattgcctggctgcctgcctgaaggaggcgctgccggacgcgcaacggctggcgctgggcttcgacaccggcagcgggctttcgacgggaaccgcgaagaccagcgtcgaaggcctcaagttcggcggcaagatccgcgagaatggccgcctgcgcgacgtgccgctgggctacaagcgccgcgacatcgatttcggccgcggcctgcggcacgccgtgacgattccctggggcgacgtggccaccgcctactacagcaccggcatcccggacatcgaggtctacctgccggcgccgccgctgctggccctgggcatgcgcctgatcgacccgctgcgtccgctgctcggtcggcaacgggtccaggactggctcaaggggcaggtcgacaaacgcatcgccggccccgaccaggcggcccgcgagcgcctgcgcacctgggtctggggcgaggcgcgcaacgcccgcggcgaacgccgcacggcgcgcctggagacggccaacgtgtacgacctgaccctgcacggcgtgctcctggcagtgcgccacctgctggactaccagggtcccggcggctacttcacgccatcgcggttgctcggcgcgcgctgcgtcgaatcgttgcccggctccggacgaatcaccgtcatcggctga

SEQ ID NO: 338621 - DNA, 324 bp, Pseudomonas aeruginosa
atggctaagaaattctccgaccttcgggcgcaaatgtcgcctgaggcacaggcccgcgtcgaggccaaggcccaggaactgctggctgaaatgccgctgaatgagttgcgccaggctcgtggcttatcgcagaagatgctgtctgaagtgctgcacgtgcagcagccggcaattgccaagatggagcggcgtacggatatgtacatctccaccttgcgcagccacatcgaagctatgggcggccagttggaagtgattgcaagtttcccggatggcgcggtgaaaatcagcaacttcgcggatatcgaggagacgggcgcctaa

SEQ ID NO: 338622 - DNA, 654 bp, Pseudomonas aeruginosa
atgcctctaatatctgaatgctacatattctcccctgatgagagaagaaccattgatggtctagtgggcgccgggtttagttatcgcgactggggttgtgaagagcttcaagagattcgctcaagtattcgacggttttatagagatgtgcagcgaggatgctgcccctattgcatgaaagcaatctctacgcttgcagcagggaatgcacatattgaacacatactgccaaagtccatatttcatgacttcatatttgaacccaggaatctctgcgtcatatgcgcggattgcaatactgcaaagaacaatggaaattctataaatgacaatgaagaagacacatgcaatggaagcgctagaacttatccgcgatcagagcgacgctttaaaatagttcatcctcacattgatgaatatgacaggcacattctgcgcgcaggaatattctacattgacaagacggacaaaggacacttcaccatagggatttgcaagctaaatattgcggctcgtcggtacggacacgaagaaggggttttagatgactttgaatttttccagatgatgcagaagattcaaaatggaagtgaggcagagcagcgcgaagtttttcataccattagggcattaatccctagaccgcaaagatag

SEQ ID NO: 338623 - DNA, 1383 bp, Pseudomonas aeruginosa
atggttcacgttacagactatccatttctcgacaaatacattccacttgctgacggcaaggagcctgacaagaactgtttcacagtgctcctagggaaaaatggagttgggaaaagcagattacttgcagagctagtttccaatttctccaaatcatatagaaatggcgaatcaatatactattcaggatcgataaactccccaccatcaaaaattatagcagtatctacaagtccttttgataagttcccccccttgcgccgatacaacaatatgacagcggaatatagctatattggaatgcgttccaacagcggggcagctacaaatcaaatggcattaattttgtcagcagccaaagggctgatgaaaaaatacctagaaagcgaacagcatgaaaatcttgctgaaatatttaatctattatcactggacccgtcacttagctttatattcaaaataaacatcaaaccaaagatcgagataaaagtccctgatggcgagatggtaatgattccttttgacggaataattccggacttcttcgacgatagatcaaatacctttaaagagattttggataattcagccatacagaactatctcgatgaaaatcacgaaacacgagaaagaatcagacacgctcttgcttcaatatgggatgagcttgaaagtaaaaagggaatgtttttcacgctgagattcgactattcaagtcaatacaggacaggttttgtcagccccgaagttgtatcagccttgctactgcttcttgagtacaacattgttagactttatgacctaaagataacgaaaaaaagctgggacagggacttctttgatatgtcattgcggcgcgcgagctcaggcgagcagtgcctattggtcatggcgctcggaattgctgggcatatcagggataactcgcttattctaattgacgagcctgagatcagtctccacccatcttggcaatcaaaattcatagatttgattataaatactttcacaaaatataggtggtgtcacttcattatcgccactcattctccgcaaatagtgtctcgcctatcgcatgataattgttttatcacgactatggatgacaacaagctgcaccatgcccgggattttcacaagcgatctgctgactaccagctgactgagctttttgatgcacctggaatgatgaatgagtatgtttccagagtggcatttactttgctcgccaaagttaagtcgcaaaggtgtactcagcgggaggacaggaggaccctcaacaggctggagcagataaagcttacccttgaatttggcgacccaaacattgagttaattgattctgtattggaggtttgcgagtattatgcctctaatatctga

SEQ ID NO: 338624 - DNA, 213 bp, Pseudomonas aeruginosa
atgagctatctcgtacttcagcatcacgcgaacgagcagatcgtgctgactgcgaatccggatgtgagtgatgagtacctgattcggcagatcagggagcaggggatagcggtatgcgttacgcgtactggccccaagatcgcgagcattgcgatcagtgcgccggagtcgatgaagattctccgggcggagctgctgacgccctgggcgtga

SEQ ID NO: 338625 - DNA, 276 bp, Pseudomonas aeruginosa
atgatcaaacagcgcgtcataaccattctgtcgtggtcggatatccggctccccaagctagaggagctaaccggtatcagccgctacacgtggagcaacctgaagaacccctccaagagcagggagatcaaggaagaggaaattctcgcgatcgcgaaagtcttcccgcagttccgttggtggctattgactggtgaggtgatgccagaggtggggcaaacaagccctgactacgaagacgcgaatcgaaacttgagcaatcaagacgcgggataa

SEQ ID NO: 338626 - DNA, 2097 bp, Pseudomonas aeruginosa
atggacttcatatttggtaagaaaaagaaccctcaagctgttcaagatcttgtgaaggctctgcgagagtttgatatagatgggagtctttatattggttatcccatctttgatataaacgatgatgctctgctcactgacgcattgctggtttcgaaggagtttggggttattgcttttgatttgagcaacgccggtgaggatgatccggatgttgttgttgaatatcaggacgagctgcatagaggacttacaaagagatttttcgctgagcgggggctcgttgagaaaagaaagctgacaattgatatttgtgtgctttctttcaggcaggatgagcttgaaggtgttgagtgttgcacgcctgattcggtaattgaaaagattgaagagtgtgattcgattagcgatcagcagtataggctgattaatgctgctattcagaagacttctgttctaaagccggctaagaagcgtagcaaggtacagcgtgacgactcatatggtgctgcgattaaacatattgagaaagagatcgccaacctggatcggtggcagaagaaagcggcaattgaatctccggaaaagccgcagcgtatcagagggcttgctgggtcgggaaaaactattatccttgccatgaaggcggcttatctgcatgcttataatccgagcctggtagttgctgtaacttttcagacgcgctcactttatcagcagctagaaaagctaaccgaaaagtttcattttgaaaacacccaagaagagcctgattctgactatctacagattcgccatgcttggggaagtattcgtgagccagggatttactcagaaatatgtgctgagcttggtattgatcctctgaatttctcgcaggctatgcagaagtatggaagggataaggcttttgagggcgcgtgtcaggaggcattaatcgttgcagagcgttctagttttacgccgatatatgattatttgcttattgatgaggcgcaagactttccagtggctttctttaagctggtttataaatttgtgaaagatcctcgcaggattgtctgggcgtatgatgagttgcagaatcttggggacttcacaatgttgcctcccgaggagttgtttggcggaagtgaagatggaactccctatgttagccttgtagaggagcaggatagccctaagcaagatattatgctgcctatttgttatcggaatccaccgtggactttaactctggcgcttgggttggggttgggtatttatagggaaactggccctatccgcatgttcccggatcctaagttttggaggaatattggtttcgaagctgcttcgggtgagctgaagcttgggaagcgagtttctctgcagcgtgcggctgatcggactcctgaatattttgcgaaacttattcagcctcagcaggcgattcagcatcagacgtttggtgataagcagtctcaggccgagtggatagcgaaacaagtcaaggctaatttggattctgatgagttagaggctagcgatatcttaatcgttttccctgatgcttatactcttcagacagagtcggcgtatgtcgtgcatgagcttagaacgcttggtatcgattgtcatgttattggaaagaatagtagccaggatttggtgtttgtagatggctctgttgcgattacacatatatatcgagccaaggggaatgaggcgccgatggtatatgttgcgaatgctcattattgctatggcgggcttgattccggcaagaagcgtaatgctttgtttactgcaattactcgtactaaagcttggattcgtataactggcgttgggcagaatatgaagttgttggcggatgagatcggtaaaattcagagcgccaattatcgacttacattcacttaccccactcaggatgaattgaatcagctagataatgcctataaggataagtcctctgaggagcttcaggagatctatcaaggttttggtcaaatcaagcggattaaagcaatgtatgaggctggggagattagctttgatgatatcccggaggagcttcaggatttcttcagggtgatccgcgatgacagctga

SEQ ID NO: 338627 - DNA, 666 bp, Pseudomonas aeruginosa
atgacagctgatcagataattgcggcaattaatcagttgattttcgagtggcagaagtgtggtttggtacttgattctcggaatcatcaagcgtatcagcgagcgaatggagttgttgaggtaacctggggtaatgatggttatatattaaaagataatgaatttgcgagtctagatgagtactgttcgttattggagtcgcgtcaatattcaatgcttttaactgacggggccatgcttcaattttcatacaaaattactcgtcgtgacatcactgggcaccggctttgttggtacccatcgccgttcgatttagatgaaagtatcgatatttacaatatcgtggattatgtgctggaacgaatgtcaacgggggatacggggttctttagggggagagggccaatccgtttcgattttgcaccagagcaggcgaaagaggatcatccagttactcatttgcatttggggcatgaggagtgccggattcctgtaaagtcatcactgtctttgcggtcgtttatgggttttgttgttgagaatttttatcctggggtcaaggaaaatgtttctcttcactcggactgtgcgcattggttctctggtgacttgcttacagactctcagaggatgcggcatcatttaaatattagaaacccagcgtag

SEQ ID NO: 338628 - DNA, 687 bp, Pseudomonas aeruginosa
atgtgcggaaggctcagccagtacaccggcctgcacgagttcgtcgacgcgctgtcgatgcccaacgtcctggtcaacctcgtcggcgaacagccagagcgctacaacgttgcgccgtcaacccaggtgacgacgttgcgccttgagggcgatgccctggtcgcccaggcgatcagatggggatggaggccgttttgggcccgtgatcgcgcggcgccgatcaacgccagggtcgagaaagtggcgcatggacgcttcttcagcgcggcttggaaacaccgggcgctgacgccgatcagtggctggttcgagtgggttgacgaaggcggcacgcggaaacagccgtatcacatccagcacgccgacggctcaccaatcctctgcgccgcgattggccagttccccgggctcgaggttgagcaggccgagcagcatgggttcgtcatcatcaccgccgatagcgccggcggcatggtcgatattcacgaccggagaccagttgtgctgccgccagagttggcccgggagtggattgacccggcgacaacaccggagcgcgcggagcagatcgcgctgaaccaaggcgagccgagcgaggcgttcacctggtatccggtaagccgcgacgtggggaacgtgaggaaccaggggccgcagttgatcgagcctcagcgctcggcctcgtaa

SEQ ID NO: 338629 - DNA, 1173 bp, Pseudomonas aeruginosa
atgcgcgagtccctcggtgtttcgttaccatcccggcccctgctgctgaagctgggcctgctttccctaccctgggcgttgtgtgccgggctgcatgccgtcggcctcggcgtctggctggtcctggcgctcggttggttcgccagcctggccatgctcgtcctcctcctgcgcgcccctcggcaagcggtagcgaatgccaacccgcaggcggatgccgcttcgccggcctggagcgcggcgcaacgggcgctcgccgacgaaaccgcgcaactggacggtcacgcccggcagatcgacgaactgctgcattcggcgatccgccagctcagcgacagcttccacggcctcgccgaacgcatcgatacccagcgcggcctgtcccattcgctgatcgagcgctacgacgggcgcggccaggtcgacgaaggcatcaacctccaggacttcgtcaggaccacccagcagaccctcagcctgttcgtcgaggctaccctggaaaccagccggacctcgcagcaactggtggaacgcatggaccaggtgcggctgaagatcaccgagatcctgcagtcgacccaggacatggacgccatcgccaagcagaccaacctgctcgccctcaacgccgccatcgaggccgcccgagccggcgagagcggccgcggcttcgccgtggtcgccgatgaagtgcgcgcgctgtcgacccgctccacggagttttccgccgccatccgcaagcacgtcgacgtggtccaccacgagatccaggacgccgagagcgcgatctcgcaactggccgacaaggacatgtccttcgccctcgattccaagcacaagatccagggcatgctcgatgacctggaggcgatgaaccggcacaccctgaaggtcatccacgaactggaccggctctcgctggaagtcggccagggcgtcgacgcggcggtcaccgccctgcaattccaggacatgggcagccagttgctcggccagatgcgcaagcaccatgcgcgtcttggcgccttcgccctcggcctcggcgcgctggaggcgcggccgcgccaggaatggcccgaacgggtcgcacgggaggtcgaggaactgcgccggcccttgcccagcccggtgagccagaacagcgtcaacgtgggcgaagtggaattgttctga

SEQ ID NO: 338630 - DNA, 2526 bp, Pseudomonas aeruginosa
atgagtgcgcaagccgcctccattgattcgttgctttcgatattgttgctggcagaccatcgagtcttggagctgtcgtggagcaccccctttaacgagcctctggaatggtccaattggcgggagcctgtgtaccttgcctatcagccttgggcagcccgctatcccgatcacgtgttctcgtcggcctggcgttttttaagtgaacgtcaacctgctcatggggcgctgctcaccgcactgtctgcgcttgccattgagtttgtcgagcttcggcatggcgtaacacgtattcggcgtgacttgttcggagcctggcagcaggggctcgccagtcggctttcaaccctacctatccaagctgccgcaaaggtaagtctcggttcacctctgctaagcctgactcctacgtcctttactgaagaagagtcatctaataaaaggactgcggcatggcgaagacaagtcgtgccattgctgcaccctgaggaggctccagtagctgactacattacgcgtgagggcttgcatgaatcgcacctacatctaaatggcagtacccattccgagatttgctggctgcgcgctctacgaaacatacgggctgaaactcgggaattcgtaacaacctggaaacacgagaaaggcgtactctctgttcgtgatttaatcggccagataaacccaagattgactccacaggtatttcatcagcacctgctggccgcgagccgacttcgcacatggttggttggcgccgccactggccagattggggctggcgctcagctacccttttcatgtgaaagtatgtgcgctgccggtgaagatgattggtctgaaggactggctctgccaatgccgtcatggcgtagtgagcccgacatccaagacgagctttcctggatggaagctctcatcggccagctcatgcaacaacccagcacgcagatcagccgaatgttccatacctacttgctgctgctaaaccagtatttccgattgctcgtacaaagcgagacccagtacggattcgatcagtttcagaaactcacactgacaaagcttcgtgacccgtcagagcgagactttcgaacacgctttaattctatgcatgggctcaactcgaccataagcacaatcgggtacctagaaggtcgcttttcgcctaaagtagatctgcgaaaagctgaacacctttaccaagcagttctgggcggttaccacggctatctacgcgacaccactggcgccagtgaattgtccagcaccacacctagatccctctcacgcttactgacagagttggattctttttttgcaaggcaggctttaccacatcgcaggattcatcgtttgacacttgtcgcgcatttcatcaagcgtgactggtctcccaaagcaaatggcaaggccggcccctttagacattatccgcttgatgtagacctacgccataccgttaacgtactgcttttatcactagaccgctggccccggcttcgtacctgggtaaggggtatcgacgctgctgctaacgagcttcacgcaccaccagatgttttcgcgccggccttccgcgtttgttatcgggctggccttagtagacgcagctaccacgcaggcgaagactttcgtcacctgctatctggcattgcaaccatgtgggaggcgctagaatttctacagcttcgcgacggtgatcgtatcggtcatggtacagcgatgggtattcgcccaagcctctggctggatcgcatgccgagaaaaatatctctaccgagaggtgaatggttccaaggggtgctagctgcatggcagctgctccgcgatgagcctgagatgcagggatgcgctaaccgcctacagcgtgagctggagggcgtagcgcatgagatttttgggcgcacgctatctgctttggacattgagcgcgccatggcactacgcggtttgagtcgccttgacgtaatgcgacagctcaccagttgcggggcattccaccacgaaactttaaacgacctgtggcgagaagaaacggagcaggtcaaagtcgcatatcataaccagcggtcggcactcgaactgctatgggaatggcttagccatgaggcagtactcatccgagctcatgagttggttgcaaaggaagcacaattcttggcgccgacagactacctccgattgcaacaagctctcatgtgtcaggttgctagccggggcgtactgatcgaaaccttgccatctagcaatgttcggattagtcagtaccatcacataggcgaacaccattcattgcgctggatgcgggttccgggttttgtcgagcatggcgacccagaaatcatggtttgcctaggctcggacgatccgggcatcttcgctaacgacttagagacagagttttatctgatgtacgccacactccgacaagcgggcctgagtgactctgacgcactcaatcgactgagcacactgaacgaacgaggccgaacctatcgtttccaccatccgctcctgtcgtaa

SEQ ID NO: 338631 - DNA, 2658 bp, Pseudomonas aeruginosa
ttgaacagcgtagtacccatagtaaataacgtggaggttctcatcgacctgaatcagggagacagtgccaaggcgctagaagcccgcgagatggttcagcgtagtcactacgaccatctccaccaacaaattagtaagcatctccactcaccggacgctttgtcgctagagcaaaacttgccgacagggagcggctggactcattttatcgacggatctcggggagcaggcaaatcgactttcttgcaatcggtaaggcgagccctgaatgacgacagcgacttaagaacaaagctggcattcatcgccgtaattgaccccagtcgaattgagcaaagcgagattatcctactcgtcatgctccagcgccttagccagcgggttgaagaggttcttaaagtgatgcgtagcactgaacaggaggagcttcgtatccggtggcgcaaggcattcaagagtgtggcaggagggttgagcctattcacacaggggtatcatcctcttaacgatctagaccctgaactattcctagactggggcatggagcgcactagtgacagcaccagcctgagagagaaactccactacctttttgaaactgcgtgcaagattcttggcgttaaattgctgatgtttggctttgacgatgcagatacagatgccactcatgcgattaatctgctggagtgtattcgtaagtacctagacaccccccggctcatggtgctggtcacaggcgacatggaactctactcactactagtaaaccaacacttcgccaaaacagtcgcaggaaaacgagatgcggcttttgagcttgtgcgcgactcaaaacctggagatcgctcgggccagtatttacgtatgatcgaccaccttgaagaacagtacctgctcaagctctttccagttaaccggcgcttgcagttacagcctttatggaatatcgccaagggcaacgaaaagtgtgaagctgaatttatagattggggcaccaagaagatccctgtcgaaagattgatgcggaatatcgtgcaacgcggcctacgcattaagtccgagcctgacgtcactctatatacagagtttctactcaagcaacccttgcgctcggcgctacaaattctaagcaattgtgcaccctatctagataagaggtccatcgagaatacatcggataactggtctaaagaattaagtgaggcactcaatcgcgccctgcaagccttggcactgaccagcttctacaagcactctattaacaccgacgctctcgcagcgaaggatctagatgttttaacccaaactgtttttgatctgtcactggaagacggagacctcgacaccgcaccatacctgcgtcctatgtccgcaaggcaagacatcaaagccggttttaccgcattagcagcagaagttccctgtctttgcgcccagcagccgggaacagcacttcgctatttattgcgagcccccggcagcgtttcgctctataatctcgcgagcccacacttaatcaataaagatggcgataagggctcggagaattcgcaagcatctgtataccatttcaaatcttacatgggtattggacgccaggaagatagcctcgactgggcacggcgtgccaccgccgttattgccctgccttacagcggaggacagcaacaacgcgttgtgcttcccggcgtaatcgggatcatgaatcaaaaagggaaaaagggagagatcagcgctcagacagcgatcggacgcgcgatagcgagccaatcggttcaagcactgccagttcttgccttaggtatgatcaccgttgtgaaccagccgaactctcgtacctatgcgtccatttttactctccttggcctaatcgaaaagctactttcagctggttctaatagcacgctgaacgcaaagaccgttttttatcgggcctaccctactcttaccatctccggccccaactggatgcgaaaaggtgtcgattcaacagacgaattcaacaacgataggctacccgacgaagaagataaaaaatataaggagaaacaagaagccctttggagccaaattcaaagatggctagaaagcctaagtgatctgactccggaaaccacaccttcgggagtttttttgggaaaggtttggacacgcctgttcttcagcctccaaaacgccgccgatgatctgaggtccaacgcaacgctggacacagtgatggagatttttgcgctctgcgccatcaatgcgttttgggtcgaagaatctgaacagcacctcccggcctcatcacctaaatcagagagccgcgcaacagtagacagaaaaaatccaaaaaattcggcaggatggtttgttgacaaacttacttcttcacaactacaacggaagaatcttccttatacagccatcatggcaacctgcccgcttcttctaggtttactagacagcaagctaagctatgccgaagctctgaaaccattttttccagaaggtacacaactggatgacatccgagtattactgtgcccatctgatttaaaaaaacttatgagcaatgtatctgttacgggcaagtctcgtcgcagagcccagaactctgcaggggagacgaaaaatggtacagaggatgctgggcctggagatgacaggcaatga

SEQ ID NO: 338632 - DNA, 1092 bp, Pseudomonas aeruginosa
gtgtcttggtattccttaggaactgtttctgtagctttcaattccgaagtggtgtcgggaaaaagcactgattttgtttccaatgtacgaaccggcgatgcgttccgcggccctgacggccggtggtacgaaatcaccaatgtgaccagtgcaacggttatttctatcaaacccaattatcagggcgcgaccgctagcggccaagtttatgcggttgtcccaatacatggttattcaaaaaacttggcagaccaattccgcgacatcaacaaccagtggggagccaccctggcagggatcaaaccctgggcggtgtcctcgacgggccagcaggcgcaggccgacatgggaatctcggctgttggtcgggccctgaacaatgcttcgacgccggccaacgccttgagttacctggggggcgtcgcgcccaatcagatgggctgggctggcaacgcgatgaatacggcggacctcgattcgctgaccgtctcggggctatacgctcatggcacggcggtgccttcgccggtgaacaatgcccagggctatgtcttgcatatgcagcacggcaacccggacttcgccgtccagcagtggtaccagttgaattccgccactggccagtacatgcggatcaaggccgggggtaactggtcgcgctgggtgttgcagtacagccagttcaaccttgtcggactggcgagcttcgatgcatcgaacaatccatccggcgccatcatccagcgcggcgggactgtcggtttcaacgagtatgtacgctacgccgacggaacccagatctgctggggcaacaccactaccaatgtgggagccaccatggcctatcagccggctggtacgttgtcgttctatatcactccggttgcttactcgtgggggttcccggtctcgttctcccggcctccgtctgtcatggtcaacccgatgagagcagcaggaaacaacgcttcccgtccctggggttcgacgatgtcggtcaccgaaacgctgttttcctggtacggctatgacaccgccagcgtggccagcgggatggccgccagctatgtcgccatggggaggtggaattga

SEQ ID NO: 338633 - DNA, 222 bp, Pseudomonas aeruginosa
gtgcttgtggatcacaccaagtcaacggtccaagacgcggcagtctacgtcgttcgcctggatgaccatctctatgcaaagcgcctgcaaagacgcttcgacgggtcggtgtcgatcatcagtgaaaacaaggcctataccgaaatgatcgtcccaaaggcaaagctgtcggacctggaaatcatcggaagggttgtatgggctagccgctggatggtttag

SEQ ID NO: 338634 - DNA, 345 bp, Pseudomonas aeruginosa
atgaacatagccaccatcccgaaagacccggtgatgcgctgggagtggatcaagtaccagctgcgcatccgtggttcttccaccgctgcaatagcccgccaactgggtgttagctccagggcagttcgcgtcgcgaaagagattccctatccccgcgtagagcgtgcgctcgccgccgcgttggacctgagcccagtgaagctctggcccgaacgctggattgacgaggacaatccgaagcggcagcgtccgaatcgctcggagacgctgctggcttatgaaagttatgcaaaaaataccagatacgctcctatagcgcagcgtaaagacgaagcgagggcttga

SEQ ID NO: 338635 - DNA, 435 bp, Pseudomonas aeruginosa
atggcccgccgcaaagacgaccgcaccctggacatcttcgatgttccgcagccggcccgcgctatacctggtgagtgcaactacgccgcccaaatcagcgaactggtcagcgaaattctgaaggcttgcgaccttgaccgttacgaggtcgccgcccgcatgtcgcgcctgtccggcgatgacgtgagtaagaacatgctcgacgcctggtcgagccccgcccgaaccgatcacaacctgcctttctaccgcgccgccctcctggaggacgtctgcgcgagccatctgctgaccaactggctggtcggtgtgcgtggcggccgcgtggcttacggccgcgatgcacttctcgccgagttgggccgtcttgagcggacccgcgaggaagcgagccggcaggcgcgtgaactcaagcgacttatgggaggtatctga

SEQ ID NO: 338636 - DNA, 1089 bp, Pseudomonas aeruginosa
atgctctacggaattcaatacttgcgcggcattgccgcgctggtcgttgtcctgtttcatttcagattcgtgcttgacaacgtctatgcagagaaggccctgggctcgaacctgttcggcggtggcgcagtaggcgtcgacatatttttcatgatcagcggcttcattatcgtattcgcaacgaaaagcaaacgagccgcgaatccgctcgacttcgcagcgagacggatcttccgtatatatccgctcctaatacttacgatgatcgtcggtggcatgacggtatacgcaaagaccgatttcctaaccctagcgcgggcaacgatccccctcaaccgcgactactcgatgggcgccccgacgtttggtttcaacatacacggcccggcgtggacgctcacatacgaactgtggttctacgctgttttctgcgcagctatgtatgttagccacagatggcgtaccgcaatctgttgtgctgcgttggcgcttcagatagtcgttttacaactagcgctcgacggcgcgctatggatcaccgcgtcccgctccgttaactatgcggttgaccagccatttgcatatctcgctaggtttgcatcatccacaatgttctatgagttcatagtcggaatggtcgcggctgaacttttcatttctcggcaccagataagcaagactgccgcttcggctgtcctgctttccggcattggaatttttatcgtgttcttcacgtctcagaactcagcaggcttcggccctcagggcttcggaacgtggtccattctcctgttccttggagttgtcgcatatcagaaatcgcacgaaattcgccccaataaaacgctgcacttcctcggcgagatatcctattcgatgtatctctctcactatctgatcgtttccatgatcccgaaatacgcaaaccctctatgggttgcaacatctggcttctccagattcttcatgcttgtcttcgtgacaatagccgtatctacggtgatccattacctacttgagaagccagcaatacggcttggcaagaatataagtgacgctcttgccaagccgaaacctgcaatggcttag

SEQ ID NO: 338637 - DNA, 2079 bp, Pseudomonas aeruginosa
atgcccttccgatacaacaccatgaatgcggttgagccggatggatcgtccgacttccgtgatgcccacgacaacaccggcaaccttgacctcgcgatgaacggggcggcacttgcatggacggaccgtctcggtcgttctaaaaagtcctgggtaggcatcgaggatcaggtaaacaccttcctcgcccgatctgggttcgagttgccaccgttgcagtatgttgacggcaccccgcttgtggttgactcgcccgccaagcttatccagcgcggcgggaacctctacagcgtcaagctgccggcatcgttccccgtcgaactctccggcacctggtccgccgacgagcctctgctcgtattccgcaacgaccagtcgctgcgccaggaactcgcagggcaggacagggacgcggtgctcggctggaaacggagacagctttccgcgtcgatcgacaccatttatcaactcgcggactctattcccattcgggtctgggagttcgcggagctggtctctgacaagccgtcgcctgacccgtcgacttggaactggacgccggcattccaggctctgatcagcgctgcacaagcagccatcgcagcaactggcaaaccggtgtcggtgttcattgggccaggtaagttccagatcacatccgtccagatgttttctgacatccatgtgttctttggtggcgccgagatagttgctcacccgagctcggtcgatgcgcttcgtatattcgacgcgcgaggagagcttaacaatctcggattctatggccccggtactatcaacgggaacaaagacagtttcgatgtaaatcatcgacagcatggaattgctctggtagcggacaatgtcattgttcgagacttgacgattatcaatatcggctcaactcccgtcaccttcagtatgggtgatgcaatcattattgaaccaacaattcccgatgttgggtctggtttccaatgcaagaacattatgatcactgggtgcacattcaggaatattgagcgccagtgcattacgcttgagtcaggaataaacgtcagagttatcggaaatgccttctatgactccacatattcagcggttgatcttgagaatgcagggacaactatcggcgatatcgatggattcatttttgccaataactatgtagagaatgtgaactacggggtgacctcagtcagtgcgttgcagccgaatgcgcttcggaacgttctttgcgtaggaaatatttataagaacgtaatcgatgcctataattttagggcgtgcaccaatgtgaaggtaatcgggtgtattgcgacaggagttagccggtatggcgtattcgcttatagcgacagcaatacccaggcattcgatattgaggttcacaacttcacttgcgagggaggtacgcatgggattcgggctcagcgtgtggggagtgggcaaataacccgaatgcatgtgaagggcaacaagatcaagaatacttctgttgctgcaattgcagcagagtacactgcaggattggttgtaaataacaacgaaattctagtcaacgctggtcgtggaatctctgttacagcatgcgcttcccctgacgtgagtgacaatagggtgctcggagctgttgcgatcactggaaacgccattacgtttgatggaacaactaccaacccgatccagggaggaaacacaatcacgaatttttcggtaggtatctcttgcgttgcctctccagttacgaacatagcggagaaggctgcaaatatattcaccaacgttgctaccccttactcggcgtcggtcggaacctactggaaagggaaatttcgtggctcgttcaccatggctgctgcggcctccatgaacgttccggatgtacggataaatacggcatctgctgtgaaccttgtccctatgaattccgcagcggcatctcttgatgcaggatcgaagaagccctggggaaaccctgctgcatcctccaacaactcacagatcagaattcaaactgcggatggaggtgcagcgaccggaacagaggtttacaagtacgagataattaacgactaa

SEQ ID NO: 338638 - DNA, 333 bp, Pseudomonas aeruginosa
atgccggacatcacctggccggcacgcggatgctcagccgaccaccagcgtgcgaacgagcagaagcgcggacactgtacgccggcgcaggccgcagcgctggagcgcgcgcacgaacgctggagcgagagccgacgcttcacggtcgacggcgtgaccgggaccatcgccgagctggtggagcacttccagagcccggtccacgcaacgaccgtccgccgccgtgtcgccgccggcatgagcctgcgcgacgcactcctctccccgcgccagcagcccaagcccgggcgccggcatccctggaacagctcacagcagcaggtgcaaccatga

SEQ ID NO: 338639 - DNA, 234 bp, Pseudomonas aeruginosa
ttgatctatgtgcgaaggctggaggacagtcgctggcccctcctgcatctgcgcggcgaagctcgcttccgctatctggacggtcacggccagtggcaccgggactggccgccgagcgcgcaactggccgatacccttcccgaggcgatggcactggcggctcccgaggagcgcctgtttgtccttgtcgcggtcgcactgcccagagcgaggcccgccgaacatgatttctga

SEQ ID NO: 338640 - DNA, 1188 bp, Pseudomonas aeruginosa
atgaatttcatctaccaggccgtcgatcgcaagggcaggcgcgttcgtggcgaactctgcctccccacgcgccaggatgcgctgcggcagttgcagcgccaggggctcaccccgctcagcctggaggtgaaacgccgcaacctgggctcgcgacgtcggctcaaggccgaggaattgaacatggccatccacgagctggccaccatgctcgcggcgggagtgagcatggccgacgcggtggaggcccaggagcgaggcgcgcgccacccgaagttgatttccgccctgcaggcgatggccaatggtctgcgccagggacaatcctttcccgtagtgctggagagcgccggcctcgacttgccgcgctatgtatatcaactggtggcggccggcgagatgaccggaaacctcgcaggagctctgagggactgtgccacgcagatggaatacgaacggcgaacccgcgccgagttgcaaggggcgctgatctaccctgcgattctggtgctcagtggggtgctcgccgtggcgaccctgttcgtcttcgtcgttccgaaattcgccaatctcctgaacgagaccgcccagctcccgtggcttgcctgggcagtgctgagcatcggggtatggagcaacgagagttccggcttgctggcgttcgccgtcctgctgcttgctggcggcatcgccgtggcgctgcgcaatccggcgctccgcgcccatgcgctcgaccagttggtgcgcctgcccgtagtcggggaatggttgatgcaggcggaaatagcgcaatggtcgaaggtgcttggaaccctgctgggaaatcgtgtgccgctggtggaggccctgctgctttccgccgctggcgtccgcattgcccggcagcgccggaccctggagcgagtcacccaggatgtgcgggccggcatcgccttgtcggcagcgttggaggagcgccaggcggtcacgtccatcggttcgagcctggtgcgggttggagaggcctccgggcagctcgcggagatgctgcagagcctggcgacgctctatggagaggccgggcaggcgcgaatgaaaaaggccctggtactgatcgagcctttggcgatcctgctgatcggctctgtgttcggcctgatcattaccggcgtggtactggcgattaccagcgccaacgacatggtgctttga

SEQ ID NO: 338641 - DNA, 1329 bp, Pseudomonas aeruginosa
atgactctgcgtaagatcgcagggctaggagccctattgtccctcgctttgccgggcgtcgccctggccgccgaggagcccgtcctgaacagcggcgacaccgcctggatgctgatctccactgcgctcgtcctgctcatgaccatccccggcctggcgctgttctacggcggcatggtgcgagcgaagaacgtgctgtcgatcatgatgcagtgcttcgccatcaccggcctgatcaccattctctgggtggtctatggctacagcctggcgttcgataccgccgggatggagaagggcgtcctcaacttcaattccttcgtcggcggactggacaaggccttcctcagcggtctcaccgccgacggcctgacttccgccaccgcgctgttcccggaaagcgtgttcatcaccttccagatgaccttcgcgatcatcactccggcgctgatcgtcggcgccttcgccgagcgcatgaagttctcggcgatgctgatcttcatggcggtctggttcaccgtggtctacgcgccgatcgcgcacatggtctggagcggtgacggcgccctgatgtgggactggggcgtgctggacttcgccggcggcaccgtggtgcacatcaacgccggtatcgccggtctggtcgcctgcctggtgctgggcaagcgcaagggctacccgaccacgccgatggcgccgcacaacctcggctacaccttggtcggggcggccatgctgtggatcggctggttcggtttcaacgccggttccgccgccgccgccaacggcaccgccgggatggccatgctggtgacccagatcgccaccgccgccgcggccctggcctggatgttcgccgagtggatcacccacggcaagccgagcgccctgggcatcgcgtccggcgtggtcgccggtctggtggccatcaccccggccgccggcaccgccggtccgatgggcgcgctggtgatcggcctggcctccggggtgatctgtttcttcgccgccaccagtctcaagcgcgcgctgaaatacgacgattccctcgacgccttcggcgtacatgcggtcggcggtatcgtcggcgcgctgctcaccgggatcttcgcggcgccgtcgctgggcggcttcggcagcgtggaggacatcggcgcgcagttcttcgtgcagttcaagggcgtggccttcaccgtggtctacaccgccgtggtgaccttcgtgatcctcaaggtgctggacctggtcatgggcctgcgggtcaccgaggaagaggaagcggtcggcctcgacctggcgctgcacaacgagcgcggctacaacctgtaa

SEQ ID NO: 338642 - DNA, 225 bp, Pseudomonas aeruginosa
atggacgaggtactgaggcaaaggttgcgggctgaactactggaagtgggttttctcaaccagtgctgccttgatctcatggaaagcatggaggctgagttcagcctcactaaggaccagcgcgagtgcatcgagcagctcagccgatttctacgggagggcatcggcaagctgaccgctctgtctgaacgggtagccgatggcgatatcgtcgtcctgtgctga

SEQ ID NO: 338643 - DNA, 282 bp, Pseudomonas aeruginosa
atgaaacgagttctactgaagggccagcccttcgcggagtgggccggcacgctggacgaggccgcagccctagctggcgtccctgtcggcgacttggcgttccatcccgacgacctcctcgccgaggtccaggagctgcggcgccaggcctatcgcaccgagtccgacccgctgcgcctggaggccgagtttgacgccatcgccgctggcaccgagccggacctggcggcatgggtcgcagccgtccaggcgatcaaagagcgctatccactacctgaatag

SEQ ID NO: 338644 - DNA, 927 bp, Pseudomonas aeruginosa
gtgatcgatccggcgaatctccagctcctggacgtgagcgcgtcctatttggccgcgctggccgaggcgccgaccagcctgtcgcagagctacacactgaccgaccgcgtcggcagctctggcgcgttcgttgatcgcggaaccggggactggtgcccgaccggattactcgccgccgagctgccgctagcggccggcccgagcgtcgtcacgctgacgaacactagtcggctggaggacgtcactgtcggccaggccgctgtggtggacgacgagatagtccgggtcgatgcggtcaactatgccagtggcacagtcaccctggcgcgcggctgtgccgataccgtaccggccaaacacctggccggggctcggctctggttctacgacacgttcgaagcggtggacgagacggtctacagccagggcgtgaccctacaggccaggctgctgacgaacaccagtggcggccagctggccccggcgctggccgccactgacagcctcaccctgaccgggcgccagggtaagccgtatccgcccggtcaattccgcattaacggcagcgcgtacccaacgaaagtctacggggcgctgtcggtgagctgggcgaagcgcgaccgcatcggccaagccgaccagttgatcgataccacggtcggcaacatcggcccggaagctggggcgacggtaacgctccaggtctacagcggcacgacactgaagcgcacctacgccggcctcacatccagcagctggtcctatccgttggccgaggacatggcggatggtccgctccaggacgtgcgccttgtcctgcgcagtgtccgcgacggcatcaactcttggcagcagcacgacatcacgattgaacgccacggcctcggtttccggcttggcgatgaactaggaggggtttccgcatga

SEQ ID NO: 338645 - DNA, 1434 bp, Pseudomonas aeruginosa
atggatatgcctgcccggagtccggtcgacctcaagatcgcgcttgcgattctctacatcaacttcgccacctataactcacacaagcggatactgagttcatcgcagttgctcctgtgctggagaaaggcgccggcgggtatgttcattgatgtcctgcacgacagagtttcaggcagcagggcaaagatggtctttacgcagctcctccaacgagtggatgagctgaagttactgacagacgttgtggaggcaaaacggctactgagcgaggggtacgcgtcgacgttgtcgacgatccggcaaccgagcttcaaagccgcagtcaagctagtgatcagcgtccctgaagatatggtggagtacgaagaactaatcgcccaagacgattacagcattggagcctcgctcagcagcgaacggttacccacccactatagccgagctccggtcgatcagaaatttacgaaatacgccgtctacttcggaacggatcgcctgttggaatcgccaaggactgtgaggtttggcgggttccgcagtgatgatgtcgtgtcctatggcatcgcagaggtgtccatccctcacatccataaggaaggcaaactggaacggcccgtgttgtggccttctacctcaaaggggaaccccaacaagcatattgtcatccacgagtctgctctttttgagctggaagaatggtacaacaacgccaagacctatctcgcgaagatcagcgaaacatccactggccgtgaaggcttgctattcatccacgggtacaacgtgactttcgacgcggcattgtggcggtctgcacagctgtgccatgacctcaaattcccaggtctaatgctgtgcttttcctgggcgtcgcttggcagtacgactggctaccctgccgacgaggcgacggtagattggtcagcagcccatctgaaggagtatctgacgaacgtcacagaaaacctgggcctgacgtcgttgcacattgtcgcccacagcatgggtaatcgggctcttctcgctgtactggaaaactgggagaacaagccgggcgctaccccgatcagccagatcattcttgcggctcccgacgtcgacgccaagcgcttcaagcagtttgggcgggtgtttaacctgtacgagcaagtaacgctttatgcgtcccgcaacgatcgagctatcactgcgtctcagcttgtgcacagcaatccaagggcgggcggcgccaacccacctctggtcatggatcacctgtcgactatcgatgtctccagtgctggtagggacatgttcggcttaggccacagctatgtagccgacgtgacgaaagtgttccgggatctgttctacatcgtccggcatcggcacaaacctgaccagcgcgcaggaataacaaagaaagatgagggtcactgggagctgagctaa

SEQ ID NO: 338646 - DNA, 1140 bp, Pseudomonas aeruginosa
atgacgatgatttcgggctataagttgaaggtgggtggtttccttcaggctgacattttgcttaccagctcaaataagaggatgcgtccatcgcagattccatccttcaagcctgatgccggaagccctgcattgcgtgctcacgccgtggctggtttgtgtcaaaaaattctcgtggtgaacgatcacttcgctgtagctttcgccggggatgtgcgaacgattcaggcgattgtacggcttatcgagaggctagtagatgagcaccccgtattgacgggaaaacgtttttcggatgcagtacttgccgacgataccatcgatagtgcaaagatcagaattatcgctctaagtgttgaggggaatgaaatccacatatctaatgtttatgcggattgcgggcatcgcaatgaaaactttgagctttgggttggtgggtctggtgcgggtcatgtaaggtcgcattatcaggattacccgccacatgcgtttgatgttcttgaagaagatattgtggtgcagggtacctgcatggctctcgatcaatttgcaaaccatttaaagaatgaatttgagggtaagtataagtcggagtcgattgcgagtctgtttggaggcggttacgaggtagtggcattttatgatgggcggtttcaaaagatttctaatatcgtttatgcctttgcggatgcagaacttgatgctgagggagtgctgcaagtcgactttccaaaatgtctgattaagtccgaatataaaggtgaggacttaaaaatcaggagcgttgagttgcattttgatgaggagttcgatgaatatgtccctgttaatgaccgaaccttcacgatagcgcctgtgtcacgctatgaagagactatggttgaagatgatatcgatgacttgaggtttagggggcatttcctttgcttcttgataaattacaagactgataaaggcgccatgactataccttttatcaaaaaatacgaaaatgattttaattttttgtataaggcattcatggccagcgtgaaacctgggtttgctcaaataaactactcagatatatttcgtggtgaagtgagtgattacgtgctggggttcatggagcaagttgaagctagcttcaactctgagtaa

SEQ ID NO: 338647 - DNA, 882 bp, Pseudomonas aeruginosa
atgacccgccgccgctctcttctcaaacctggcttcttcgtcgaggacaccctctccgtcctcctaaaggaagaatccctcgatcgtcgccgtgacatctggctgtggttctacctggcactgcgcgataccgccgtctaccaccgcgagaacatcattcctgcgaccatgcgtgaccgcatggccgagagcatcgagaagttcggagtgacgacggatctcttggggggcaatcagaactacctactgatccccgagaagcacttctcctggatatcggagaacgaacgtcagctgtcttggatcaagcgcagactgccccgtgaaatggcggatgagcgaatctattcaccggcgctatctgagagagacctactgatagccacgatcgactgcgctgaatcccccccaagggaaaagacgtcattcctggcaaacctgaagcgcgcatgggacgagcagcagcaactggaccagcagttggattggattaaagaagggggcgaacgagaagcctgtcgtcacgtctgggagtggctgagtaaacacctctcgaaccaggtgttccctaacgcgtgcccagaaagccatcaaagtctgctacaagccctcgacacctttaggtggagcaccattgagagggcccattgcatcgcgacggtcaggcggctttggcgacagaaaatccgtcgcaaggacgctaaagggaagaagcagtacaacttcatcctaagcgacaaggcgatcaagcgtttggatagattctccaaagatcacgagatctctagagcccgcgtcctggaaatccttctgcagatggaggatcagaaggacctgtatctgaaggagcagattcgcgtgctgagagggatcgagctctga

SEQ ID NO: 338648 - DNA, 690 bp, Pseudomonas aeruginosa
atgtgtggcaggctttcgcagtacacgggacttcacgagttcgtcgacgcgctgtcgatgcccaacgcgctggtcaatctcatcggcgcccaggccgagcgctacaacgtcgcgccgtcgacggcggtgacgacgctcagattggaagggaacgccctggtcgcccaggcgatcagatggggatggaggccgttctgggcccgtgatcgcgcggcgccgatcaacgcccgggcggagaaggtcgcccacggcaggttcttcagcgccgcgtggcgccatcgcgcgctgacgccgatctcaggctggttcgaatgggttgatgaaggcggcagcccgcggaaacagccgtaccacatccagcacgccgacggctcgccggtcttgtgcgcagcgatcggccagttccccggcctcgatgacgaaccgggagaacagcatgggttcgtcatcatcaccgcagactctgccggcggcatggtcgacattcacgaccggagaccggtcgtgctcccacccgatctggcccgcgagtggctggacccggcgacgccgccggaacgcgcggagcagatcgtgctccaccagggtgagccgagcgagtcgttccggtggtacgcggtcagccgagacgtggggaacgtccgaaaccaaggaccgcagttgatcgagcctcagcgctcggcctcataa

SEQ ID NO: 338649 - DNA, 264 bp, Pseudomonas aeruginosa
atgctggtcattcgattcaagggctggtcggtgaaactcgaccaccaggtgggcagcgctgggaagttcggcatctggtcgttccacggttcggagagcagctacgtgccggacatggagacgattctccggcatgcagctattcggccggcggagccgaaggagggcgccgaggtcgaggtgctcatctgtgattcgcgtatgccgcaggacgaatggcgggcggtagggaccggcgtcgcggcttatgaggccgagcgctga

SEQ ID NO: 338650 - DNA, 483 bp, Pseudomonas aeruginosa
atgaccgcccctatcccggctggctgcgtagcagcgctccgccagggcggcgccctggcacacgccacccacagcacccaagccccggccgcgcagaagcgcggcggcggcatggcacgtcgcatccaactgatcgccatcgcccagggccgccaaccgatgcccgagggtggcgctataaaaagccactgctgcgcagcagcaggcatattccaacccaaccttcagcacacgccgaaggcacgcataccccacgaaaggctgcgccggggcgcgaagcacatagccacgcttcgcttaatgactcgctcgcccgcgcagcttgtcgaggggggaaagcgcccaccgaagcccaccgataacgcactgatccgcacgctgtgcgcgcagatccgcgagcagaaccaagagattgccgcgctgcgcatcgcgaacaccgacctcctccagcgcctggagaaagccgaagggggacgggcatga

SEQ ID NO: 338651 - DNA, 807 bp, Pseudomonas aeruginosa
atggaactggcgcccagcctacaaacaaagctgtcgaatttcaacaggcacttttgtttgagaggcaacaaatccttttgtagcgttcaccccatgaacacaccaactgaacgccaagctgcaattgccgccacgattcgcaagcgccgcgaagagctgaagctttcccaaagcgaggtagcgaaaggggtccgcgagctgctaggcggccaagcctttacgcaacagtcctatgctgcaattgagcaagggaaaaccaagcactctaaatacctggcagtcattgcccgagtgctaggcattccccctcagtcggtggaccccacgtttcccgccgccgcaagcatcatgccccctacaatcacagcggcagagcgggcaacagtagccggccctacagggaggaaattgccagtggtaggctccattgcagcaggcgcctgggtagaggcagtcgatttattccagccgggtgatgctgaggaatgggtagatgctccagggcctgtaggcccggatgcctttgttttgattgtcgacgggataagcatgaagaatcccaccggccccttgagtttcgaaagcggagaccgcgtggtcatcgatccatcaatcgaggcaaagccgggggatcttgtcgcagcgaagctgaccaactctaatcgcgtcacgttcaaacgccttcagatggaagatggcgagtggtatttggaagcactgaatcccgcttgggaaccccgatacattcgcgtcaacgaagaatggcagatatgtggcaaggcggtttggcgcgtacagaagctgtag

SEQ ID NO: 338652 - DNA, 984 bp, Pseudomonas aeruginosa
atgagcgtgactgatcccgaggcgctgctgttgctgccacgcctgtccatccagaacgccaacgccatttccagccccttgacctggggtttcccttcgcccggcgctttcaccggattcgtccatgccttgcagcgtcgagtcggaatctccctcgatatcgaactggacggtgtcggcatcgtctgtcaccgcttcgaagcgcagatatcgcaaccggccggcaagcgcaccaaggtcttcaacctgacccgcaatccgctgaaccgcgacggttccaccgcagccatcgtcgaagaagggcgcgcccatctggaggtcagtctgctgctcggagtgcatggcgatggtctggacgatcaccccgcacaggaaatcgccaggcaggtacaggagcaggctggcgccatgcgcctcgccggtggcagcatcctgccctggtgcaatgagcgcttcccggctccgaacgccgaactgctgatgctgggtggcagcgacgaacagcggcgcaagaaccagcgccggcttacccgccgcctgctccccggcttcgccctggtgagtcgcgaggcgttgttgcaacaacatctggaaaccttgcgcaccacgctccccgaagccaccacgctcgatgcactgctcgatctttgtcgaatcaacttcgagcctcctgcaacctcgtccgaagaagaagcatcgccgcccgatgcagcctggcaagtgcgcgacaagcccggctggctggtgccgatcccggctggctacaacgccctgtcacccctgtacctccccggcgaagtgcgaaatgcccgtgatagggaaacaccgctgcgcttcgtcgaaaacctcttcggtctgggcgaatggctcagcccccatcgcgtcgccgcgttatcggacctgctttggtatcaccacgccgagcctgacaaagggctctaccgctggagcacaccccgtttcgtcgaacacgccatcgcataa

SEQ ID NO: 338653 - DNA, 333 bp, Pseudomonas aeruginosa
atgaccggtttcggcgagatcaaccgccagttttctatggaaggggctacccatctctactcaagctccccagcaatgcttacgccggcagatctctatcgtctcaaagacaatccgacgcacaaggcagcccttttagactgcaacatctatctcatagtccgccgccaacgtatttatttgaaacccgacgggttcaccttaaatggccggattatcaccggagaatttttggtgatgcgagaacaggggatgaatgcagtccccttcgtgtatgaaattagcccatcatcagtgccggatggcataagtattcaggatgtcgcagtgtag

SEQ ID NO: 338654 - DNA, 1182 bp, Pseudomonas aeruginosa
atgtcacacgaactgttcagtcgtaatgctgacctggcccggttgcgcacggagggctacttcgttcgcattcaggggagtctcctagtcatgctggaagtgccctatgtcgacgctcaatgtcgtgtgcgcaccggcacgctggtgtccaaccttgacttggctggggaccggacgcgcaagccagagacacacgtaatccactgggacggcgacttcccctgcagcgcgaatggaacgcccttgccaggcatctcccatgcgtcgcccaacactgacctcggttacgggctcaccgcgaggcacagcttttccagtaaacccaacccggatggctacccggactactacgccaagatggctacctacgcgaccatcttggccggcccggcggccgtcctgcagcccggtatcagcccacggctgatccgtggcgctgatgatgagaatgagcccagcgtcttcaactatctcgatacagcatccagccgggtaggcctgggtgcgctagctagcaagctggaaggtgaggtggtgggcatcctcggctcaggtggtaccggtgggtacatcctcgatctggtcgcgaaaacgccggtgagggaaatccggctcttcgacgacgacgactttctttcccacaacgcgtttcgcgcgcccggggcgccatcactcgaggagttgcgggacgcccccaaaaaggtgcactacctgaagggcatctatggacggatgcatcgtgggattgtggctcaccccgtgaagatgaaaacggagacgctggggctgcttgacggcatcacgtttgcgttcatcagcatggacgcgggcgaggaaaagcgcgccgtggtggcgaagctcgaagcacttggtgtgccattcatcgacgtcgggatggggcttgaacttagcaacggtagcttgggcggcatcctacgggtgacgactagcacgccggcgaaacgcgagcatgtccacgcagggcgcatctctttcgctggtggcggaggccaggacgtgtacgcatccaatatccaggtggccgacctgaacgcgttgaatgcttgcctcgcagtagtgaagtggaaaaagcttcgcggcttctaccgcgacctagagagagagcatcacagcacgtacacaaccgatgggagcatgttgctcaacggagaccaatcatga

SEQ ID NO: 338655 - DNA, 750 bp, Pseudomonas aeruginosa
atgaaaaactctccgtttgacgacgttggtgacgcgatccgtgaggatcgtccactgcgagaggccggcgcctatcgcatccgctttggcttggaaggactgaccttccgcaatatcgacgtgcctgacccggtacccaccggccggcaaatcctggacagcgcggggctcgatcgccgaagcgactatctactctatgcacttctcgcctcgggcgattttgaggacgttcgtctcgacgagacagtggatctgcgaggcaagggtgctgagcgcttcattgcgttcaagtccgaccgcgacttcaagttctccttgaacgatcgccagatggcctggggtcacccggagctgctgggcagcgtcttgtatgacctagccgaagccccgcccgaagaggccatcttcctggaagtacggggcggcgaggacatcctcatcgagccggatgacaggatcaatctcgacaaccctggcattgagcggtttatcaccgccctaaagccgcaaaagggctacgtcatcgtggtcaatgccgtcgaggagattgtgccggacaagcatgtcaccttcgagcaggtggtcaagttgtcccatccgaacgcgccggcagagaccaacgtcaagttctcgatgacataccgcaatgctgcctcacacccccgcgctggtgaactcgctgagggtggctccgttgaagtcaaaaaacaggggacaattttcaatgtcacacgaactgttcagtcgtaa

SEQ ID NO: 338656 - DNA, 3384 bp, Pseudomonas aeruginosa
atggaccaactagaactcgctcgacagcacgcgaagcgcttgcattatgaagcagtcgaacacggcagcgatccatggtctccttatcagttcgccgaagacatagcggagaagctgggcatcacggttgaaaggtgcctccctggcgcttcaatcctggacggggcgcgcgcaacgtttgacgccgccctgccgctgattgttcatgaggacttaggaacaccgttcgagcaagcctttctcgtcgcccatgaaatcgggcacgccgtgctaggcgacggtgaggaagaggaggagtcagcgtttcaaatcgatccagcgcgaacctctgaggtcgcgccagttggcatggagcgcgtggtcgattacagccgacggcagcgccgagaagttcagatggacctcttcgcgagagagttgctgctgccacggtcgcgagtcttcgacttgcacgttgctcaaggcaagacctgctcggaaattgcaaaccggttgggcgccccctacgaggtcgtcgcacagcagatgcttgatgcgcttttgctcccccctgtgccagtagttgctgcagaagcgcctgtcgaaattccactcaacgagaagcaacaaacagcagccaaccatcgcggagccgcgttccttctccaagctggaccaggcaccgggaagacccgcacgctggtggcgcgagttgagagcttgttggatgagggggtagatccaagacgtatccttctcctgaccttctcgaacaaggccgctgcggagatgtccgagcggattgcgctgaagcggccagcggaagccgcagctctctgcattgggaccttccatagctttggactggacatcctcagacgattcaacgaccgatgtggccttccggtcgatccccgcctgatggaccgaaccgaagcagtagaactgcttgaaaacgaatttcctcggctaggcctgacccactatcgcaacctttacgacccatctcagacggctgctgaaatcctgactgcggtctcacgcgccaaggatgaggttgttgatgcggcaggctatcttgcgctggccaatgcaatggctaacgcggcgagtaacccgagcgaggtggaggctgcggagaaagcggcagaagttgccaaggtctacgctcgctatgaagagctcaaaacactcgctcagtgtgtcgactttggcgacctggttatgcgcccggttcaactactggagagcgatgaagccgttcgaaggcagttgcagagcgactatgaccacattctggtcgacgagtatcaggacgtgaaccacagtagcgttcggcttcttgcgacactgaagccgtcaggtaataacctctgggtggtgggggacgccaagcagtcgatctatcggttccgcggcgcctcttcgttcaacatggcccgcttcggttgccaagatttccctggcgcggtacgggacagcctgaaaatcaactaccgttccacccctgaagttatccatgccttttctgcttttgctgcaggtatgtccgcagcagatggagaagaggcccttgaggcggatagaggtccaagcggaaagctgcccgaaatcatcacagtggacaacgcctccctgctgacctcggccatagctgatggcattcaagagcttcgtaaatcgggctatcggtatcgggaccaggcagtcctttgccggggcaacgatcgactttcggaagtcggacgtgagctcgagcgtgccggcattccagtgcttttcctgggcagcctgtttgagcgcccggaagtaaaagacctcgtcgcggtgctgtcgctactcgtggatcggcgcgcgatggggctgatccggacggcttgctggccagaattcgccatgagcttggaggacgctgtttgtgtctttgagcatctacgaggtaccgacgcggaacctgccgcttggcgacttagcgttccagctgaactgacacctgctggtcagactgctctgtcttccctcaatgcagctcttgcaggcttcgacgcgacctcccaaccttggatcgtgctggcaacccttctgctcgaccggactagacaggcagcccgcatcgcttcttcagccagcgtctcggaccaggctcagggcatcgcaatctggcagttcatgaacttcgttcgggcgcagccgaacggccagggtctcccgatccagcggctttctgatcgcgtgaggagactgctgcgtcttcgggatgatagagacttgaggcagctacccacggcagcccagggggttgatgcggttcgcctgatgactatccatggttcgaaagggctggaatttccagcggttcacattgccggcgtcaataaggactccatccccggggcgcttcggacatcaaagtgtcccccacctgcaggcatggtcgcaggtggtcaagggagcgcagaggacattgcaagggcggcccacaacgaagagcaggagtgcttgttctacgtcgcaatgtcccgggcgaagacacgcctggcgttttacggagcgagctcaacatcgaatgggcgtgccaggccgctatcgcagttcctggatcgcattggtccagctcaacggcgcgccgtcacgcctactactgtattacctcctgccccggacgatacgcaaatacccatcgtcttctcgggaaccccgcggttcagctcagatgcggtcgcgctttacgaatcgtgtgcacggcgattcctctacacacacctgcttcaggtgggtggccggcgcggcatgagttcatttatgcatatgcatgaagcgattcgtgaggtctaccggaagatcgtcgcgcagggcagctctagtgctgagtgggaggatctactttctcaggccttcgcggctcaggggcttcatgaacatggctatttcgatgactaccgtgcggtagcctccactatgctccaatacttcctggcatcgagggctggcgcgcaggttgaagctccgaccccgctgcgaattgtgttagacggccatgagatcgaagtaacaccggatgatgtcctcgtgaaagacggaaagcgggccatacgccgggtgagaactggccatgcgcccagccgtgagagcaaggacgtcggtgcagctgcatttgtactagcggcccaggcgaagtacccgggtgccgagctggaactggtctacctagctgatgctgaaagcaagccgttgaaactcagtcccaaagagttgagcaatcgccaagaaaaattgggcgagattttccgcggcatccgaggcggccagttccgaacaaatacttcggacgccacttgcccgaactgcccggcctttttcgtgtgtggtgcaatcccccccggaaccctctcaaaacaattctga

SEQ ID NO: 338657 - DNA, 567 bp, Pseudomonas aeruginosa
atgcaccgcgaaaggctaactgagcttctactccagcgtgtttaccgtctcctgcctcgcgctgaggaggcagcctcacttatcaagacaaacatccgagatgatgtcgtcgaccatttcgttgacctactgctcagcgatcgaacgtcctatgacgaccgtttggattactacgagatcaactttaactcggccatcgccaaagaccgaaaggatgccagtgatcgccattggaagcgtgatcgccagatggaagagctgggcacagaggaggatggtgcttacaacgcccaggaggaggcaattggcggctacgatccttttgacccctgcgagctcgatgaaaaagtttaccggctacggctcgacgaagagattgatagcctgcctgaactccaacgaagaatcgtcgaaatgtggcaccaagagattcccatcgactcgcaagacccctctgtcgtgaccataagcaaagcactgggcaagagcgagaaaaccatccgtacacaccgcgacaaggcctttgcgactctgcgactgcgccttgaacgcaagggaaaactgtga

SEQ ID NO: 338658 - DNA, 804 bp, Pseudomonas aeruginosa
atggcattgaaaaatccacaggacttattttcccttgcacgtggtgacacaatttcgaaaagaaatcttttcgatctaatccagtactccaaagtaaaatcctccccatactggtcaggagaagaattcgccattggcaatacacctcagcaaggcataaattggattggaaaacctccatccgtaaaagccgtcatcatcaaaacccggccagggttatatgaaaatgacggctggaccgacgacaatagatcggtatttcactactcatttaaatctagaaatgaaaagataaatctcaaggaaaaggccaatgacgtcctgatcaaacaaccgcaacatttgtaccctatattcctgttcacagagtcaaaagaaggctggcgtttcgaaggagaattttccacctcagagattgaggaaaaattcgttgtacttcgtcaaaaagactcatcacctgtcgaaattatttcgaatcaggatgaagccctatatcaagagggcgagcaaagctacgcaagccatttaatagcagaaagaagccaggccgctgtttcggcagcaaagaatctagacacatggatttgcgaaatatgcggccttgactttaaccaaaaatatggggtcagatatatagaggcgcaccacaagatcccaatttccacttacgcaacaaatcacaccatcaaatccaaagatcttgcactcctatgccctaactgccacaaggcagtccatatttacatgaagagcaatggactcgagtacaatgagattgtgaaacttctaactttaacggactga

SEQ ID NO: 338659 - DNA, 1809 bp, Pseudomonas aeruginosa
atggagctggtcgattttcttcgtgaaacgcaggacgcaattcgggaagagcttggcaaggatctcgcgccgggtaaggttcccgtttccgcagaggagctctttaccgagcaggtgatgaaccacatggctgagcagggcatcaccttcgataccaacgtctgccattacgaggccaaagtaagtaccttcaaggtgaagatcagcggctactcggtttccgacagcacggacgagaatggtttcccggatcgactggatctcttcgtcagcctatataaggggcttgacgacatcgaggctctccccgatcaggaagtgagccgcgctgcaactcaaggcctccagttcctgagactctgcgctagaacccagctctcaaggaaactcgacgagaccaataacgtgtatgccctagtcactgaggtcgaacgaattttcggcaacctggatagtatcagggtgttcgtaattaccgacgcccgggtcaagactagggactacgcccctcaggacgttgagggaaaacaggtccgagtggaggtcatggacatccaaaggctgttcaaccacttgcagcagggacgtccccgtgacgagctggtggtcaacttccatgacctctgtggttcggccttgcctagtgtatgggttcccggctcggatgaagacgaatacgactacgcgctgacggccgtgcccggaaatgcgctacgcgcactttacgagaagtatggcccccgcatattggaggccaacgtccggtccttcctcggggtgaacagcaagggcgttaacaagggaattcgcgacacactgcgcgacacacctgagcgcttcatggcctacaacaacggtattgtggtcgtggccgatgcagcaaagctcgatcgtacccgggatggctccctcggcattctctggttgcagggcatgcagatcgtcaatggaggccagacaacagcatctctgtacttcgccaagaaaaagcagtcggaaatcaatctggacaatgtccgggttcctgcgaagatcatcgtgctgaaaagtggtaactccgatgctgaggagctgatctcgaacatttcccgctacgcaaacagccagaacgtcgtcaaacagtccgatctgtccgcgaacaaaccattccatcgcgaactcgaaaagctctcaatgcgaacctactgtcccgacggcgtcggccgttggttctacgagcgctccgcaggcagttacaaagtgatgctggaaaaggatgcagcgacagccgcccagaagaagaaactgcagtcggaaatcccacctgcccgcaagcttacaaaacccgacttggcaaaattcctgtttgcctgggaccagaaaccgcatctggtaagccttggtagccagaaaaacttccaagccttcatggacgaactcgcagagcgggaggaaaccggcgagaacgtgattccggatgccgatcagtacaaaaagatgattgccaaggcaattatcttcaagtccgcacaccgcatcattcgtccgctttttcctgccttccaggctaatatcacagcctataccgtttcaatcctggccctacgattgggggcgcgattcgacttcggatgtgtctggcaaggacaagccatatcttcacagttgcacaaacagatcgtagcgtgggcacatgaggtaagcgatgctctgcatgatggagctagcggaagaatgatctccgaatgggctaagaagcccgaatgctggcaaaaagtgaaaaaccaccactacaccgaagcattgcctggaattccagaaacggtctga

SEQ ID NO: 338660 - DNA, 1014 bp, Pseudomonas aeruginosa
atggcggtagtgagtaacagcgagatcctgagtacctggcgagctcttgccggtaatctcggtacgtcgggatggcgatccatcgacatgcttcaggccggtagctgccggataaaactggccagacattcacctggcaacgaggaagccattctggtcgggttttccagcacccgattggctccggtttcacagctgccgcaggggcagggattccggatggagcgggcctctttgggcgaggcgggtgccccgcaacaatggctggcacttgtcaggcagccgactggcagtcttgagctatttgcagcagtggtcgccgatgtagcggcactattgaacattcccggcgaacctctggaggagctgctgtatcagcgactactcggcagggtacgtggctggcaggaattcatgcgcataggccgcgagggtctgggcagggaagccgagcagggtttggcaggcgaactgtgttttcttagggaggtggtcaacgctggcgtgctgcagtactcagccgccaatgcatggaaagggcctctcgacggactgcacgatttcctgctcggatcgggtgccatagaagtgaaatccacgttggcgacggaaggttttcccgtacgtattgtctcgctggatcagcttgatgattctcaggcagcccccctgtttctggcagcactgcggctggcaacagacgacgtaggcctgaccttgcccgaacatgttgccgacattcgcaaccgcctttctgctgatcctgcggccatggcgatttttgaaagcgccctgcatgcggcagggtacctggacatgcatgcggaagcatacagccggcgcttctccgtcagcgagcttcggatccttctagtggactccgaattccccaggatgatccccttcaatgtgccagcagcggtccgctgggcccaatacgaacttgacctgtcattgctaacggctgacagcctgcaactggcagaggttcttcagaaactcggagtgatttga

SEQ ID NO: 338661 - DNA, 2835 bp, Pseudomonas aeruginosa
atgtcagaggaaaacaaatggagtgtaatcaagttcgtccaggaattgctgctggatgagcaggacaagtcggtcatcacccccgccctgatctcccagaagatcgacctggtgctgaagatcatgccgaagaaagccgatggccttgatcgtgacgccgttatcgaggaactcatccgacgtttcagcatatgggtaggagatgaggcgtcgctggtcgacacggaaggacacaccccatggttgtccatcgaacgcaagcagaactggcgatactggcggcgttatcgtgaactacaggaaaaaaagcttccctggaaagcagtcgaggccctcgacagaaccaccgacagtaccctctcgatgcttgaagaccctcttcgagaaggcgcatgggacaggcgtgggatggtggtcgggcatgtacagtcaggcaagactgccaactatacaggcctgatctgcaaggctgccgatgccggctacaagatcatcatcgtgctggcaggcctacacaacaatctgcgctcacagacgcagatgcgactggacgagggctttctcggctatgaaaccagtgccgtagtaggaacgggtcagcgcccagtaggcgtgggcctcattgatagctcgcatgatctgcggcctcagtacgtgacaaacaggacggaaaccggcgatttcaatctgagatttgtcaagaatttgggaatttccccggagaacaagccttggctgttcgttgtaaagaagaataaggcgattctggctcgactgctaagctggattcacaggcatgtagccaacaccacggatccggataccagacgcaagctggtcacccaccttcccctgctaatcatcgatgacgaggcagatcacgcttccgtagatactggcgaagaagtagttgacgcctacggtaaccccgaccctgaacacgaaccaaccgccatcaacgggctcattcgccggatattgcactcattctcgcgaaaggcctatgtgggctacaccgctacgccattcgccaacatatacatacacgaacggggcgaaacgacgcgggaaggcccggatctgtttccggctgcttttatcaccaatttggctgcgccctccaactacgttggtccgtcaagagtcttcggactggaagcagaacatgggcgagtcggagatctggatctcgtccgaatcgtgtcggaccactgctcagaggatggtaagaagggctggatgccagtcggccacaaaagcatctatatcccgccagaggagatgccggcatccctgatcgaggcgatccatgccttcgtcctcgcatgcgcctttaggcaattgaggggacagggtgcagaccactgttcgatgctcgttcacgtcacacgcttcaacctagtgcaacagcatgtacaccggcaggttgaggattatgttcttcatctcaagcattgcctcacattccgtatcaatcacgaagccactctctgcgagttgcgtcgtctctgggatagcgacttcctgacaaccagccagcgagtggcagagcaaacggctgaggatcagtatcgcgccgcgtgcaactgggaggaaatcgaagcactactacctgagattcttgatcagattgacgtgcggatgattaacggcactgccaaggacgctctggactatgcggacagcgtaacagggctcaaggtcattgctatcgggggtgacaagctcgccagggggctgaccctcgagggtctgtgcgtcagctacttcctgcgcgcctccaagatgtacgacacgcttatgcagatggggcggtggttcggataccgtccgggatatctggacctgtgtcgtctgtacaccaccgaagatctcgtcgaatggttcgagcacataacggatgcagccgaagaactgcgtgccgaattcgactacatgatcgatagcggccaggttcctcgtgactacggcctcaaggtcaagtcccatccagtattgatggttacctcaccattgaagatgagagcggccaagacactgtatctctccttcagcggagaggtagtcgaaacagtcagcttctacagggctgaggacaagctcgaatccaacctcaaggctttcagggagctcattcaggccatgggggcgccctccccaattccctcgcgccagcgcaatgctcgaaaagacagctggaatggcgccaactggaccaaggtccctgcccagcctgtaatcgagttccttcggggctaccagacccacccggactccagaaaggttcgcgggaatatgctggcggacttcatcgagaaaatgaatcagtccaaggagcttacttcttggaccgtagccgtcatcggcggcggggtcgcctcccgaacggaagatatttccggcatccaggtgcctcggatgaaacggaaaaacaagtcgctggatagcgatgacaaatactctatcggtcgcctgctttctccccaggacgaagcactggacctcgacgagagagcatggtgtgcagcgctcgaactgacccggcgcacttggaaacccgatccggcgcgagcacggaatcgggagctgcccgatattcccagtggcccgttcattcgacgtgttcgcgggctgggagccgatggaatagagcctcaccccgagcgcgggctgcttctgatttcccttctggatcccaaggactcggacctcaaggatgcccagctccctgtcgtagcctttgctatcagcttccccgccagcaacacggccaaatcggtgccctacatggccaccaacattctctgggagcagcagtatggcggtagtgagtaa

SEQ ID NO: 338662 - DNA, 249 bp, Pseudomonas aeruginosa
atgcgagtgatcgaggagaccgtaccggttcagcggatctggatagacacggcagagaacaaggacacgccctgtaccggattcgaccaggcacccaccgaagaagtctgcggaattctcaaagtcatgtatcgcaaccttgtcgaaaagaagggctactcgagcgcttccgccaaggagcaactgcgcgtaacagaacccttccacgccttccctgcgctggtggacgccctacccgacaccccttaa

SEQ ID NO: 338663 - DNA, 1653 bp, Pseudomonas aeruginosa
atgaatcgtagttatcccatccaggtcgttgatctctttgcagggcctggaggacttggagagggcttttcctcgcacacgagcggcggcgaaggaaccttcgagatcaaggtctcggccgagatggagacctctgcaagatccaccctgcgtctcagggcattctacagactcctgaagcgggagctcccggaagcgctggaggactactacaacttctgcgaaaccgcagacgtaagcgagccatacacgaacagaagccttgcactatggcgtcaggccgacagcgaggcccagttactcgaactaggtacttccgaaggcaacgcccgactggacgctctgcttgagacgcgacttgacgcttccaagccttgggtgctgatcggcggccctccgtgccaggcctattccgtggtaggacgggcaagaaatcaggccaagtcggattaccgcgcagagaatgatcacaggcatttcctctatcgggagtacctgagaatcatccagaggaaacgcccggcagtctttgtcatggagaacgtaaagggcattctctcgtcacgtgttggcggccaacaaatgttcccgaagatcctgagggatctggcagacccggatgccgcttttggagaaagaggcaacggaccgaaataccggatctgttcactcgtcgccgacgacatctatgagagcggagctgatcccgacagcatcgagcccgccaattacatcattcacgccgaaaagtatggcgtgccccaggccagacatcgagtgatcctgctgggagtctcagaggagtatctgggagccctcggggaccacaagctcacagcgtccgccggtccgagcatcgagcaggtaataggcaacctcccaccactgcgcagcaccctgacacgacaggcagactcccccgatctatggagtgacgtggtccgccaacacctcggcgagctggcccatgcctgcagagagcaggccacaaccgatgcgggcaggataatgctggccagccatctggggatcctagcaaagactttcagcagaaaggcagataacaacggcggacttcgcgtcctgaaaaagagcgaatggagtggagagaccggcacccatctcgacgagtggctaccagacgatcgactgagatactggctcaaccatgaagccagaggccatatgagctccgaccttaggcgatacgtatatgccgcagtttttgcccatgtaaggaagggctcccccaaaggacaccaagacttcgaccttcctggtctcgagcccgatcacaagaactggaaaaccgggaagttcagtgaccgattccgcgtacagagagccggcattccgtccacaaccattaccagccacatcgcaaaggacgggcactatttcatccactacgacccgactcagtgtcgcagcctgacagttcgtgaggcagcaagactacagaccttcccggacaattatttcttcctcggaaaccggacgcagcagtttcaccaagtgggcaatgccgtacctcccctgctggcgagaaagattgccgatgtagtggcaaggattatcggagggggtaaacccgttggtcagcccgcaaggctgtcggcgcgtcagttcagcatgttcgagctggagagctaa

SEQ ID NO: 338664 - DNA, 414 bp, Pseudomonas aeruginosa
atggatatcgtcgacagtgcgacgcgatcccgaatgatgtcccgcatcaggggccgggataccaaaccggaaataacggtgcggaagtttctgcatgcccgtggttatcgttttaggctgcatcgcaaggacctcccggggcgtccagacattgtgctgccacgtttcaggacctgcattttcatccatggctgcttctggcaccaccacaaaggatgcagattcgccacgttgcccaagacccgcgccgatttctgggctcagaagctgaaggataatgttgagagggaccggcgggctcaagaggaacttctccgcaaggggtggcgggtactgaccatctgggagtgcgagctgaagcatccggaggccgcgcttatagccctgcttggccagctggagagttcggaatag

SEQ ID NO: 338665 - DNA, 996 bp, Pseudomonas aeruginosa
atggaagataccgtgcaggtggtggcatctggccaggtaatagaccgcatcacgcggcctctgcagttgtcgggaaacacgctgactgttgcctatagaaagaggatctggcccgttacgaacagctgcattcacgtagatgggacgagtgagcctcctgcgacaccagaggactcccatcccgatgcttggatgcagctggttgcacgattgcttccctaccctctgccaacagaccaaggggaatgcgccgaacgactgcgcaccgatttcagagaccatcttccggatagcactgtccacgcgatttccctcctcgcctcgctggggcatgaaactgaagctcgtgagctgcttgtggactttttggaacagattcgccatcccgagcgcgttagaagactggtggatcttctattgctgttccgaagggcctctccatcctccccctcttccgccacgaatcttgaccagccggaagccgaacgtcctgcggctgtccacaaggctgagctcgatgaggatgagctgttcgcgctaacctggcagccggagcacgagagcaagattcccgcggtggatgacgtacccctgagaaccgaagcaagatccatccaggagcacattggagctcatgccatggatgaaggcggtctagtcatcgagggccttgatgtgatgccggacgagcagcactgggagctttccgctccgatctcagagccatcgaaacgctcagacagcgtggaagacaatttgctgctacagaggatcatgagcctcggcagtacggccctagatgtcctccggtacttcgcagacaacccgggggacagagccacgcacgttgagcaggtactgggatacccactgccggtcgtcaacggcctgctcagcgggaagttgagccagtacctgcagagaagcccctcgggaggctgggcctgccagagctgggtaccggctgctcttgcgactctggacagcgagtcttga

SEQ ID NO: 338666 - DNA, 1731 bp, Pseudomonas aeruginosa
atggcgattctgattcccgaacaacccaaagagtgcccctatggtgagcgcattgtttacgagcgtctcgggcgcgacctggatagcgcatgggtggtcatgcactcattaggactgcatgggcatgagaccaagatttggggtgaggctgacattgttgtgctctccaccaagggctttttcgcgcttgaagtaaagggcggcaaggtgtcttgcaaggatggtatctggcagttcggagatccctctggaaagtcctatagcaagaaggaagacccctggacgcaggcgaagggaacgatgttcgcagtgcgtgagcggctgagcgaggcagacgcgagattcaacggcttgttgatgggctttggtgtggttatgcccagtgagcgctttactacaattggcgcagaaatagagccggcagtattgctcgataaacgtgatttcaacagaaacctcggcttctacatcggacagctggaacgacactgggctcgtgtctacgagagcaaacatggccggaagccacgatcgcctagcaaggaagacatccaggcagcgcgacgtatcttgcgtccggacgtcgagtccactttcagcctggggagttacctgaccggtatcgatgccacactcgtgggacttaccaatgatcaggtacgggtgtcgcgcaggatggcagccaacccaagaacggttgtccgtggacaggcaggtaccggcaagacggtgattgcgatcgaaagggcgcgacagctggcagctcaggggaaatgcgtactgcttctgtgcttcaaccaattgctggcgaagcatttgcgtctaacccttgaaggagacccgctccgagaacagatcgacataagacatgtccacgcgctgtatcaagaggtgatcaagcgtgccggccttgaggaaagacttgctgaagcagtagatgagcgccatctgttcgccgaagtctacccgcttttgttcctcgaggctgccattgagtgtgatcttccgacctgggacgtgctgataatcgatgaagcgcaggaccttctgaccccagagaaccttgacgcattcgactacatgttgggtgggccaggcctgaacagaggctgttggcacatcttttttgatcgattgcagaatatctatgggaacgaggtgcaagagatggtcgagcgtcgactatctgaagcacagcctgcctacgacgacctgtttgaaaactgcaggaacacaaggcaagtggcggttcagggatcaattgtctccggcatcgacctagcgctgatcggcgcaccggaaggtccggagtgcgccaatgtttactaccgtgatcaaaacgactttgtttcacgcctaaacagtctggtcgcccagttgattagtcaagagctgtctcccggggacattgccattctgtcgaccagacgtagagataactcatccgtatccggcctcactgaagtcggtggactgcctttggttgatgtggcggagtcttctgttggtgacatggtgttctcgaccatgcatgcattcaagggacttgagcgtcgtgttgtgatcgcaattgacatgaccgacatcggacagccgttttcctcgatgctgcactacgccgggctctcccgcgctaggaccttgcttcacgtattcctccctgagacggcaaaagcgatctactcgaaacaggctggcagctatgcagaacgagtaattcagagccagtag

SEQ ID NO: 338667 - DNA, 1896 bp, Pseudomonas aeruginosa
atggcaaccttcaatcgaactgcgaagaaagtggctggcgcggcaacagccgctccgggaaacggcggggtggaacctgtaggacgagtccgtcgctcacagttgatatcgacctacggaattggagccattgtcgatcttgaaaagggctcgtacatgcccatgggcctggaggattgggaacgtgtaaccaggctgccgtctctctcgattggagaagatcgcctgcaggcattgctcggcgttgaccatttccgccttgcccccattgccgtggagctaaagccaacgcgtcaggtagaccccggccatgccgtgccggtcgtacgcttccccagatggcaccaatgtccgaagtgcctgcgaattggccaggagggcacgccattcgagctggctgcaaatggtagcgagctggaatgcaggggacataccaagcccgttctcaccacgcctgtgcgttttgtggttgcatgcgccaggggacacattgatgacttcccctgggaatggtgggcacatcgtcgcaccagtgtctgcgatcggcccacgcttgaactcaggtcagacggcaagtccgctgccctcgctgatctatatgtcaaatgcaaacattgcgggtccagggagtatctcggtgacgctttccgtcctgaagcaatgaagggacagaagtgccgaggaagccgcccatggctgcatgaccgtcaggatggttgcgatgctgcgccacgggtgattcagcgaggcgcatccaacgtgcacttcccggttgttgcatcggcattgtcgattccgccggcatccgaagctgcttttcagattattgctgatcagtggctttctctgggcgcgctgccagaggaggcagttattccggcattaatcagaattgccgagtctcttggtgtcgagcactctgcattgttgatcgcgtacagggaaaaacagaggctgcttgaaggcgcaactgagcgaactgagatcagctcgcggcgcgaggaatacgaagcactatccaatagccgcaacgatgctgcctttgcaggcgtaatgccacagttctgcaacagtgtggaggctgcgccggaaccactgtcgaagtggtttgacatcatcggcgccgtatctcgtttgcgcgaagtgcgcgcgctggcgggattcacacgaattgaaccctaccccgtcagtccggaaaacatgcgggacgccctgaacaggggagcgatttcaccgctttcaaagacgcctcgcaactggttgccggccgccgagatacggggtgaaggcatctttctgagattccgcacagatgcgatcgatacgtgggtcaaagccaatcccggcctggtggacagggttgcagcactggagcatcgctccgctgccattgcatttgagcgaggctatgagcgtgagcacgcgatcacggcccgattgcttctagtgcattcctttgcccacgcattgattcgcaccatctcggtagattgcggctactcatcatcctcattgcgtgaacgtctctacgtgagcgaggtagatggtgctctcggtcccatgaacggtgtcctgatctacacggggtctcccgactccgagggtagcctcggtggacttgttcgcctggctgaccctgcgcagctgactagggtggtcatgcggacaatccgatctgcacactggtgtggcagcgaccctgtgtgtctagaaacggaaccagaacaatcgggggacagggtcagtggtgcagcctgccactgttgtctgctggtccccgagacggcttgcgagaagtttaatcgcgaattggatcgcacgatgcttgttggttccgcgcctgcctcaggcactggggagtggtccggattctttgcagatggcgttctggagtaa

SEQ ID NO: 338668 - DNA, 3186 bp, Pseudomonas aeruginosa
atgtcggcaccggtcgacacctacctgactggcattctctggccacgcggaacacccattggtgccgaggctgacgatgacgacgcgaccggcgacgtcaagggcggtgatggcagcacagcttccaacaacgagcaggggatacctgggtatcgcgccattcggccctgctcgatcggcatgaccctgtccgtgaagcagggcgcaccggtagagatctcgctcggacagactgcccggtatgtgccggtcgaaatcggtgcggaacctgagccgaaagatggagtggaaccctcatcagctactggcagagcccctcgcggctgggctcgcaaggttcttgggtattcggcattgattccggctgaccaggctccgggggatcgtaccctgaatgagtttctcgatagctccggcaatacggtcagggatgtccgcctctccttgcgcatgcgactgcgccatgtgaatggacagtcagtttttacattcacactggttaatgaagagaagggaaatcatgatgtgctgcgcgacgccggctgcctcttccaagcaggcctagttgtgcgtgcagtagatggcgagctggggggaatccagcctcgcagagccgcccaggtcgaggagggggatgaagacgcactgtgtaacgccctgctgtatcgcgatacccatgaatatgcggtcgggcatggcatagccactgtctgggatgagcagcccgaacaactcgtcaaggaggtgcgtaccgcctggctgcctgctgcccgcgtccgtgggactagtcccgatgggcacgcaattctgaaagatttcgttgcgaaccagcatggtggtttaaccgcggcattcctggggcaggaacacgagcgcgccgtcgttacccatgcactgacctcgttcgtgagcagctatgcgcaatggatcgggtcattgctggtcccccgcctcacagactttaagggctcgttggccaaggctgccgctttcaatctggaacgctgtcagtcggcccaccggcgcatgcgggatggggtgacgctgctgcaacaggatgattctgcctggctggcctttgttctggcgaaccaggcaatggacaggcagtcgcgctatgcatccaagggtgaccaggcacgacctcttgtgtggcgtcccttccagctggcgttcatgctgctggtcctgcccagcctggtgaacccggaacgtgaagaccgcacttgcatggacctgctttggttcccgacaggaggcggtaaaaccgaagcctatctggccttgacggccttccagatctttcatcgtcgtcttgcaagcccagtggccaggagtcagggcggcgtcgatgttctgatgcgatacacacttcgtcttctgacagtgcaacagttccagcgtgcagccgcactcatcactgcgtgcgaattcatgcgccaacatgacggccgcttgggtaatgcacgcattagcctggggctatatgtaggcgacgacagtaccccgaatggcatggaaaaggcccgtgaggtacttgaagaagagcgcctgggtcggaaaccggtctcaactccaagacaattgcttcgttgcccagtatgtgggggcgaccttcacgcaagcgccttccggccccatccgtccgaacctcgaatcgatatcgtctgcgaggctgagggctgtgaagcgcaaggcaacccactgccgattctcacggtagacgacaccattttcgcatctccgccgtcgctgctgatcggcaccatcgacaaattcgcccagattccccgctctgcaaggatgcgccccctatttggcctggacggtggagaaccgcctggcttgatcattcaggacgaattgcatttgatatccggccccctggggtcaatggcagggctatacgagacggccatcgacatgctttgcactcgcggagatgtaaggccgaaggtgatcggttcgactgccaccatcggccaagcagctacccaggttcgcgcgctgtttgaccgcagtgtgcttcagtttcccccgcctggcttcgacgcggatgactcattcttcgcggtccgtgacacagtcggtgcagatcgactgtacatcggcctacccactgccgggcgaagccccaagtttgccttgcaggccctcgtagccgccttactgcagtcggcacacacgctggtggaacgaggaaaagcagaccagcaggcgatagatgcttactggacatgtgtagcctacttcaacagccttcgggaactgggtggcgcacatgtgctgatgcaggacgacgtgccgcgccagatggcgttcctggctgcccgcctgggtgcttcaattcgatcgttggagagccagcccgtagaactcagtagccgcaagtcttcacgtgaactgccaggcgttttgcaggccctgtccgccaccctttacgacttccatgaagcgttggcgcgaggtgatatcaaggatcagccggaagacacggtgcttgcatcaaacatgatatcggttggtgtcgatatatcccggttgggcctgatggtggtcaatgggcaacccaagtccacagcagagtacatacaggctagcagccgtgtaggacgaaacgggcctgggctggtcttcacgctttacaacttcagccgccccagagatctatcccatttcgaacacttccgcagctaccacagcgctctctatcgcagcgtggaagccaccagtgtcacaccttgggctcccagggccagggacaaggcattgcatgcgatcgtcatatcgctcgttcggcatctggtgcccggcatggaaagcgacgaggacgcactccggttcgatgccgatgctcctgaagtgcaggccttgctggatcacattctaaccagagcctcggatgctaccggtggtatcgaagaagacgacaccctggccggactgcaggcgatcatcgaccgctgggagtcgcaggtggagaacgtaaaggccgccggaggccggttgcggtactggaaaaaggcagcaccctttggtcgaacatcaccccacctgatgtgttctgccgaggaaagtacgggcggtgcagggcaggcatggccgacgccaggatcgatgcgcgaagtggagccctcctctgccttcgtgctgaagacaattcctcgcaggacaggagatcaatga

SEQ ID NO: 338669 - DNA, 1941 bp, Pseudomonas aeruginosa
atgcagttggatatagagcaaaaaaaagtcattgaagcatccactactcagtggatgttggttaacgccgggcctgggacaggcaagacccaggtttctgcccttcggctaatacacctgttgcgccaaggcttgcatccggcgcagatcctggttctgagtttttctcgcagcgcggttgccaccctgtctcgtcgcctcgacagcatgaatatgcttgatgggggcgtcgctgaagatcttcgacatctcgccattcgaacgtttgatgcttgggcatttcgcgtactgcgacagagtggggcagccccaaaaagcctgctgcagaacacctacgatgaaaacatcgcaaatgtgacaagcctgctgaacgacgaaaatgccatccaggtgcatgaacgacttagatcaatacgccatgtcatcgttgacgagttccaagacctccccggggtccggtctgaaatggtcctggctctacttcgtcgcctcaacgatggcagcggtgacccggtaggtttcacggttctgggtgatccggcgcaggccatttatcgttttgcggccagggcaaccggtaatctgccagcagaagatccatggttggagctcaagcatttcttctcagaaggtctgaaggaagtcgagttgacgcgtaaccatcgctcggtcgagcccctcgcaaaacaggtggaggaactgcgtggattgctgcgaagcagccaactggatggcaatcagaagttagaggcagtcagacaccacctggcatccctgtccgcgagcgagtcaggcaaaaagattgggcctgactggcttgtgcagcagtctcctggctcggttgcagtactgacgcgaaccaatggagaagcaatccagctggcacagatgctgatcggcaacaagcagaacacaccgccggtgcccgtcagactgcagctggccgggcaggcccatgcagtaccggcatgggtgggggccctgctgggacctctaaaggttcaaaaactgactggcacaatattcaatgcagtgtattccagcacgtccagccgtctggggactgacggtgtaacgcaactgcacctgccctctagggacacagcgtggcagcgccttctgagagccagcggcgctgctgacacggatacttccattgacatggaggccctgcgtgaacgccttgcctggccggatgcctttccagaagaccgtcaggatgcacagggaaccgctgtgtacgtcaccactattcaccaggctaagggaatggagtttgaccatgtggcgctgctcgacacgcactcttcagatgagaaggaggacgtggacgaccctgtggaggaggccaatgtcggcttcgtcggaatcacccgggccggccaaaccttaagccgcttggaagcagactgcatctggcgcccaccctatgagcgtgagatgcgagatacacgtaagcgctacgtttcctggggcgggatggtcaatatgcagtcagggctgccgggggatatcgatcccacctccttcgtatcggtgcatgtgcttggcagtgaggaggcagcgaatcgggtccagtcagagcttctacagcgaggcgagacactgcgtggccgcaaggttgagttgcgcaagaccgaggtcgagaagctcattgacgctcgatatgacatatacctactggaagatgatggaaacccgctgctgatcggccgtaccgccatgcagttgactgcagacctgctgcacctgctctggagcaggaaatacaccctcccgaacaggctcttcaatctgcggatttctgacgtggtcacggtcacggtgcctccgcgtgaatcagagtcgattactgagccctggcgaagtagtcgaatctggttgggtgtgactctggcgggaacggctgatttcaaacccttcaaacgaaaaggtgcctga

SEQ ID NO: 338670 - DNA, 1167 bp, Pseudomonas aeruginosa
gtgaaagcgacagtcaccaaggggattaatcccactgccgcccgcaaggcagccaagatcgaagcccaagccgctatcgcgaccaccattgctgaagccgagcgccaggcagcggagaacaagacagtcgccgacctctttgaggagtggatgcgtgatggtgtgtcacgccaggacggtaatgctgaactgcgccgcagcttcaccaaggacgtgttgccgctcattggcaagaagcctctgcgcaccctgactgagaaagacctgctcaacgtcctgcgctcggtcaaagcccgtggcctgaaccgtaccgtagtaatccgcagcaaggacatcggccagatgctgcgctgggccgagaaacgcaagccatggcgcaccctgatggccgaaggcaacccggccgatctggtagaggtcaacaagctgcttgaccacgattatgaggaacagcgggatcgcctactctctcctgatgaaatccgagcgttgcgcgacatcttcgccagactggagcgcgactacgacgccctccccgccggccagaaatactcaggcatccggccggtcaatccgcgcgtgcaatgcgccgtctggatctgcctgagcaccctctgccgtatcggcgagttgctcaaatccgaatggcgccatgtcgatctggaaaaaggcacctggttcatccctgccgaagctacgaaaggccacaagggcaagcgacaggaccaccacgtgtttctttcatcatttgccctggcgcaattcaagcgcctgaatgaagaaaccggatacacgcccttctgcttccctagcaaggatgagtctagtcatgtcgataccaagacagtcagcaagctgatcggcgatcggcagtgccgattcaagaaccgcagcaagccgcttgctggtcgccatcatgacgactcactggtgctaagcaacggcaccaaaggggaatggactcctcatgacttgcgccgcacaggcgcaacaatgatgcaggagctcggtatcacgctggagatcatcgatcgctgccagaaccatctgttgggcggctcaaaggtccgccggcattatctgcaccacgactatgccaaagaaaaaacagaggcgtggcgccttctgggagaacaaatagaaaaactcttacaactctccaagtga

SEQ ID NO: 338671 - DNA, 417 bp, Pseudomonas aeruginosa
gtgagctactgcacgctggccgacctgatcgagcagtacagcgagcagaaaatccgcgaggtgagtgaccgcgtcaataaaccggccacaaccatcgacactgtgatcgtggatcgcgccatcgccgacgccgactcagaaatcgacctgcatctgcacggccgataccagttgccgctcgccagcgtgccaacggcgctcaagcgcattgcctgtggcctggcctacgccaatctgcacatcgttctaaaggaagagaacccggtctacaaaacggccgagcatctgcgaaagctgctgtcgggcatcgccaacggcaagttgagtctggccctggatgctgacggcaagccggcgcccgtagccaacacggtgcagataagcgaaggccgtaacgactggggggccgactggtga

SEQ ID NO: 338672 - DNA, 474 bp, Pseudomonas aeruginosa
gtgagcgacccgttcgactacctgttcctggaaccgttgctgatcgagcgtatccgctcagaggttccgggtctggccatcgtttccggggtgcccgatctggcgaccttgagtgagcaggaccagcccgcccccagcgcctatgtcgtctatctcggcgacgagacaggcaccggagcggatcaccaaggaggccagcgggccattcagaccgtcggccagcaatgggcggttgtactggtggtgcattacgccgactcgtcgaactccggcgaaggagcgcgccgagaggcaggtccgctgctgggacggctggtcaaggcactgaccggatgggctcccgccatcgatgtggcgccgttggcgcgcagcgcccgacagtctcctgccacctacgccagcggctacctctatttccccctggtgttcaccgccaggttcgtctacccgaggatcaaatcatggaaaccgtga

SEQ ID NO: 338673 - DNA, 477 bp, Pseudomonas aeruginosa; identical to SEQ ID NO: 327661

SEQ ID NO: 338674 - DNA, 1377 bp, Pseudomonas aeruginosa; identical to SEQ ID NO: 320694

SEQ ID NO: 338675 - DNA, 162 bp, Pseudomonas aeruginosa
atgtgtcaaaacagtcacctccccacaccggtgaccgcgtacgacaagaacaccggcggggcttactggatcccgatgaaagcgtcctatgtgcagaccgccgagaaaatcacgcccggctcggtcctggccgcgatggtgatcctgctcgactaccagtga

SEQ ID NO: 338676 - DNA, 2880 bp, Pseudomonas aeruginosa
atgaccgataacctgaacctcggcgccatcgacctgggcaccgacgacgaattcatcgcccgccatatcggcccgcgtgccgccgacacccaggccatgctccagcgcctgggctacgactcgctggacgcgctgatcggcaacgtgatccccgacagcatcaagggcagcagcgtgctcgacctgccggccggcatgggcgaggccgaggcgctggccagcctgaaggcgatcgccgcgcgcaatcgcgcgttgcgttccttcattggccagggctactacaactgccacaccccggcaccgatcctgcgcaacctcctggagaacccggcctggtacaccgcctacacgccgtaccagccggaaatctcccagggccgcctggaggcgctgctgaacttccagaccctggtcagcgacctgtccggcctgccgatcgccaacgcctcgatgctcgacgaggcgaccgccgccgccgaggccatgaccttctgcaagcgtctgtcgaagaaccgcaccagccaggcattcttcgcctcccgccattgccacccgcagaccctcgacgtgctgcgcacccgtgccgagccgctgggcatcgaggtggtggtcggcgacgagagcgccatcgaagacttctccgcctacttcggcgcgttgctgcaataccccacctgcgacggcgagatcgtcgactatcgcgaactggtcagccgcttccatgcggtcgatgcgctggtcgcggtggccgccgacctgctggcgctgaccctgctgaccccgccgggcgagttcggcgccgacgtagccatcggcagcgcccagcgcttcggcgtgccgctcggcttcggcggcccgcacgcggcctatttcgccacccgcgacgccttcaagcgggacatgccgggacgcctggtcggcgtctccatcgaccgccacggcaagccggcctaccgcctggccatgcagacccgcgagcagcacatccgccgcgagaaggccaccagcaacatctgcaccgcccaggtgctgctggccaacatcgccagcatgttcgccgtctaccacggcccgcagggcctgctgcgcatcgcccggcgcacccaccggctgaccgcgatcctcgccgccggcctggagcgcctgggcgtggccgtcgagcagaagcatttcttcgacaccctgagcctggccaccggcgcgcgtaccgcggcgatccatgccaaggcccgcgccgccgggatcaacctgcgcgagatcgatgccggccgtctcggcctgtcgctcgacgagaccgtccgccaggccgacgtggaaacgctctggggcctgctggctgaagagggccaggcgctcccggacttcgccgcccttgccgccagcagcggggaccgcctgccggtcgagctgctgcgccagtcggcgatcctcagccacccgatcttcaaccgccatcactcggaaaccgagctgatgcgctacctgcgcaagctggcggacaaggacctggcgctggaccgcacgatgatcccgctgggctcctgcaccatgaagctgaacgccgccagcgagatgatcccggtgacctgggccgaattcggcaacctgcacccgttcgccccggccgagcagagcgaaggctaccgccagctcaccgacgaactggaggcgatgctctgttccgccaccggctacgacgccgtgtcgttgcagcccaacgccggctcccagggcgagtacgccggcctgctggcgatccgtgcctaccaccagagccgcggcgacagccagcgcgacatctgtctgatcccgtcctccgcccacggtaccaacccggctaccgccagcatggtcggcatgcgcgtggtggtggtggcctgcgacgcgcgcggcaacgtcgacgtcgaggacctgcgcaacaaggccagcgagcacaaggaacgcctggccgcgctgatgatcacctatccgtccacccacggcgtgttcgaggaagcgatccgcgagatctgcgccatcgtccacgactgcggtggccaggtgtacatcgacggcgccaacatgaacgccatggtcggcctgtgcgccccgggcaagttcggtggcgacgtttcccacctgaacctgcacaagaccttctgcatcccccacggcggcggcggcccgggcgtcggcccgatcggcgtgcgcgcgcacctggcgccgttcctccccggccacgctcgcggcgagcgcaaggaaggcgcggtgagcgcggcgccgtacggcagcgcgagcatcctgccgatcacctggatgtacatccgcatgatgggcggcgaaggcctcaagcgcgcctcggaaatggccatcctcaatgccaactacatcgcccatcgcctggaggagcactacccggtgctctacgccggcggcaacggcctggtcgcccacgaatgcatcctcgacctgcgtccgctcaaggacagcagcgggatcagcgtcgacgacgtggccaagcgcctgatggacttcggcttccatgcgccgaccatgtccttcccggtggccggcacgctgatgatcgagcccaccgagagcgagtcgaaggccgagctggatcgtttctgcgacgcgatgatccgcatccgcgaggaaatccgcgcggtggaacgcggcgagctggacaaggaagacaacccgctgaagaacgcgccgcacaccgccgccgaactgctcggcgaatggaaccacacctacagccgcgagcaggccgcctatccgctggccagcctggtggaggccaagtactggccgccggtgggccgcgtcgacaacgtctacggcgaccgcaacctgacctgctcctgcccgccgatcgaggcgtacagcgaggagtga

SEQ ID NO: 338677 - DNA, 630 bp, Pseudomonas aeruginosa
atgaccgtcgatacctacgtcttgtccgatcaggtcgttttgaagaacggcaacatcatgacccagccagaagtggttgccgagctgaacagccaagcccgcgccgccctggccagggtcgcggagctgcgcaatgcactgaacaacatcgtccacgctagcgagtacacgacctccgcaacgcatcaagcagaagtggagaggatcgcgttcgccgcgctaaatggggcacaaccggccgcccaggctccgcacagcgtgccgggaaatgctgccgctctgttccgtgcagccgagctgctcgccgccgcgcccggcacggaagtgccgcaagcatggctcgacgtccaggccgagcgtcgccggcagatcaccgccgagggctggacaccggaccatgacgacctctattgcgccgccgagcttccgcgagccgcagcggcgtacatcctcagcggagccaatgacgaagctccagctatctggccgttcgtggcgaagtggtggaagccccgcgacgcgcgtgccaactacgtgcgggcagccgccctgatcctggccgagatcgagcgcctggaccgtgcggcctcactgctgagccaggaggtgccgccatgcgccgagcactga

SEQ ID NO: 338678 - DNA, 219 bp, Pseudomonas aeruginosa
atgatagttacggctcagcacctgcataccgtgccgacttggaccactcggcagggctactgccatcgccaggcgagggagttcttcaagcgccatgacctcgactggatggcgttcctacgggacggcatcgaggccgacgtgctggtcgcgaccggcgacgcgctcgcgctcaaattggttgaacatgcacgccaggagatcgcgaatgggcgctaa

SEQ ID NO: 338679 - DNA, 177 bp, Pseudomonas aeruginosa
atgactcccgaatcctttgtcactttgctgatcctcgcctggctaggtctcgccggcgtcaccctgtgggctttcctgcgcgtgccgcgtcggcgcgcgcgcctgcagcgcaaggcccgccgggcgcacacgcctgctgccgaacggcccgcgcaggcgctgccacagcgcagctga

SEQ ID NO: 338680 - DNA, 318 bp, Pseudomonas aeruginosa
atgaattttttgaaactattgcccatcacggctattggattacttgcctcgggctgtaacgaggcagatacctctccattcgatgttaacctcggttcgattcagggagtccccatcatttatgtccagtccactgtcgatgacgcgatactgaacagtttcaaggtgaaccgcggcaactgtcgaggcagcatcatttatcaaatgcccgccactttcacttatggcgctgaactgaagatctatgcacacggatgtaacgtgcgggagctccacgtcgacactaataaaggctccttcacctacaccttcccctga

SEQ ID NO: 338681 - DNA, 348 bp, Pseudomonas aeruginosa
atggcaataactccacttccattcgtgcttctggcgctatctgctggcacggcttttggtgcgggcaacattggcaactgcgtctacccaaaggtcaaagtcggcgtagatagcaacctagagttcgtacgagatattcagatctaccagcacccaaatccggcgagctaccgccgcaccctcgatgcttacgcgtctttctcgattacagatgaggtgggtgattatgttcaactcaccaccatccccgactattcccaagccgacccgtaccagtcggcaggagcctccatcggctgggccaaactagcggatttcgattttcaggaatttcgcaactgcaattag

SEQ ID NO: 338682 - DNA, 186 bp, Pseudomonas aeruginosa
atgcgtgcgcggcgtcaggccatgggcctgtcgcaggaggcgcttgccgatttggctggagtggatcgctcccacatgggcaagatcgagcggggtgagcgcaacgtcaccttcctcaacatcctacgcattgctgaggcgatccattgcaaaccttcagatttgctgagtgcggcagggttgtag

SEQ ID NO: 338683 - DNA, 645 bp, Pseudomonas aeruginosa
atgaaagaaaaaagtagacttgaatgggtatcaccggataaccccgaacaatgcgagtgggcaatacactacttaatcaagaagggcgtcatccataagcaggcatttgccagccactatgaagcgctaatcaactggaataacacagccaccaaggacatcaactacgccgacctgctaatacaaatgcagcaagcttggaagcagaaaaaacaccgagatcgaaacaagcataaaaaaacctgcaacctaacattatcgatagcagccaaaagcaagcttgacaccttatcaaaaaaaagaaataaaagtatgtccacatgctttgaagaactaatcatggaagagaacagcactgaaaagaaaataaagttagcgaccaatgaactccaagagaaacactcaaaaaatatagagaaatacaagcaagccataaaggtcatcgagaaaattctcgattcagccctgctaaaccttattgaaatagagcaaaagggcagcaatgcctcacaacaagacagcgcctccaatcaacacaacagcgaaaacctgcaaatagaactaaggaaaaagagaatattattcgagtccaaattgacgtttagcgaacgccagatatatgaattcgcaaagcgcattatttga

SEQ ID NO: 338684 - DNA, 1380 bp, Pseudomonas aeruginosa
atgcacatccatatcctcgggagtgagctggctgaagccagcccggaagcaaaataccttttgactaggctgttgctgtggtttggtgttaacgcagaggtttcttggaaggttaaggtgcttgctaagaaggtaggtttgagtgatcgcctagtgactcgctcagtgaatgagttaaaaaggctcggcattctttctcgtgccgaggatgaacatggtgcgaggggaggatcaagttatcgatataaaatcaatcttgcctcagtaggtgctctttgcggtaggcgcacgaaagtttattcggtccgtcagcaacagattaaccatctcctgtgtgcttcaagcaatcgcgagtatcgattaacagcgttaaataagctgctctgggcagtactgcttctgcatgcagatagatttggggtggtgcgcgaccttgggttttctgagctgtgtcgtcttacaggctttaatcaggatcgactgaaagggcaaattgcaaagcttaattcgatgtcggccttgcgatatgtgataccgggtttaactgagcgtggaccattcggtgtgatcaaggcgaggtactacctgaaccttaatcacaaagctcttggtggtctgggtgatgttagcctgatcgttttgaatgatagtcttgacaaaaatctagctgactatagggaggctggaataattgcagaaaacgtaagtgtagccctgtctcgggtaaagcgggcgctagagaaaaatatcaaagttggttggcgcggagcgaatgctggggcgatgcctcctttctcagatttttgtgaggtggctaattatttttcccctgtctctgggagtgggtggcggcagaaacgcttggtggagttgctgcaatgtaaacttgaagaacatgcatctgccttgatctcagactatagagaggatctttcaggtgtcgatgcttctcgcgcttatattgacctgatcaggacggatctgctgcgctcggggctcacgaaggaacacccggggtttggcgagctggcggaatttatttttgagctatctctttgcgttgcacgtcggtactcccatgctttgggtatttgcttaggtgcttcgagtgaggttgtcaattttaaggggatgaggtttctgatacttcctagttttcaccataagcaggggcaggcgttagggcgggtgttgttgggagttgttgaggatgtgacaagtgcaacgcgcatctgttttttttatcgagatgcgggtggctgtgttctgacaagatgctttgatgatgagtttgaaattgaccgtctagaaaggattagggttaaccttcaaggtgcgcagacgtttccggtgcgctacggaaattttgaaagcatctga

SEQ ID NO: 338685 - DNA, 1041 bp, Pseudomonas aeruginosa
ttggtatgtcttgagcatccgcagggtaagaaaaccatgactattcctactgctaaaatccagcgatcccaatctgatgtgtgcatgctaattgataggcttgttcaagctatagcctgcactagtcagcccgccttcatcatcgctaagaccgtgtcaggggttgaggagatcaagtgtactaagctttcttggtattttgattcaatttatcagatggtgaatctgtttgttggtcagcaggattatacctacgctgagagtcttcaagtattttggcaggcttgccaagaaattggattggagtacagtccgtttggttttacatgccttaatgagggggagaatcaatacctaagctatcatgacgccatgaataaattggtaagtcacatacgccagcttttagatgtgggcccttataagaggcgcaaagatgatcgtatatatgaatccaatcagaagagagagtcgataacagcttactgcaatgaggttcttgatcaatattcgcgtaccgtcgtcgtcagagtgaatttgtactatcacaaatttgctcgtgctcgtttgcgcgtggaacacgtctttgaagacttggagcggttagctaaagagcgagggcgtaatcctattttcaattttgagatcggctatatctgcggtgttgaacagggaaaggatatggggttccacattcatgctgcatttttcttcaatggtgccaaagtccgtagtgactacgctaaagctagagagattggtgctctgtggacggaaatcaccgaaggtcgtggcttttggcatagcagtaatgatgaaaaattgagttacggtagcgatcttggggttggtacgatccggcgtgatgacgctttgctgagggctggctgcatcaaggctatgcactatctcgtaaaggatactcagccattgctcataaggcctcggaggggcagggtgctgcgaaaaggggtgaagccatctaggagcgcttctcagtcaatccattgctctgaggcacatgtagctagcttggtttga

SEQ ID NO: 338686 - DNA, 1707 bp, Pseudomonas aeruginosa
atggatttgaccctggaacagttccagaaccagcacgccagtgcccggaccctcctggacaaactgcaacgctttctggaacagggagccaagctcggcgtcccgatagatccgagcctggtcgacaagctcaagcacgtcagcgaacacctggccaccgacaagctcaagattgcactgatcggtggattctcggaaggcaagacttccattgccgccgcctggatggagcggctcgacaagtcgagcatgcgcatcagccagcaagaatcatccaatgaggtcaaggtgtacgagatcggcgacgagttcgtactgatcgacacccccggtctttttggcttcaaggaacagtacaacgccgacagtcacgcgctggagaagtacaaggacatcacccgcaagtacgtcagtgaagcccatctggtgctgtatgtaatgaactccacaaaccccatcaaggagagtcataaggccgacctgaactggttgttccgcacgctcaatctgttgccacgcacggtattcgtgctcagccgcttcgatgaagtggccgatgtggaagacgagaacagctaccaagaaaatctgcagatcaagcgcagcaatgtgcaggccaggctacgtgaagccatcgatgccaacgagcaagagcttgcgaacctgagcgtggtcgccgtcgccgcaaaccccttcgacatgggcacagagtactggctcgagcgattggatcaattcaaggttctatcgcatatcggaagcctgcagcaagccactgccgcgaagatcaaaagtagtggcggcccgacagccatcgtcgaacaagcacgcaaaagcgtcattctcgacgtactgcacaaagaattgccagttgccgtggaaaacgatcagcaactgagcgaagaggtggcacgcctcaaggatgtacagagtactctcaggcatcaactcgatggtgctaaagggcaaatttccagcgtccgcattaacctgcgcgatttcgttgtccgttatttttccggcctgaatatgcgcaccgaaggtttgaccttggaaacctttggggaattttatcagcgcgaaataggcgctgagggcgtggtcatcgcatcccgcctgcagagcgagttcgagcgccaactcaacggggtcagccaggaactcagccgcatgcgactgagcttcgattccgagataggccacttcaacagtgccgttctgaagttgggcaagcagggcgtcaactatgtggtgaagggtaatttcatcaataacaccaacattctggcagctcgtgacgggctcgtcagcgtggcgaaaacgctaggcatggacttgggcaagatgctgaaattcaagccttggggcgccgtcaatcttgccaagaacctgaatggcgtgctctccgtggccggactggccctagaggcctgggacagctatgaacgcatgaaacagcaggatgctcttgtggcagccaaagccgagatgatcaagaacttcgacgaacagcggaagggcctgctgcaacttatcgatagtgacaacttcattgaaagcttcttccccgaatatgcgtcgctgcaaacggatgcggactccgtcagcaagaccattgtcgagcaagaggggttgcgtcagcagttcaaggaatggcgcagcaatggcgaaatcatcgaagcggaattcacccacattgatggctga

SEQ ID NO: 338687 - DNA, 2202 bp, Pseudomonas aeruginosa
atgaccgcagctgaagatctccccgaaagtctctatgccaggattctcggccagatcagtgacgtaatacgggtgctcaatcaggatacccaagaggacaaactcagcggtaaacaggatgccgcccggcaacacctgcaaagtattgagcgagatctggatcaatcgatcgaggagctgcgccggaacgccgaatggaagacattcactctggcgttctacggcgaaaccaacgccggcaagtcgacgttgattgaaagcctccgcatcctactgaaggaaagcagcaagactcagcaacgtgagaaattccgcgcactgcagaaacagctgggggtcagcgaaagcaatctgcaggaactggaattgcagatcgagacgctaagcggtcaattagcgcaactcgacagcgagttttccgccacaactgaacgctacgatcaacaacagactcagctggaccagcacgctactgaactgcgtcagcgtattgagactctgaaaagcagcgctggatttatccaacgcatcctcaacctgttccgcaagcttccagaagaacaggacctgcagaagatccagcagcaagcccgccagctgctgagacaacgcgaggccgaactccaggatctgcaacaacgacgcaacgagactcagcagcaaagggaaacctacagcaaccggcatcagactgcgctcaccgatctgcaacagcttgagcccttcgaggacggcggcatcattggcgacggtcgctccgacttcacccgtgaaacccatccatataccttcgaggtcgccggccaaccttttatgatcctcgacgttcccggaatcgaaggtgatgaggtcaaggtcagtgagcagatcagcaaagcggtgaagcgtgcccacgccgtgttctatgtcaccggtaaggcagcaccacctcaaaccggcgacgaagggcggcccggcaccctggaaaaaattaaagctcacctgaatgatcagaccgaagtctggaccctgttcaacaagcgcatcaccaacccactggcactgcagaaacccatactgatcagtgacgacgagcaggcaagcctcgctgatctggacaacaagatgcgcgagcaactgggggacaactaccagcgcagcttaagcctctgcgcattgcccgcctttcttgccgcagcggactgcctgacaccccgctcaagcaaggcggctagccgcaagaagttcctcgatgccctgccgccagaccagttgctggagaagtccggcctcaagtccttctaccggcacctaacccaggatctggtcaaggactacaaggtcaagatcaagcgcgcaaacatgaacaaggtgggtgtggcaatcgaaaacgtctgcgcggtcatggatcgcttgcggcgtgatcaattccttcccctgacagacgatctgcgcaaaacagccgccaatgccaacaaacaattggacatggcactggggactttgagaagccaattgatcgacgaaggcgagcgagctattgggaaattcgaggaaaacgtccgccagaaaatctacgcccggatcgaacgcaatatcagtaatgacgatttcagaagcagcctacgcagcatcatggaagatgaacagaaggtgctgcaggcggatctgcccaagcagctcgatgaaaaagtcagccaattccagaagcagaccgcggagatcgtggagcgttatcagcagcacgccaacgacttgctaaccagttacgaaaaccttcgcaagacccggctatccagcgacttcactccgaatgtgaacatcgataacggcataaatgcctacggcctcctggctgggctcgcggggggtgccttgatgatctggaacccaatgggctgggtgctcatgacccttggcgctataacgctgctgaccggcctagccaagtcggtatggggcttcttcgacaatgactacaaaaagggtcagcaacgcaagtccgccgaggaaaatctcgataaggcctgtgatgagattcgcacctcattgcgacaaagcctggacgaggcgatccctaccctggagaaaaccatcggcgaaattcgcgaaatgctccaggcgccagtgcggcaggcccaacagatcagcaacaagctcgacagcgcccatctgcaccttaagcaattggccagcaacctcaagacagaaggaatgcactaa

SEQ ID NO: 338688 - DNA, 1077 bp, Pseudomonas aeruginosa
atgtcccaagcgaaggatacgctgctcaggctatttgccctgctgcgtctgataccaaccgcccctcagcgcatcgctactccaaccttgttggaaaagctccgcgaacgcggtttttccgtgacactgcgatcgctgcaacgcgacctgaaccgcttatcgatccccttctctctgcagtgcgatgacagcgtgactccattccgttggagctttacgcgtgatgcgccactggatttggaagatatggacgctcccaccgcactagcactgtatttgtcggaaggacatctaaacaccctactgccgcagacggtcctggaccagctaggcccgcagttccgccgtgcccgcaattttctcaatggcatcggtggaaatgggctggcggaatgggcgcatcgtgtccgtgcacttccgaacgggaaaaccctgctgcccgctgaattagctccccacgtgtgggaacaggtgtccgccggtctgctggagcgccggcaattactcgttaaatatcagagccgcagtaaaagtgccttgaagcaatttcgtctgaatcctgcaggactggtatcacggcactccatcagttatctgctggcctcggtagagggttacagcgacctccgccagttcgccttgcatcgtatcaggcaggtgcaattgctggacgagccaaccgcgccgcacaccagcttcgacgtcgatcattacatcgcgagcggcgcattcagccttcgccaagctgataccgaagtagagctgattgccgatattcacccccagatcgcctcgctgctcagcgaaacacctctgagtcaggaacaatcactgaacgacctacctggcagcgattggcagcgcttgcatgccaaggttcctctggaccgcgagacgctttggtggatcttcgggttgaacgaccacattcgtgtgcactcccctctcgtttgggctgacgagatccgtcaacggctgcaatcgatgcagaaactctaccagagcacagagtgtgggcagcccccatctggaccgcacccgcgcagcgtcgacccatacgatattgcctacgagtag

SEQ ID NO: 338689 - DNA, 213 bp, Pseudomonas aeruginosa
atgccaacccctccccctccgttcaccctcacctgcaaatattgctcttggggaaaaaccattctgccccgaagcgacgtactagtactcggccaggactggttcaccagttgccccaaatgccgcgccccgtcgcttgagcgccgccatgcgacccaaaaagaaactctcaaagctcgcctggagcagttctttacgctcagcggaagctga

SEQ ID NO: 338690 - DNA, 1581 bp, Pseudomonas aeruginosa
atgaacatgattggcttgtcgtggatggtaatcagcggcagtttgttgctggttgtgctggcgggtgttgcagtctactggcaggtattgcgccgtcgtgaagcggttacagccttgcagatctgtcagtcgcaactggagcagcacatggctgcatctcaccagaaagacgatgagctccgtgagctgagtgctggtctgcgggcggagaaggctcatgttgagcagcttcagcggcaggttgaattcgctcagcaagaagctgggcgcttgcgtaccgaatatcgcgatcaatccgctcaactggccgaggtgcagagcgctgccagcgctgcccgtgcgcaatatggccaactgcttcagcagcatgatgagctcaagcaggcgagtgtccggctgcagcaagttcacgacgttctgcaggatcgctttgcggccctgaccaaggagcacgccacgctgagcagcacgctcgatcaaaagcagcagcactttgccgaacagcagcaactgctgaaggaaagccgcgaccagctcaagctagagttcgagcagctcgctggccagatcttcgaagccaaaggccaggcgttctcgcagcacagccagcagtcactggacgcattgcttaaacccttccgcgagcagatcgagggtttccgcaccaaggttgaagatattcaccacaaggatgtccagcagcaggctgcattgacccaggagctgcatcacctgaaggagctgaatcgacagatcacccaggaggctcaggatctcactacagcgctgaaagggcagaagaaagcgcagggcaactggggcgagctgattctggagaatgtcctggagcgctccggcctggtcaatggcaaggacttcaagcgggaggtcagcttcaccggcgagatcaatcgccagcgccccgacgtgatcgtttacctgcctcaaggcaagcacctgatcatcgatgccaaggtctcgctcaacgcttacacccgttacatcaatgccgaagacgatgccgagcgtcgcatggcgcttgccgagcacgtgacggccgttgggcaacgcatcaaagagctatctgaccgcagctactttgacttgccggggctgaatgcgcccgagatggtctttatgttcgtgcccatagagtcggctttcgtcgaggcgctgaaggcggacgaaacactgttccagaaggccatcgagcagaatgtgctggtggcgacgccaaccacgctgctgaccagcctgaacatcgtgcgccagctgtggcgtttcgaggatcagaacaagcacaccgccgagttggccgagcgtgccggcaaggtatacgacaagctgcgcacctttctcggcagtatggacgccatcggccacagcctggacaaggcgcaggatgcctacaagaaagcctgcgatcagttggtcaatggcaaggctaacctggtcaagcaggtcagtgatttccgtcagttgggcgtagcggtcaaaggcgagctgagtgaggtctggggcgaccgggccgatctggaacttaacctgatcccccagatgccagctgagcagtcgatgtga

SEQ ID NO: 338691 - DNA, 1689 bp, Pseudomonas aeruginosa
atgacagcgctgctcaccgacaatctgtcgctgctggcgggtgcgcccaatggcatcaaaaagctgcgcgagctgattctggaactggcggtgcgcggcaagttggtaccgcaagatccgaaagatgagccggccaatgagctgctaaagcggattgccgaggaaaaggcccggttagttgctgaggggaaaatcaaaaagcagaaagcgctgactgaaagagatgacgaagctccagcatttgagcttccagcaggatgggcatgggctcggctatctgatgttgtgaatgtccttaatggtcgggcctacaagaaagaagagctgctcgacgcaggaacgcccgttcttcgggttggtaacttgttcacatccaatcattggtactactcaaatctgacgcttgaagaggataagtactgcaatcctggcgatttgctatttgcatggtctgcctcctttggccccttcatctggcagggcgagcgctcgatttaccactaccacatctggaaactcgatttttacgccaaagatcagctcagcaagcattacctgtacaactatctgctggagcaaacacaggagatcaaggctgctggccatggagtctcaatggtccatatgaccaaagagaaaatggaaaagctggtagtgccagttccgcccctggctgaacaagaccgcatcgttgccaaagtcgaccaactgatggccctatgcgaccagctggaagcccagcaggccgatgccgacagcgcccacacccaactggtgcaggcactgcttgacagcctgacccaggcccgcgatgccggagactttgcgcaaagctggcagcgcctggccgaacacttccataccctgttcaccaccgaatccagcatcgacgacctcaagcaaaccctgctgcaactggcggtgatgggcaagctggtgccacaagatccgagcgatgagccggccagtgagctgctgaagcggattgccgaggaaaaggcgactttgattgcagaaggcaaaagcagaaagcagaagcagcttgcagagatcactgaggaagagaagctgtttgagctagcaacggggtgggagtggagccgcttgggtgagcaggtgattgaaagtggtgctggttggagtcctagttgcgaaccgaggccaagggaaggaaacgactggggggttctgaaagtcagtgccgtttcatggggtgtttaccgccccgaggaaaacaaggcgcttccagtgagcttggaagcccgacccgagcatgaggttgcagaaggcgatttcctagtttcccgtgccaacactgcggagctcgtagcacgtagtgtcgtggtggattcgacaccgagccgtttgatgctaagtgacaagatcgtacggctgcggctgacaaaactttgtgatgcccattatttaaacttagtaaacagtgccacacatgctcgccagtactatgcccgggtagcaggaggcactagtagctccatgaagaacgtttcgcgcgagcagatccttagcttgccaattgctgtacctccgctcccggaacaacatcgcatcgtcgccaaagtcgatcagctgatggcgttctgcgaccaacttaaagcccgtcttaatcaggcccgccaggtgcatgagcaactggccaatgccctggtcgagcaggccgtggcctga

SEQ ID NO: 338692 - DNA, 5127 bp, Pseudomonas aeruginosa
atgttaccaactcccctgctagaaagtgtgatctttgatcttgaagtggttccatccgataaaggaagaccagcaaagatcacgatggtcggcgctttgcgaccagggagtgatgatgctctggagttgcgggtatccagcaacccgctgcctgcgctgcaatctctagatgagttgagtgttaatgcagagtatttgatcgggcacaacatcattaagcacgacttaccgatcattcaagcgttagctccgcagctctcgctgcatgaacggcccgtaatcgatacgttacgcctttctcctctggccttcccacagaacccgtatcatcgactggttaaagactacaagctcattcgagatagccttaactcgccactctctgattgccgctcaacattagtcttggttgaggatcagttccggtctttcagtcagctaaatgatctcaatccgcaggagctcttgtgctatcaagcgctgttggcaccgggcataaagagcgatctgggcgttttcttcgcgtcgataactgggcaggccccggtggccatatccgagctcaaaacgctggtttcgcaattgctgcaagagacggatccagcccttcagcgtgacttgaaggtatgccgagcacggcttgagcaactacttgaggaggatttacagcgggaagacctgcattggccgttggcctacgcactggcctggctccgtgtatctggcggcaactcggtactggcgccctgggtgcgacatcagtttccagaggctgggcggctaatctccgagctgcgtgatgtgccgtgtgagcgagaggattgtcagtactgtcagacgactcatgacccacgccacgagctgaagcgctatttcggttttccagattttcgctatgagcagccagggaagagtcttcagcacgatatcgtgctggccggcatgcgtggccagcatgtactggccatcctggctactggcgggggcaagtcgctgtgctaccagttgccggcgctgaatcgcttccatcgtaacggcagccttaccgtcatcgtttcgccgttgcagtcgctgatgaaggatcaggtcgacgggctgctggagcgcaacgtccagtgcgccgcagctctgaatggcctgctgaccatgccggagcgcgccgaggtgctggagaagattcagatgggtgacgtcggcattttgctggtgtcccccgagcagttccgcaacaaggctttccggagagcgattcgccagcgtcaggtcggtgcctggatttttgatgaggcgcactgcctatcgaaatggggcagcgactttcggccagactacctttatgtgtcccgcttcatccgggagtacaccgctgaccaaccgctggcgcagattggctgttttaccgcgacagccaagcccgatgtgctcgcggatatccagagccatttcagggaaagcctgggcattgaattcaaggtgttccccggagggcacgagcgaaccaatctgcattttgatgtgttgccctgcaccaaggcagagaagtggtcgcgtacggatggattattgcgagagcacctggacgctcaggagggcggtgcagtcgtcttcgtttccagtcgcaagagtgccgaggagctgtccgattttctgattggccaagggtggccttgcaagcactttcatgccggtcttgagcccaacaccaaaacggatattcaggacgatttcaaggctgggcaactgagaatcatcgtagctaccaacgccttcggaatgggcgtggacaaggctgatatccgtctcgtcgtgcatgccgacataccaggttcgctggagaactatctgcaggaggcgggcagggctgggcgtgatcagggcgatgcacgctgtgtgctgttgtacgacccgcaggacatcgaaacccagttcggcatgagcgagcgctcgaagctcagcatccgcgacatccagcagatcctgcgcaagttgcgtaacgagagcaatcggcgaaagggcggcaagctggtcatcacagcgggtgaaatcctcttggacgatgacgttgaaaccaccttctccgcagatgagcgtgatgctgaaaccaaggtcgttacggcggttgcctggctggagcgcggtgattacctcaaacgtgaggaaaaccatacgcagattttcccggcacggctggatgtgagcgaggaagaggccgagaaacgtttgctgaaggccgagttgccgcaacgtcgattggaggagttcagggctattctgcgcttcctctacggcgccgatgctgatgaacgggtgaacaccgaccagttgatgcagttgaccagtctggaatcggaagagattgccagcgcactcaagcaattggaggagatggggctgctggtcaacgactcgcagataacgctgtatgtgcgccatggtgtgacgggggcttccagtcagcgcctgcaaaacaccctggagctggaaaaggcattgctgaagtgcttgccagagcaggcgccggatgccgagcagggtggttggcaggatctgaatctgccggcactgaccgctgaacttaaggcaacggcagggctggaggagctgctcccgctgcatgtgctgcggctgttgcgcagcttggcccaggatcatgatgccgatgatcagcaacgcagtagctttgaactcaggcaactcaatcgtgactacctcaaactgcgcatcaagggtggtcattcctgggcgaagatcgttggctttggtgacgtacggcgtgtattggctagcaagttcctggagctgctggtcggtaagctaccgccaggattgcgtggcgcggatctgctggtcgaaacgagcttcggcgaattgctccaagtgatcgaaagtgacctcgaactgccgcatctgattccgcagaataggcgccgcaaggtgatcgagcatgtcctgctctatttgcatcggcaggacattttgagcctcaaccacggcatgactgtcatgcgccgagccatgaccatcgaggtcaagaaggaagacaagcgcaagaccttcctcaaagaggactacttgcgactcgacgagcactaccgcgagaagcgcatccaggttcacgtgatgcgtgaatatgcagaagtggcgctgaaggagatggctgaggcattgcgcctggtgctggattacttcacggattccaagcaagcgttcatcaagcggcattttaatgggcgtgaggatgtgctcaagctggcgaccagcgaggagtcatggaagtcgatcatcgagtcgctgagcactactcagaaactgatcgtcgccgacgatgacgacatgaatcggctagtgctggccgggccgggctccggcaagacacgcgtgatcgtgcaccgcatcgcttacctgctgcgggtgcggcgagtgccagcgaccagcatcgtggcgctgacctttaaccgccatgcggcgaacgagatccgcaaacggctgctggccttggtcggggccgatgcctacggtgtcagcgtcctgacctatcacagcatggccatgcgcttgaccggcacccgtttcgagcgaggcgcgacggtcgacgagcgagccctaaagcaggtattgagcgatgctgtcgagttgttggagggtaagcgcaatgttgagggggaggacgacctccgcgagcagttactgcgcggataccgttatatcctggtcgacgaataccaggacatcgacgacctgcagtaccgtctggtaagtgctctggctgggcggcacgcggaggaagatgggcggttatgcatcatggcggtaggcgatgatgaccagaacatctatgcctggcgcgataccaacaatcgttatatcgagcgcttccgcgaggactatgaggcgtcgactagctttttggtcgataactaccgttcttccctgcgcatcattgaggcggccaaccagctcattggccagaattcggctcgtctgaaagaggccaatcctatccgtatcgacagggctcggcaggagttgcctgctggcgggctatgggaagagcatgacgagaagcggcaaggccgggtactgcgactgcggatcgacccgagcgaccgcgagcgcggcaacctgcaggctcaggcggccatggcggagttggggaggttgctggcgctcgagcagggcagctggaacggctgtgcggttctggcgcgaacgcaccgctatctgtggccaatccaggcctggtgcgagcagcaagatattccttatttcatggcagcagacaaggaaacggcgttacccattactcggcagcgcagttttgtggctgcaatcgactatctgcgagaaatcgaaggcgctttgtgcgcggctgacgcatggcagcgtttgtcgggtagcaatcaaatggtggaagccgagtggacgagtttttttcagacggcctttgaacaaatgcgaggagagttgggcgactgccaacttggcaatggtgccttgatcgactggctgtacgactacgcccgtgaattgcgccaacagccgaaggaaggcctctatcttggcaccgtgcactcggcaaaaggtctggaattccgccatgtcgtcctactggatggcggttggagcgctcaggtcgataccctggccgatgagcgacgtttgtactacgtggggatgacgcgagccgaacagaccctgacgttgtgcgagttcgctgacggcaatccattcagtcgcagcctgataagggatgttcagcagcatgagtttcaggggcgacctcttccagagttggaggtgcgctttcagcaactcacgctgaaggagatcgacattggttttgctggtcgtcaatcaccgcatgcccggatacacaaggcggttgaggcacttcgcgagggcgacccgctgacgctgaaggaagaggctggccgctatcaactgctcgacaggcaaggcaacgtggtagggcgaaccgccaagtcattccagccacagatcggcttcgatcaatgcgaagtcgctgccgtcctggtgcggtttgcagaggatggtgaggagcagtatagggatttgaacaagtgtgagcgctgggaggtggttgtgccgagggggagaggtaagtga

SEQ ID NO: 338693 - DNA, 1008 bp, Pseudomonas aeruginosa
atggagattggtgaatcgcttgtccagtcggtcatcctacaccaggttggaaatcgcctgagggaggagccgttggttttggcggatcaatgtttctcactgacggacagtatttcgaacctaatacttggcggctatttgcgcggaatcgttggtagcaagaatcaatatgtgctcacccatgaaagcgatatggcactcaacgatgtagcgcatcatacatctgcttttttctctcagaaaatttccttcgtggagctttcgaggagtttggccgcgcacttgtacgcatctgcacatcaccccaatattgcggcaggcgacctttttgttattttgtttaacaagctgaaggtggatggaaagtatagttctgcagttgggatctacaaatcagaatcaaagcagcagtacatatcagcccgtacagatggcgaaactgggaagctcgaggtctctagtggtattaatcctgatctaatcgataagggggttctgattgttgaaggactcgaaactatttatgccattgatcgtttgagtagtcgcacaaagtactggattgacgacttcctgaaagcaaagcagcttcccaatgaaagtgcaaagtctgctgtgacgattggagtgatagaaaaggttcgagaaagtattgaaagccccgttgctcggcaggaattcggtcgagaattagccgccttatgcgaagaaagagatgaagttctgagcaatgaagtcaaggaaatctcagaaaaatatgtctcccccgacgtatgggatactgagctggatcgaatcgttgagcgaaaaggcttggtgaatttcgaggaagtaagtgtgtcgaccaaaagccttggagcaaagctgaagaaggcttttagccgtatcgacctaggtaatgatattgccttaacgatcccaaataatcattcatttaagagtgtggatttcgaggtcaatggccaaacagtacaaataaaaattatgctggaggacaacaatgggtga

SEQ ID NO: 338694 - DNA, 921 bp, Pseudomonas aeruginosa
atgggtgagtcatcgaaaacctctggcgaaaacggagagaaaatcacagaagagcttctgagactgattgggtggagtaatcttctgaagggcgtcagtgttccatgcaataacaagtctcataaccgtgagcagagtcatgggaatgactttgtttttatttatgacaatccacttcatgatagtcgaactgacgttgtatatgtttcctccaaaaattcccaaaatggttatcctaaaggagatcagggggtcaggacggcgttcaagaagcacttgtccgagcttgatgaaatagtttcctgctcaaaaatcagcggtgagatttctcaaaaattgcagactttccaggggcgccggcaaaagaggcatatagggctgcttgtgtggcttcatggggataggaaaagcctcgatagagatatcaagccgtcgctgagcaatatccagctggacttgtcgtcgaactgcccgctgtatctagtggatatgtcgcgcgcctccttcatcaaagaggccattagccatttcaaggcaatcaagcagggaaaggaataccacttctactatccaaagcttgggaatgtcattgcttctgcggatgagcgttatggcgatctactgccagtcgaacttatagcctccgatcttatccctatcaggtttgtgttgggagaaaagccctccctctgcttatatgccaaacaagccttttcggaagactccttgaaaaagctttgcagtctggccttcgattttgcggatggctgggtggaggacatctttattggcctagaaagctaccaccctgcagatgataagcagacaaaagattccgtcctcatggcctatcaggagagaaaggcgaacatcaaggtgttttgctataaggaatccattctcgatcttctggagtgctaa

SEQ ID NO: 338695 - DNA, 1122 bp, Pseudomonas aeruginosa
atggaaacagctgccaagcaatttgattacgagcgtgccatgttgtggggggaccgcttgcgcatattgctaaatagtgatcacattagtcgaggtgaaatagtagaaaccttaaaagaaaaaggaatatttattggcggggctggcaagtcggaaaccgtgccgctattaagtgcctgcctacttactcccagtgagttcaagcgcctcattgagaagtcattcattcgcgagtccggtaagaagtattcatctgataaattcaaactaacctctgcggaggcgggctggaaaatcgagctgctgaataactttgagtcagtaattgatggtattaaattggaagatggtcgtgaatttgcttctgagccagccatctcagttgactctggtggggatgtgcgaattacatatgctctgcgaatgctagacttcagtgcggattttatagagcaagaaattgtttacccaggtgagattcttttgaagcaatctggtggtagcctagaaattgaggctaataaattcagaacatcgaaagatactaataagtttaatgatgcagttactggtgctattggtaagttttacaagtcaaagggtataactgcgaacgaaaagccggagtctattctttttgatgatttcacgaatagtgagcgtattcgcttcttccttcagttgacatccgtgagttccccagagttttccttcaaggaaatcggaaatttcgagattatccgtgaccaagagggcggggcgttgccgaaggaacagaggatagagtggatggaggggcacgttaataaaatacaaataaaaggcaaggacttggggagagtgtttcttctagaagagcctgcttattatcaatattattatctagtgaaaatgacagctgtttacgcctttaagtttggtgcaaatgctggtgagtgtagtgttgaatttgctttctctggcaagacatcaagggacgatgattactctagaacagccttcgatttcagcattgagcgacttccgcggctggaagaaggaagcaagaatcaggtgagaaaaaccatcatccaaaagattcaagaggcaagggatgcggctttcaagcatgtgaaaccgtag

SEQ ID NO: 338696 - DNA, 525 bp, Pseudomonas aeruginosa
atgaacgaggcagccaaaaagaacttaatgttcatatcatctgatgacttctatctactaacatacgcgacaataattatccttgactgccttaactgcaccaaggggcgagtctttaaagactacagaaaaattccattcataatagaattaataactaacaatcgaaacatactaatattagaatcctcagccacagagaagctacacaaaggcgataaagactttctttttcacagctatacaaatggtcttgcaaaaagaagcgaaacattaaaaattttattcactcttgaaaaaaagggatatatatctctccacaagggggacacagaatcactagtcaacatagccctaaacaaagaagagctaccctcgggctttctatccaaggaagtcttcaagagcgagtacatgaattgcgagaaattcaagaggacaattcagagaagcacagctattactcttgatacatttcttagcaagacatatcgggacagaggtataaaaatatgggaagtttaa

SEQ ID NO: 338697 - DNA, 747 bp, Pseudomonas aeruginosa
gtggccaggcctaagaaaactgcggatcagagctctacagtcagcgtttcattgcgcgtcgatccgtcgatcaagtacgccattgatatcgctgctcgtgtgcaaaagcggacagtcacgggggtggttgaatggtctgttgatcgtgcgctttctgaggtaaagatgccggtcgaaactcctgcgcacctggatggcaaagatcgtgaaccgatggacgttatgtcggcggtgaaagaaaacctttggtcttccaatgaagcaatcaggttcataaaactagcttcgcaatatccgtcactgctgacctttgatgagaatctaatgtgggactccattaggttgtctcctgtgttttggagatggctgccacgcataaggcaagatgctgacatgcgaaatatcaggcaggatattcttacagaatactgggatgtgtttctggataagtttaataaccccggcggcaaggttgtaatacttatgcatgaagacctagggattccttcgccgagagatattgaagagaagaagtggcagatgattgatggaaactcaagctatttagaggagcttgaaaggaaggtggatgacttgcaagataaaaatgagacccttgttttcgtagcgaaaagcatgaagcagttgctaatgaagattaatcctgaggtaggggcgctggttaaagatgaggatctagatgcgatgatcgctaacagttctttaaccaaggggcgactagagtag

SEQ ID NO: 338698 - DNA, 144 bp, Pseudomonas aeruginosa
atgaccggccacacccgctccgggatctatatcgctatcgctcaaggcgagctgaagagcttcaagtccggcaaacgccgactgattctcgtcaccgacctgcgcacctggattgaacgcctggccaaggagaatgcccgatga

SEQ ID NO: 338699 - DNA, 1035 bp, Pseudomonas aeruginosa
atggatattctacaaaaggcattggatgaggcggttcgtgagtatgcgcaagaaattgacggagatgagtcactagaactgttagagaaagttctggaaagtagctatatagagattgttaattccacgccggtcaaggtgcttgatttaataaagaaggcagctgcggatggaggtcttgaggagagaagaaatttacacaatggttttgtgaagagaaactttgtacgatggaaagaaggatttgatgctttagagattttaattgaggtctgcttggaagctggggaggccagtgctcagcggcttggatcaaatgagctaattcatggtaatcgctatgatgttctgataaggctacatgctaagggctgtttggttgcacgtgagatattttgcctacttttaaacggatttgcggatggtgcccacgcacgttggcgtgctttgcatgagctagcggttactgggatgtttctggggcgctgtgatgaagatactgttgagaagtattttttacatgagtgtgttgaatcttataagggtgcgttgatgcaccgaaagtatgagggtaggcttcagactaaaggcgttagtgatgaacagttggctgaactcaaggctcttcatgactcagtagttgaaaaatacggtcaggattttaaaaattcatatggatgggctgagagttttctaaataagaagcgtgtgaattttcttgatattgaagagtatgtagggctcgatcattggcgtccatattataagtgggccagccaaaatatacatgcaacggcaaaaacactgacttcctctcttggaatggtggaggctaaggatgaggggttactggtggggccgagtaactcgggtttgacagaccctgctcattcaatggctatttctttggttcagctcactacggttctattgagcgttaaccccaatctagatgacttagtgagcatgtctatgatcaagatattgagcgatgaggtgggggaagcttttcttcgaggtgcttgtcttgaataa

SEQ ID NO: 338700 - DNA, 315 bp, Pseudomonas aeruginosa
atgacgacaggacgcgtcgccgccgccctcacggcgctctgcctgctctgccaaccggccttcggtttcatcaaggtgtttcccgaattcgacgacgaacccggcgccgccaccttcttctgggcggccgtcaccaccgtcggcccgttcatcggcagcaccgtcagcgcacaggagtccagcgctgacgagggcgacggtgcgatccgtggcgcgtacctccaggcagccttgcaggtcctgcgccaggccccggaatacgccgggtacagcgacctgcaactggccgcggcgctcctcgcgcggcagccctga

SEQ ID NO: 338701 - DNA, 618 bp, Pseudomonas aeruginosa
atgagcgacgcagggaacccatccagtaccggccagcaacaacagttgcaacgcaaggagatcggcgcccgcctgcgggcgatccgcaagcgccacgagctgaccctcaagcaactgtcagagcgttccggcgtggccgtctctaccctgtcgaagatggaactggcccaggtctcggtgagctacgagaaactggcagccgcggcccgcgcgctggaagtcgacatcgcccagatcttccgcgccgcgccgccgccggcggacgcccccgggcaggtgaccgtggtgcacggcggtgtcgacgacgcgaccggctacaacaccggcagctacgaataccatccgctggccggcgatttcccgcgacgcagcatgaccccgctctatgcgcggatcatcgcccgcgaacggcgcgagttcgacgactacatccgtcaccctggccaggaattcgccctggtgctgtccggccgggtacgcatccagttcgagaatggcgagtcggtcagcgtcgggccacgggaaaccgcctatttcgatagcagcatcggccatatctacctggccgaaggcgaagacgcagaggccgaggtcatggtggtcatgtccgaacgctga

SEQ ID NO: 338702 - DNA, 1128 bp, Pseudomonas aeruginosa
atgcccgtgaacgaagtgcagcgttacgactatgtgatcgtcggggcggggatcgccggcgcttcgctcggctattacctggcggacgcgggccgggtgctgctgctggagcgcgaaagccagcccggctaccactcgaccgggcgttccgcggcgatgttcatggaggcctacggcactccccagatccaggctttgacccgtgccagccgggctttctatgaacggccgccggccgggttcagcgagcatccgctgctggccgagcgtggttgcctctatgtggcgactcacgaacaggcggcggaactggaggcgcgcgccggaatccccggcgtgcagcggatcgacgccgcggagaccctgcgccgcgcgccgtgtctcgatccgcggcggatcgccggcgccctctatgagcctgacgcccgcgacctcgatgtgcacgcgttgcaccagggctacctgcgcggcatgcgccagcgcggcggggagctgctgtgttcggccgagctgctggcagccgaggcttgcgccgagggctggcgcctgcgcctgggcgacggccgggagctgcagggtgcctgcctggtgaacgccgccggggcctgggccgaccaggttgccgagctctgcagcataccgccagtgggactgcagccgcgccggcggaccgccttcaccttcgagcctccggaaggtgccgacatcgccgcctggccagccgtgatcggcatcgacgaaagcttctatttcaagccggacgccgggcagttgctgggttcgccggccaacgccgatccggtgccggcgcaggatgtccagccggaggagctggatatcgccctgggcgtgcatcacatcgagcaagtcagccgcctgcgcatccgccgccccgggcacgcctgggccggattgcgctccttcgtcgccgatggcgacctggtgatcggtcgcgacccgtcgcagcccgcctttttctggctggccgcccagggcggctatggcattcagtcggccgacggtgtggcgcgcctggcccgggcgttgctgctcgaggagacgctgccggccgggttgcgcgccgaaggcgtggagcccgagcggctcggtccggcgcgtctacgctga

SEQ ID NO: 338703 - DNA, 1068 bp, Pseudomonas aeruginosa
atgaaagatgtactgaggatcgcaggggcgttcgtcggcgtgatcgtgggcgccggattcgcgtccggccaggaactgttgatgttcttcgtcaacttcggtacctggggcctggccggcgcgatgctggcggcggcgctgttcaccgtgctgggaatgctcctggccaacatgggcgcgcgcctgcgggcgagttcgcacaaggatgtggtggaagccatctgcgggcgccggctggggagggcggtggacctgatggtgacgttcttcatgtttgccgtgaccgtggtgatgctggccggcggcgccgccctgctggagcagcagttcggcatcccggcgctgtacggcgggatgctggtgagcgggctggtggcgctggtggtgtgcctggacgtgcaacgggtgattaccctgatcggcgcggtgacgccgttgctgctgctgatggccgtgctggtctcgctgtatggcctgtcttcccgcgagctgagcttcgccgaactcgaccgcgttgccgcgcagcagcgcgctggcgccagccagtggtggctgggggctatcctttacgtttcctacaatatcgtcgcaggggtaccgattctcgccatcatgggcggcgccgcccgtggcgagcgggtcgcgacctggggcggggttcttggcggtgccatgctcggcctgttgatgctggtgatgggtcttggcctgctggcgcgcctggacagcctggcgacggagccgatgccgatgcttgcgctggccggcgaggcttcgccactactgggcctgctgatggcgttgatcatcctcgggatgttgctgaacaccgccgtcggcaccctctattcgttcaccgcgcggctgttgccggcgggcacccggcgtttccgctatggctccgtcgccgccgcgctgctggccttcgtctgcagcctgctgggtttcgtcagcctggtgggcaaggtctatccgttcttcggctatctcggcttcctgctgatcgccgcggtgctgctcggcggactgcgcctgggccggctggccgcgccgccgcggccggcctga

SEQ ID NO: 338704 - DNA, 2919 bp, Pseudomonas aeruginosa
atgtcgcggacgacgcattggaaggattttcgcaagcgcgggttacgcacactggtgccgctgggcgtttcgctgtcgctgtcgccttgtgcgctggccgaaatgcggcccagcggttgggagcaggacttcatcggcgtagcggaagcacgcgggctgggattgaccggcaagggcgtggatgtcggggtgatcgacggcgggttccttcccggtcacccggctttcgtcggccaggcgatctctgcgctggccagccgagtggtcatcgacggcgacgaagtgctcgccgatcccatgcagccgctcttcgaacgcgatgagcagagcggcgaaatccgggtcgccagtcatggcgcgaatgtcagcggaatcatcgcggccaggccggaggtcattgccgatttcacctaccgtggtggcgtggcgccgaaggtcgggcttttccagacgcaaatcaggcccagcgacgaagccgatgacgaggatgccgacatagaggaggaacaagacgaagcggcgagccaggccagcctgctgcaaccgggcagcgaggaactcgtccatggcgccctgagcaccctctaccggggcgcgccgacggtacggatcatcaacaacagctacaacgacgatcctatcggcaatgacgccgccgcggtggatgccgcttatgcggcgatcgatcccgcagcgccgcatccctacctgaatgccctggccgacggcgtgcgcgacgggcgcctgctggtgttcgcggccggcaacgaaagcatcgcgcagcccggcctgctcgccaccttgccgcgcttcatgcccgagctggaaaagggtttcctcagcgtggtcgcgctggggccggaccgcgacctcaccgactattccaaccagtgcggggtgacgcaggagtggtgcctggcggcgcccggcgacatgtacgtggccacggcgagcggctcctcggccgagggtctgacctacctctatgacgacgagagcggtacttcctacgctgcgcccctggtcagcgccagcgcggcgttgctggccgagcgctttccctacatggacatggcgcaggtacgcatgactctgctgagcaccgctaccgatctcggcgagcccggggtcgacgcgcgtttcggctggggcctgctggacctggcccgggcggtgcgggggccgggccaactgttcggcgaccagcgggtgacgctggacgccgcccggggcggctggaacgccagggatgtctggagcaacgctatcagcgccggcggcgtgctcgccaagtccggcagcggcgcgctgttgctggcgggcgacaatcgtttcgccggggtcgcggtcgaggagggcgaactggccctcggcggacgcaatcgcttctccgctgccagcgaggtacgtggcgggcgcctggtggtggacggcatcctcgaaggaccgcggctgagcgtgggtcgggccggcgaattgagcggtggcggcaccgtcgccgcgccaacccggatcgacggtgtgctcgtcgccgaccgcgcgccgggcttcactcgctccctggagctgtcgccatccagcaccacccgggtggccctggaaggacagccgccgatccgtctcgacggcgcaggcgctttcgcacggttgggcgggcggctgcaactgacgacggccgataccgcggtgggggcggaacagaagctcctggcggtcgccccgggcgccacctacgtgggcggtttcgcggccctgcagcaggcgccgggcctcgccgaaaaaggtttgcgccacgacctgcgcttcaccgcggacggcatctccctcgccctggctccgctcgtcctgcccgggcaggctgggctgccgggcaacgccggacgtaccgcggcggcgctgaacgctctgcgcgaccagcccatcgccctgcgtgccggcgcctacaactcctggctgcaagccagcctgtctcgcggcgacctgggtggcttgcagcgtggcgccggcggccaggtgtacgccgacagcctggcgtacctgagccgccagcctgcacgggtggaccgcgcgatgttcggcgaactgtcccggacgcagtccggccaggcaccgcgcttgtggttccagggactcgccgccggccagcgcaaccagggacgcgcgggcgtcgccggtagccgcgagcgcagcgacgggctcgccctgggcatggtccaggcgttcggcgaacgtacccggggcggcgcgacgctggcgcagaccaagggccgggtcggcagcgccggcggcaaggtcgagctggacatcacccagctcgccgtcggcctggtacaggctttcgacagcctggagcaaggcggctacgtcagcgccatgctcggcgccggctacctggacgcggccagcagacgccacctccccggcttcgccacggccaagggcgacagcgagggctggctctaccacgccagcgtcaggaccggatatcgctggcgcaaggatgactggcgcgtcgaaccacggatcggcctgctggccacccgcacggaatggaaaggcttccgcgaaaagcacagcgaactcgcgctcgacgtcgatcgcgcagcccgaggggcgagcttcggtacattggaaatgagcgtcgcgcgcagtctgcgcctgggcgactggacggtggaaccggagctggacctgggctacgaacgcgccctgggagcgccggcaagccatggcgacgcgagactgcaaggcatcgccctgaagcaggtctcggccagccgggcgcgcgacctgttccgcgcgggcctggcgctgcatgcccgtcgcggtcctttgctgggcagtctggaattgcagggagcgaagggcgagcgggtcggcagcagcgccgtcaacctgcggttgagctacgacttctag

SEQ ID NO: 338705 - DNA, 477 bp, Pseudomonas aeruginosa
atggtaaagaatcgacgtttgttcactgctggggagcgtctgcgcggcctgcgcgaactgatgggcttgagccgccccaggttcgccgcgctggtgggaatgaaggccaagcgcctggagaacatcgagaacggcctgcagcgcatgcacgacgaggatttcgagaaggtctgcgggaccttcgaggaattcagccgctggatcgcctatgagggcccgatcgagccgcagtcgatcgcctggaagatcgccgactcggcgcaggaagccgcggtctacctggtggagcgcaacccggcgctgctggagcggcacggcatcgacatggacgcctggcgcgagcgccaccagcaggtgcgcgacgccttgcgcgcggcggaacaggccgcgcaggcggcgccggaggagccgtcgacgaagcccgcgcgacgacggaggaaaaagaacgggacgcccgccagcggcaagggcgactga

SEQ ID NO: 338706 - DNA, 501 bp, Pseudomonas aeruginosa
atggactatgtagtgaggaagcgttgcctgttccgcgccggcgagcgcatgttcggcctgcgcacgctgatgggcctgaaccggccgcagttcgccgagatcgtcggcatggatcccaagcgcctggagaatatcgagagcggccagcagcgcatgcacgaccaggacttcgagaaggtttgcgggaccttcccggagttcagcgactggatcgcctacgagggcgagatcgaaacccactcggccgcctggagggtcgccgaggccgcgcaggaggcggcggtctatctggtggagcgcaatcccgaactgctcgagttgcaggggctggacatgccgacctggcgcgagcagcaccaggaaatcctggaaaaggtacgcaagcgggagttggcgccgccggaggacgagccggtgaagcccaggcgcaagcggcaacgcaaggcgaggaaaactcccgcctcgaatgaaaaagcatccgcgtcgaacgaggaagcctga

SEQ ID NO: 338707 - DNA, 2259 bp, Pseudomonas aeruginosa
atgaagttccacaagcgcgccgcgtgcctgagcctgtttctcgtgttcgtcttcatggcgggacatgtcctaccgtcgaaggcggaaagtcccggatacccaccggcggtttccgctaccgttcctcccgtccccgaaccggggcgcgcgctcggcgccgcttcggtttcgcgggcatggcagttgtccgccgaaaccccggcacgcctccccgtcgacggcttgcgttcgcccaccccgtccagcctgatgctcggcctgctggtggcctgcctggccagcgtcgcctgcctggcctggaataccgtgttgcagctcaggctcaggcgctggcagcgcaccgaggccgatcttagcgatcgcctggcattgaagcaggcgctggtcgacgggattccctatccggtgagcatccgcacgctcgacggacgcctgctggcctgcaaccggaattacctggacagcctgcgcatgacccgcgagcaggcgcgcggcaccctgctgaccgattccgactgggtcgagggcggcaaggcccggctcatgcaccggcaatgcctggcggtggcgcggggcgggacggcgagtttcaccgacatgaccgtgcgcatcggtggccagctgctggaaatccaccactgggtcacgccctaccgggaccgccagggacgggtgctcggcctgatgaacggctggatcgacatcaccgagcgcgaacgcctggctcgccagttgcgcgaagcgatgcgccaggcggacgaggcgaaccgggccaagagcgtgttcctggcgaccatgagccacgagatccgtacgccgatgaacgcggtcatcggcatcctcgagctggtattgcagcgcctggcgcccgggcaacccgagcgcgcctcgctggaagtcgcctacgaggcggccggttccctgcagttgctgatcggcgatattctcgacgtcgccaagatcgagtcgggccacctgatcctcacgcccgaacgggttcgcctgcgcgaagtggtggagtcggtgcgccgcatgttcgaaggcctggccaggcagaaggggctgcggcttggcgtggaactgggcgacacccccgggtgtgacgtgctgatcgaccccttgcgcttcaagcaggtgctgtcgaacctggtgagcaacgcgatcaagttcaccgagcagggacaggtgacgatccgactccaggagaagaacctggacgaggggcgggcggtcgtccggctggcggtcgaggacaccggcatcggcatcgcgccggccgaccaggcgcgcctgttccagcctttcatccaggtggccaaggggcgcacggtacagggcgggaccggcctcggcctggcgatctgccgcaagctggtggacctgatggggggcgacatcgagatgcacagcgagccgggaaaggggacgctggtctcgctggacctgctgttgcgccggtgcggagcgaaaacgccggaacccggccacgagtcgctgattctttccagcgagccgccgcgccgcttgcatgtcctcatcgccgacgactatccgcccaaccgggtactgctgcgccagcagctggagttcctcggccaccgggtggaagaggcggaggatgggcaggtggcgctggaattgtggagcgacgatcatttcgacgtgctgatcaccgactgcaacatgccgcgcctgaacggctaccagttggcgcgcgacgtccgcgagcaggagcggcgcgaacgtcgggcgccgatcctgatcctcggctacaccgccgacgccgagccggacgaagtgcagcgctgtcgcgaagcgggcatggacgattgcctgttcaagccgcttggcctggaaacgctgcgcaactatctcgcggcttccttcgcccaggtcgccgcgccagcccaggggctctacgacgccagcaccctccatgcgctcggtggcgggcgtgcggagcgggtccgggaactgctggaaaccctgctcgacagcaaccggcacgatctgcaactgctcgcggcattgctcggcggggccgacagggccgggctcgccgatcacgcgcaccggatcaagggcgccgcgcggatgatcgaggcgcgcgtgctgctggaggcctgtgtggcgctggagcaggcctgccgccagggcgaaggcgatgagcgcctgcggggactcgccgagaagctccggctggccctcgaggcgttgcaggaggagctccaggagcaactggcggcgtcggtggtgtga

SEQ ID NO: 338708 - DNA, 597 bp, Pseudomonas aeruginosa
atgaaactctatgacctggatctctccggcaacgcctacaaggtccgccttttcctcgccctgatcggtcgcgaggtgagcctgctcacggtcgacatcgccaaccgcgaacacaagaccccggccttcctgcgcatgaatccccgtggccagatcccggtgctggaggatggcgacctgcaactgggcgactcccaggccatcctggtctatctggcacgccgctacgccagccccgagtggtatccgctcgaccccgccagccagggccgcatcgcccactggctcagctatgcggccaacgaggtgcagaacggtccggccagcgcgcgcctgatcgcccgcttcaacctgcccctggatggggagctggcccggcgccgggggctggaggtgctgcaactggtggatcgccacctctccgggcatcgctggctggcccagggcgagctgccgagcatcgccgacgtagcgctctatccctacctggcgctggcccccgaaggcggcctggcgctggacgactacccggcgctgaacgcctggctcgcgcgcattcgcgccctgcccggctacattccgatgcccggcctgtag

SEQ ID NO: 338709 - DNA, 468 bp, Pseudomonas aeruginosa
atgaaaaccttcgaacccgataccctgatccgcaatccggtaggccatccggtcgtcgcggcggtcgacatccccgcggccgccgcggaagtctggaacatcgtcggcaacttcgccggcttcccggtcttcatccccgcgctgtcgcacatcgagatgatcggcaacggcgtgcgctccgtgcgcaagaagctgttcaaggacggcaacgtggtcatcgaacagctcaactcgcgcgacgaccaggccatgtacatgacctggtcgctgctctataccagcctgaacatcggcaacctgtgggcttcgatgacggtggaaagcatcgctccgaaacgctccacggccacctggacgatcatcggcgaacccttccagggcgacgacctggaagggttccaggcattcctgcagggcttcgccgacggcgccatgcagaacgtcaaggcgctgttcccggccgcctga

SEQ ID NO: 338710 - DNA, 3438 bp, Pseudomonas aeruginosa
atgaaacgtctggaaatccaactactggggcacagtcgtgccctgctgcggctagcggccgagctggaggagcacgggcactcggtgaccctctccgaggttgcggcggcaacgccggacctgctgatcgacgacggcagccagccacccgccagcgactgccccgccgcgcgcctgtcgctgcgctggcgtgcgacgacgcaaggcctgcaactgctctgcctggccagcgcacccggcgccgccagccgctgcgtggcccgcggcggcacgaccgcctcggcgaccggcaacggcgccgaggaaacgcgggaagccgtggacaccctgctcgacctggtgctcccggtcatcggccagtactcccgcgacagcgagagcctgctccgcgaggctccttccgcgtccacgccggaggatctgcgcgacctgtccgaactggagcgccacgctttcggccaccgcctcaacgaaacccgctgccaggccctgctggagcaggccggcggctcgttcgtcgaacgtctctcgcaaagcctgttgcgccacgccgagcgcagcgccctgcgccatcgcggcgcgagcgtcagctacgccgccctgcacgcctacagcctggccatccaggagcgcctggacagcctgctggaaggcgcggacacggacagcccgccgatcatcggaatctcgctggaaaaggggcttgcgctgtacgccggcatactcgccgtgctcggctgcggcgcggtctatctgccgctcgacccgagccacccgcgcgaacgccgcagcgccatcctgaaaagcgcgggcgcccgcctgctgctgcacgacggttcgccgaacacctgcatcgacgagctgccgggactcgacatcagccgcctggagtatctccatcacggtgtcgatggtcgcaccggcacggcgctggcgccctgccagcagttgctgcgccggtcgcggccggcggaagcgccctgcgtcgcgatctatacctccggcaccaccgggcaacccaagggcgtgctcctgggcatcggcaacctcagccatttctgcgcctggtacgccgcgcacgtcgaggtcgacgaggacgcgcgggtcctgcagttctccacgatcagcttcgatgcctcgatgctcgacctgttcccgaccctgatccagggcgccgagctggtggttcccgacgaagacgaccgccgcgatccgcaaaggctcgccaacctgatcggcgaacagcacgtcagccatgcgttcctcccgccggcattgctgagcatcatgccgctggacacgctcaagggcatgcgccacctggtcaccggcggcgacgtctgcgaaccgcacgtgatcgacgagcttgccggatactgcgcgctgcacaacatctacggaccgaccgaaaccacggtactggcgaccacccggcgcttccgcgcgggcgacgacaaccgcaacctcggcgcgccgatcgccaacacgcggatcctgatcctggacgaacacgacgacccggtactcgacggcgagaccggcgaactgtacatcgtcggccccggcgtcggcctcggctacctcaacgcgccggagttgaccgccgaacgctatcgcacgctggagctgcccggtggcgagcgctgcctggcctaccgcagtggcgacctgtgccgctggcaggacgatggcatccggatcgtcggccggcgcgacaaccagatcaagatccgtggcttccgcgtcgagcccgaggagatcgagagtaccctgcgccaggcccagctgttccgccaggtcgcggtggtcatcgacgaacgcaagcgcatcctcgcctatctcgcccaaccgctggaggccgatgccgacagcgcccgcgagcgcctgcgcgagcacgcccgccaacggctgcccgactacatgcagcccggcgcctgcgtcgtgctcccgcggttgccggcaaccgccaacggcaagatcgatcgcaacgccctgcgcaacctgccgccaccgcaagtcgaacaggccaggcggctggctccgcgcacggaagaagagcggcgtctgctggcgctctggggcgagctgctggaactgggcgaaagcgagatatccatcgacgagagtttcttcaacctcggtggccattcgattctgctgtcacgcatgctgctcggcctgcgccagcgcttcggcaggagcgtgccgatcaatcgcttcgtcgagtcgcccaccatccagaccctcgcccacctgctggccgacggcgacggcgccagcggcgtcgacccgcaggcgctgcgcgacgccgagcgcccgttgcaactggacgtgctgccgctgaaccgcatgggcgatgtgcacaaggtggtactgaccggcgccaacagcttcctcggcgtgcacctggtggaagcgctgctcgactggggcgccagcgagatcgcctgcctggtccgcgcgaaggatgacgaggcggcccggcagcgcttcatcgccgcgctggcggacaaccgcctggaaggtctcgacctggagcgggtcagggtctacgccgccgacatcacccagccgcgcctgggcctgtcggaagcggtatacacggatctcgacctgcgctatggcgccatgatccacaatgccgccaacgtcaaccatgtcctcgactacgccgcgctggcaagggacaacgtcgagccgatcttcgagtgcctgcgtttctgcgaagggcgcagcaagaagatcctcaatttcgtatccaccctttcggcctcgagcagcgtcgacgagaacggccgcgtgctcgagcgtccaccggcgcacaccccgccgatctatatccgcaacggctacaacctgaccaagtgggtggccgagcggattctctggagcgccagcgagcagggggtgcaggtcaacctctaccgtcccggcaacatcactttcaatacccgcaccggcgtctgccagccgcatcgcaaccgcctgatgctgatgctcaagggttctctgcaactgcgcaaggttcccgagctttcactcaacttcgacctgatgccggtggatttcctcgcccgcttcatcgccttccacgccagtcgctgccatccggcgcgggcggtattcaacctgcacaacccggagccactgagctgggaaggctacctggaggccttccgcgagatcggccatcgcttcgacatggtcccggtgccccagtggcagcaactcctcggacagatcgaccgggacaacgcgctgttcgaagtgctcggtttctacctggacggtttcgaggaggacatcggcgatatctccctcatcgaataccgcaatgccctgtcgggaatcctcaacatgggcgagcgctacccggcgaaaagcagttcgctgttgcgcaagggctgcgaatacctgcgcgagatcgacttcatctga

SEQ ID NO: 338711 - DNA, 930 bp, Pseudomonas aeruginosa
atgaacgcagaagactatcaatccttcgccgaatcctgggagggacgggccacgatccgcacccgcccgcggcggatcgtcgagaacgacggcaaactcatctacccgctcagccgccagccgctggtgctgagtggcaccttccagcgcgaatgcccgcacctgcaggacttcgcgctgacccagagcctctacaagttcatcaatgacgtggtgatcttcgagaccgagatcgtcgacaggaccgcccgcagcatcgccaaggaccgcttcccgatccgcttccccttcgcctgccgctacgacgccatgaccgtggtggtcgacgaggactaccacgccctggtggccatggactacatgcagcagacagtcgccctgaccggcatcgagccgatcgccctgccccgcgaaatcgagttgagccgggccatcccggcgacgctcgcggcggtgccggcgtccctgcacggtgccgtggagctgatctgcgtatccatcgccgagaacaccctgaccaacgacgtcgcggccttcgccaaggacgacagcatcaagccctcggtcaaggggctgatggccgaccacctggccgacgaaggacgccactcgggcttctgggcgcggctggcgcgcatctactggagcgcggccggcgacaaggagcgccaggcgatcgccgcggcgatgccgactttcctccgcgagtacctgaccaacgagatccagaaggatttcgacttcagcctgatcgaccacctggacgtctcgccctccgtgcgctccgcgctgaaggaggaagttctcggcctggtctatccgatcaaccgccagcatcccctgctcggcaacatcctgcgctttttccgccacagcggaatgctcgatagcccctgcctgcaggacgccctttccgactatctgccctag

SEQ ID NO: 338712 - DNA, 348 bp, Pseudomonas aeruginosa
atgaacttccgcatcaccgacctggaaaacctgccctgggaagtggtgagcagcgagcacgccatcagccaggcgatctaccaggacaccctcgaccaccagaagcgtaccggcatccgtacccgcctggtgcgcttccatccgggcgcccggacgctcgacgtgtacacccacgactaccacgaggaggtgtacctgatcgaaggcgagcagaccgagcacggccaggcgcaccgtcccgaagccacctacggcgagggctgccatttctaccgggcggcgaagaccctgcacgggccgttcagctcggaaaaaggctgtctgctgttcgaagttcactactactga

SEQ ID NO: 338713 - DNA, 777 bp, Pseudomonas aeruginosa
atggaaagtttgaagaacctgttgcagcaaaagaaaaccgaacttggtcttcacccgatcttctcagaaatcgactccctggaaaccctgcgaattttcatgggaacgcatgtcttcgcggtctgggacttcatgtccctgaccaagcgcctgcagcaggacctgacctgcaccagcctgccctggctgccacccagagacccgcaggcggcgcgcctgatcaacgagatcgtgctcggcgaagagtccgacgagaatcttcaggatggccacttcagccacttcgaactctatctgcaggccatgcgcgaagtgggtgcaagcacggaaaagatcgaagcgttcataaactatctggaacagggaaacagcgtcgaagaagccttgaacctgtgcaaggccggacgtgcggccagtcgtttcgtcaaacagaccatccataccgcgctgaatgctcggacgcattgtgtcgccgcttctttcatgcatgggcgtgaaagtgtaataccgcacatgttccagaagattctcgatgactggaatatctccagcgaacaggcgccgaccttccgttattacttgcagcggcatatcgaagtcgattccgaagatcacggcccggccgccgaacaactgctcgaacgcctggtcaacggcaaccagctgcaccagcagcaggtctaccagtccgccatcgacgcggtggaaagccggatcgccctctgggacgaattgcgcgaagccatgcacgccgaactgacggaggcgctggcatga

SEQ ID NO: 338714 - DNA, 1545 bp, Pseudomonas aeruginosa
atggccaatgagcaggagaagacttcgctgaaggcctgggtggcggtcatcggcggcctgttcggctgcttcatggccggcatgaacgtccatgtcaccagcgccgcgctgccggaaatcgagggttccctgggcgccaccttcgaggagggctcctggatctccaccgcctacctggtcgcggagatcgtcatgatcccgctcaccgcgtggctggtggaggtcttctcgctgcgccgggtgatgctggtgggttccagcgtattcctggtcgcctcggtggcctgctccttttcgccgaacctcaccagcatgatcatgatccgggtcgtccagggcgccgccggcgccgtgctgattccgctctcgttccagttgatcatcaccgagctaccggcctcgcgggtggccatggggatggccctgttcagcctgtccaacagcgtcgcccaggccgccggcccctccatcggcggctggctcaccgacgtctacagctggcgctggatcttctacctgcagctgatccccggcgtgctcctgctcgccgcgatcgcctgggccatctcgccgcaagccatgcagctgcaacgcctgcgccagggcgactggctcggcatcgcgagcatgatcgtcggcctgggagcgatccagatcgttctcgaggaaggcggtcgcaaggactggttcggctccgacttcatcgtctggaccttggtcctgggcgtagccgccttgctcctgttcatctacacccaactgttcggccgacgctccttcatcaacctgcgcctgctggccggctacaacttcggcgtcgccagcgcggcgatgttcatcttcggcggcgcgaccttcggcctggtattcctggtgccgaactacctgtcgcaactgcacggctacaacgcccgcgagatcggcgtcagcctgatcgcctacggcctcgtgcaactgctgctggcgccggtgatgccgcgcctgatgcgctggctgccagccaagctgatggtcgccacgggcttcgccatcatggccgccggctgctacatcggcgcctacctggacgccgacagcgccgccaacgtgatcatcccgtccaccgtggtccgcggcatcggccagcccttcatcatggtcgcgctatccgtgctggcggtctccggcctgtcgaagagcgaggcgggctccgcctcggcactgttctcgatgctgcgcaacctgggcggcgcggtcggcaccgcggtgctgacccaggtcgtctcgcagcgcgaacgcttccactcggtccgcatcggggaacaggtgaacgccttctccccgggcctgcaggagcgcctccaggccgatctcggccagggcagcgacttcgccatcaacgaatggctgccggcccaggccgagaccctcacccggctggggacgcacattcgccacgagtcgttcctgatggcctacggcgacgcgttctacctgtcgttcatcgcactgctggtctgcgcggcggcggcactcgccctgcgcagtgggaaaagcgccggatag

SEQ ID NO: 338715 - DNA, 1182 bp, Pseudomonas aeruginosa
atgaacatagccgtcgacgaaaaacgcaacgcccccgccgaagagcgggcacacccggtctcccccgtggaacccgcggaaaggaaaaagcgccagcgccgcctgatgtggctcggcggagcactcctggccgtcgccgcggtcggctatggcctgtactggctgagcgtcggccgctacctggaagaaaccgacgacgcctacgtgcgcgccgactggatcaccatcagcgcgaaggtttccggctacgtcgccgaggtcctggtgcaggacaaccaggcggtcgccgccggcgatccgctggtgcgcatccatgatcgcgactaccaggcgcgcctgctccaggccagggcccggcaaggcgaaagccgcgccgccgtcgcggcacagcaggccgccctggtgacgctggacgcccggctgaaggaacagcaggcgctgatcgaccaggccagcgccgacatcgagagcgccaaggccgaacgtcaccgcgcgcaactggatttccagcgctaccgggacctggtggcgcagcaggcggccagcagccagcgcctggaaagcgtcaccgccgactacgcgcgggcacgctccgcgctgagccgcgccgaagccgccgcgagccgccagcgcacgcgcatggcggtgctcaaggccagtcgcgagcaggccgcggcgctgctcgaacggcagaaggcgcgctccgccgaggccgatgcgagcctggcgctggccagcaacgaactggaagataccctgatccgcgcgccgatcgccggcgtggtcggccagcgccgggtgcgccagcgccagtacgtcacgcccggcctgccgctgctggccgtggtgccggtggaacagtcctacgtggtggcgaactacaaggagacccagctgcgccgcatgcatcccggccagccggtggagatccgcgtcgacagcttccccgatgccgtcctgcatggccgggtcgacagcttctcgcccgggtcgggcgcggtcttcgccctgctgccgccggacaacgccaccggcaatttcaccaagatcgtgcagcgcttcccgatcaaggtcgtgctcgaccccgacgcccgccagcaggtggcgatcctgcccggcatgtcggtgatcaccgaggtcgacacccgccaggagagcgaggccgcgcggcatggccaatga

SEQ ID NO: 338716 - DNA, 1494 bp, Pseudomonas aeruginosa
atgcccgtacccacttcctacccgccacgccccctgttcgcgctggcctgtgccgccctgctgctggcgggctgctcggcggtgaccgaacacccggtcccgtccgtccagctgccccgcgcaggcgcctggcaggcgctcgccgccgacaccagcgcgcagcaaccgcccgaccagtggtggcgcctgtatcaggatccgcagctcgaccagctggtgggccgcgccctgcggcataaccacgatctcgagggcgcactggcccacgtcgatgagctgctcgccctgctcggccaggccagggcccagcgctggcccggcaccagcacctcctggcagaccttctacgggcgcaccagcgatgaccagaccgaggccaaatccaccggtgagcgggccccgtcgcagtggaaccacgtaccggcgttcaccctcgactaccagatcgacctgtggggccaggtacgccattcgatcctcgccgcccaggccggcgccgaggccgcccaggccgcccacgaccagttgcgggtgaacgtcgccgccggcaccgcccgcgcctatgccagcgcctgcgcctatgcggcacgcgcggcgatccagcaacgctcggtggaaaccgtggagcgcagcctggacctgacccagcgccaacgccgctccggcctggtcaccgacctggaggtggagcgggtgcgcagcctgctggaggaaacccgcgcgctgctgccgcgcctgctggccgaacgccaggcggcgctggaagagctgggcgtgctgatcggcagcgacccgcagcagttgccggccgccgtcggcgaatgccggcgcgtgccgcgactcgcccgggaactgccggtcggcgacggctgggcgttgctgcagcggcgtccggacatccgccaggccgagcgcgagctcgaagccgccagccacgaggtcggcgtgcgccaggccgacttctacccgagtgtctcgttcggcgcctcgatcgccgcctccagcgatcgcctgcacgacctcggcgaccacgaggcgatcacctatgccatcggcccgctgatcagctggcgcttccccaacatgctgagcaccagggcgcgcctggagggcgcccgggcgcacgaacggcggcaactggcacgtttccgccagcaggcgctgaccgcgctcaaggaagtccgccagagcctggctcgctacagcggcgagagcagccgccgccaagcgttgctcggcgccctggacagcagccgcaaggcgtaccggctggcgcatctcaactaccaggccggcgccctcgacttcctcgacgtgctcgacagcgaacgcgcgatggtccgcctcgaggcggaaaaggccgaagccgaccggcaactggtcgagcgccagatcgatctctttcatgccctgggagggggttggcaggaaccggcggcgatgccggcccgctacgccacccgctccgcaaccgtcagtggaacaccccgatga

SEQ ID NO: 338717 - DNA, 735 bp, Pseudomonas aeruginosa
atgtccctcgaggcgctggcctgcgaccaccacgatggcgaggagatcctgccgcactgccatgcgcaggcgcagctgatccacgccatctcgggggtgatgctggtcggcgccgcccgcaggaactgggtggtgccggccggccacgccctgtgggtgccgccgaacaccgaacaccagatccgcatgtccggcagcgtgcgcatgcgcacgctgttcatgcccgccgccacctggccgcgggacggtgaacagtgccaggtgatcgcggtctcgccgttgctgcgggaactgctggtggcggccagcgagatgcacctgggcgactccagcgcgcagcgccggcgctgtatccacgagctgctgctggtggaactggacgccgcgcagaccatcggcatccacctggtcatgccgcgcgacccgcgcctgctgcggttgtgcagccaggtcatcggcacgccggcggaagaaacccgcatggaagactgggcgcgacagttgaacatgagcagccggaccctcgcccggctgttccagcgggagctggggatgagcttcggcgactggcgcacccgcgcacgcatggtcctgagcctgcagcgcctgagcgccggcgcgtcggtcctcgaagtagccctggaacacggctaccagagtccgagcgccttttcccagaccttcaagcgcaccctcggccactcgcccagccactaccaggccctgagcgcctga

SEQ ID NO: 338718 - DNA, 1695 bp, Pseudomonas aeruginosa
atgctcaaagacccctcgcgcaagtaccgcccgttcaacaccgtcgacctgccggaccgccagtggccttcccgcgtgcagcgcaaggcgccgacctggtgcagcgtcgacatgcgcgacggcaaccaggccctgatcgaacccatgaacgccgagcgcaagcggcgcttcttcgacctgctggtgcaggctggcttcaaggaaatcgaggtgggcttccccgccgcctcgcagaccgatttcgactatgttcgcgagctgatcgagagccgcaagattcccgacgacgtcaccatccaggtgatgacccaggctcgtacccacctgatcgagcgcaccttcgaggcgctcaagggcgcgccgcgggccatcgtccacgtctataacgccaccgcaccggtattccgcgaagtggtgttcggcgtcgacaagcccggctgcatcaagatcgccaccgatgccacccgcgagatcaaggcactgatggagcgcaatccggagaccgactggaccttccagtactccccggaaaccttctgcttcaccgaactggagttcggcctggaaatctgcgaggcggtggtcgaaaccttccagccgacccccgcgaacaagatgatcctcaatctgccgacgaccgtggaggtctccaccgccaacgtcttcgccgaccagatcgagtggttctgccggcatatcagcaagcgcgacagcgtgatcatcagcgtgcacccgcacaacgaccgcggcaccggcgtctccaccgccgagcaggcctgcctggccggcgccgagcggatcgagggcaccctgttcggcaacggcgagcggaccggcaacgtcgacatcctcaacctggcgatgaacctctacaccaccggcgtcgacccggaactggacttctccgacatcacccgggtcatgcgcgaggtcgaatactgcaaccagttgccgatccacccgcgtcatccctatgccggcgaactggtgttcaccgctttctccggctcgcaccaggacgccatcaagaaaggcttcgccgcgcgccaggaacgaccggacggcttctgggaagtgccctacctgccgatcgacccggcggacctgggacgcagctacgaagcggtgatccgggtcaacagccagtccggcaagggcggcgtctcctacctgctggaacagaacggcatcgtcctgccgcgccgcctgcagatggaattcagccaggtggtgcagcaggtggccgacgccaccggcaaggaaatcagcagcgagatgatcctctcctgcttcgaagaggaatatctcgacgagctgaccccctatgccctgcgcgcgcctcgcctgaacagccagggcgagcagaccaggatcgacgcggtgctcgccggcccctacggcgagcagccgctcggcggaaccggcaacggtccgttggccgccctggtcgaggccttcgccgcgcgcggcctgaacttcgacatcgccgactaccatgagcacgccatgcgcggcggcgccgaggcggaagccttcgcctacgtcgagatccgcgtcggcaaccgcctgctgttcggcgccgggcgcgacggcagcatcctcaccgcgtcgctgaaggcactgaccagcgcggtcaaccgggcaacccgcctgggcctgctggcaccccagcagcaacgcgcctccaacggctga

SEQ ID NO: 338719 - DNA, 606 bp, Pseudomonas aeruginosa
atggatgtgacgaccttcctcggcctcgccctgctaccgatcctctcccccggcccgtcgagcattctcgtcgtgcgcaacagcctgcgccacgggctctccttcgccagcaggcgcctgctcaccgacctcgccgggaccgtgctgagcgccagcttcctgctctacggcctgggttccctgatcaacggttcgaagccgctgctggtcggcatccagctcgccggagccggctatgtcctgctggccggcctgctctgcctgcagcgcatgcgccggccgcccacggatgcgttccgcgtgtcgcgaagcgctggcggtctgtggctggagtccttcctggccggcctgctcaaccccaagaccctggtcttcttcgccctgctccagccactgctcgccggcgcggaagagcgcgccgccccgctggcctatgcgctgggctacagcctgtacaagggctgcgtgctgacgctgacctgcgccgtattcctgctcgcccgggactggtgcaggcgccgcctgcgcctggccaacgggatcctgggcaccgccctggtcgcggccggctcgggcttcctggtgaaactctcagctggtttctag

SEQ ID NO: 338720 - DNA, 1131 bp, Pseudomonas aeruginosa
atgtccagtccctacctgagcgacagccaccaggccttcgccgaagaagtgcggcggaccctgcgcgagcggctgctgcccctggcggaagccgccgaggagcgcggccgcctctgcgaggaagcctggcaggcgctggccgaccacggcctgctgagcctgccgcagcgcggcgagggcttcctggaaagcgcggtattcctcgaggaactcggtgcgctcggctatgccggcgtccgcgcggcgatcggcgtgcatgcctacatggccagcgcctacctggaactgttcggcaacgacgagcagcgccagcgctatctccccgccatccgtgccgggcgaaccatcgccgccctggccatcagcgaggaacaggccggcagcgatctgtcgcgaatgcaatgcagggccgtccccggcgtcgacggtttcgtcgtccatggcggcaagcgctacatcgccaatggttcgcgcgcctcgctgatcgtcaccctggtgcgcaacggcgaaggcgggcatgcgctgggcagcagcagcctgctgctgatcgacggcgacagccccggcctcagccgtacgccgcggccgatgctcggctggcgcagcgcggacgtctgcgacctggatttcaacgacgtcgcagtatccgccggcaacctgctcggcaagcccggcaaggcgttgttctacctgatgcgcggcctggacttcgagcgcctggtcgccggcctgctcgccctcggcggcgccggccacagcatccgcctgctcgacggcttcgtccgtcggcaccaggtccagggcgctccgctatgcgacaagcagagcgtccgccatcgcctggccgacctgctcggcgaacacgagatgctgcgccactacgcctatcagttggcctggcgccacagccaggaccggctcgatacccgctcggcatgcatcctcaagctgcgcgccagcgaactggccgtggccgccgcccaggcctgcgcgcaactgcacggcgcccagggctatcggatcgactgcgaggtggcgcgcctgcaccgcgacgccctggccggcaccatcgccgccggcgccagcgaactgatgcgcgacatgatcttcgacagttcgccagcacaatga

SEQ ID NO: 338721 - DNA, 471 bp, Pseudomonas aeruginosa
atgagcatcagtaaacgtgcccagcagttccaggacatcctccgccagcgcggcctcgacctgaccgtccaggagttgcccgactcgacccgcaccgccgacgacgcggcccaggcgctgggctgcgaaaaggcccagatcgtcaagtcgctggtgttccgcacccgcgccaacaccccggtgctggttctcgccagcggcccgaaccgggtgaacgaaaaagccatctcgcgcctgctcggcgacaagatttccaaggccgatgcggatttcgtcaaggaagtcaccggcttcgccatcggcggcgtcccgccgctcggtcacaagcaggaggtgaagctgttcgtcgacgaggatctgctgacctacgacgagatctgggccgctgccggcacgccgaacgcggtgttcaggatccccggctgcctgaccgagatccttccggcgcatcaggtgatctcggtgaagtga

SEQ ID NO: 338722 - DNA, 1587 bp, Pseudomonas aeruginosa
atgcgcacgcttgaactggacgaggcggccctggccctgcacgaacgaatcaaccgtacccgggaatcctacccggagcatctcgcggtcggcgagctattcgcccgcatcgcggcagagcgcccgcaagcgatcgcgttgcgctaccgggagcgcgagctgagctatgcgcagttgaacgcccaggccaaccgcctggcctggcaattgctggccaggggcgtgcagaccggcgacgtcatcgccgtggtcctgccgcgcagcccggaactgatcgtagccttgctggcgatcctcaaggccggcgccagctatctgccgatcgatccagcctggcctgaacagcgcatccacgaactgttccggcaaaccgcctgcgactgcctggtgggcgacgaaagcgcgcgccgcgatccgcgcctgtcgcgctaccggcaagcaagcctggacgaggccggcgaggatccgggaaaccctccgctcgaggtggccgccgatgccatcgcctacatcaatttcacctccggctccaccggcacgcccaagggcgtgcccatcccccatcgcggcatcacccgcctggtctgcaatgcccgctatgccaggctggacgagaacagccggctgctgcagatggcgccggtaaccttcgacgccgctaccttcgagatctggggcgccctgctgctcggcggcacctgcgtgctctacccggacgccttcgtccgcgcctcgcgcctgcagcgggtcctccaggaacaacggatcagcgtgctgttcctcaccaccgccctgttcaacaccctggtcgacgaagcaccgcaggcgctggccggcgtcgacaccgttctcaccggcggcgaagcccattccctgcgtcacatggccaaggccctggcgctctatggcacggaacggatcgtcagcgtgtacggcccgacggagagcaccaccttcgccaccttccacccggtgcgcgaattgcgcgaggaggacaccgccctgcccatcggcctgccgatccagaacacacgggtctacctggtcgacgggggccgtctctgcggaccgggacagagcggcgaggtctgcctcgccggaccgggcctgtcgccgggctacctggggctgccggagagcacccgcgaacgcttctttgaatgccgcatcggcgaacgccgggagcgcctctatcgcaccggcgaccgctgctacttccgcaccgatggcgcgctggtgttccagggacgcatggacgaccaggtgaagatcaacggcttccgcatcgaactgggcgaggtcgcctaccacctcaatcgccatccgcaggtgcgccagagcttcgtcaccgtcaccgaggcggcgcacggcgagaaggcgctggtcgccttcgtggtcgccgccgcgccgtcctgctgcccgcaacgcctgcgcgacgaccttgcggcacggttgccgggctacatggtccccgggcgcatccagctctgcgccagcctgccgctttccgccaccggcaagatcgaccgtcggcggctgctcgccaccctccagccatcgggagaacccgctcatgagcatcagtaa

SEQ ID NO: 338723 - DNA, 768 bp, Pseudomonas aeruginosa
gtgtccgggcatgcgtacgacgagcgctggctgctgctgcccaggccgcggccacggccgcgcctgcgcctgatctgttttccctacgcggggggcaaccccgacctgttccgcggttgggtggacgatctggaccaggacgtggaactgctcgcggtacgcctgcccggccgaggctgccggatcaaggaagcgccatacgaagactggccggcgctgatcgagggctgcctcgaagcgctggccccctacctcgactcgccccacgcgttctacggacacagcttcggcggccgcctggcctacgagctggcgcagcacacccggcacagccatcccggggcgacccgccggctgttcgtcagcggctgtcgcagcccagccagcccgcaggcgcaaccccacctgcacacgctctgcgccgaggacttccagcaggccctgcgcagcatgggcggcacgccccccgcggtcctggaaagcgagatgctgatgcgcctgatgctgccggccctgcgcagcgacatgcggctgtcggagatctggcaggactggcaccccctgccgctggatatacccatccacgcctacttcggccacgacgacccgatcgaccggcaagacagcatggccggctggtcgaagcacaccacggacgacttcgagctggtggggatcgatggcggacacttcttcctcgacagccatcgccggcaattgctggacagcatgagcacacggatgaggcacgaacatgcgcacgcttga

SEQ ID NO: 338724 - DNA, 270 bp, Pseudomonas aeruginosa
atgaatagcatcgcagacatcggcaagatcgagttctggctgatcaacacctgccgcgaactgggcctgcgcgtggacgcccccgacagcgacttcttcgccgcgggcggcacctcgctcagcgccatccgcctgatcgccaaggccgaggagcatttcggcgaggatgccctgccgcccgaggacctcttcgcgcaaagcaggatccacgacatcgccagttgcatccagcgcaacagctcccacttcaacgccctgacggagaactga

SEQ ID NO: 338725 - DNA, 960 bp, Pseudomonas aeruginosa
atggaaggacaagcacgcgttcgcgacctcgacttcagcctgagccccgaggaactggagcagttccaccgggacggctacatcgggcctttcgatctgtaccagcaggacgagatggccgccaagctgcaggccttgcgacccaggctgatcaacacccgcaaggcgatctacagccaggacaaggcggtatcgggcatcaccaacctggccaactatgaccgccacctggacgtcgactttctcgccgagcacatcactcgtccggaaatcgtcgaccgggtagcgagcatcctcggccgcgacaccctctgctggcgcaccgaattctttcccaagtaccccggtgacgaaggcaccgactggcaccaggccgacaacttctccaacgtggccggttccaagcatccgcagatcgtctggccggaagacgccgagttcggcggcaccatcaccgtatgggccgcgttcaccgaagccagcgtcgagaacggttgcctgcagttcatccccggcacccaccggaccatgaactacgacgagtccaagaccatggactaccaggccgatagcatcaacaagctggaaaaggacggcgtgcgccgcggcttcttcggttacgactatcgccagttgcagaaggacccgaactggaagcccgacgaatccaacgcccggtccatggtcatgcgccagggtcagttcatcattttctggtcgaccctgatgcatgcctcgcacccgcacagcggcctgaccgagcagatgcgcctgggcttcgccgcccgctacctgcccacctcggttcgggtctacccctactcgaacacgctgcaggagttcggcggcgaagccagcctggacaagttcggttgcgtgctggtgtccggcgaggaccgtttcaggcacaaccgtttcgtcgaaagcacctgcaacggctaccgcttcccgctgcgctga

SEQ ID NO: 338726 - DNA, 693 bp, Pseudomonas aeruginosa
gtgaagtcccgaaaatattccgtaagcacgctgttcccccgggtccaggcgccctcgcacctggcccgcaacctgatcgagaccaccttgagagacgcgattctggatggacgattggtgagcggcacgccgctgcgccaggaagagctggccgaactgttcggcgtcagccgcatgccggtgcgcgaggcgctgcgccagctggaggcgcaggccctggtgcagatcgtgccgcacaagggcgccgtggtgacccagctgatcagcgacgacgcggtcgagacctacgccgtacgcctcctgctcgagcccgaggcattgcgccagtcgattccgaacctgcaggcacaggacctggaggaagcgcatgcgcatatcgccgcgatggagaacgaaaccgacctcgccagcctgggacggctgaaccgcctgttccatctggcgctgtaccggcgcacgccgaacgccaagctgttgcgcctgatcgacaacgagttgcaggaggaggagcgcttcctgcgcttccacctgtcggccatgggcctcggcgaaatggcccaggacgaccacaaggccctggtggcgctcgccgctgccggaaacaccgagggcgccgccgaggtcttgcgcaagcacctgcaaatggcttcggacaccatccgcagctacctggaaagacgccttacgagttaa

SEQ ID NO: 338727 - DNA, 2343 bp, Pseudomonas aeruginosa
atgacgactcccaagtacggcggcctgctcaccgacatcggcgcggcagcgctgatcgctgcgagcgaagccgggaagaagtggcaacccacccatatgctcatcggtgacgccggcggcgcgcccagcgagacggctgaccccatcccctcggccgctcagaccaagctgatccgccagcgctaccgcgctcaactgaaccgtctgttcgtctccgagcaaagcgcaaacgtgctggtcgccgagctggtactgccgatgtccatcggcggcttctggatacgggagatcggcctcgaggacgccgacgggaagttcgtggcggtcgccaactgcccgcccagcttcaaggccagcgtcgagagcgggagcgcgcgcacccagaccatccgcgtgcagatcatcatatccggcatggagcacgtcgaactgatcatcgacgacggcatcgtctacgccacccaggactgggtgacggtgaaggttgccgcggacttcaagggacgcaaggtgctggccggcaacggcctggtcggcggtggcgatttatctgcggatcgcaccatcgccttgccagcctcgggcgtgggggccggcacctaccgtgcggtcaccgtcaacgccaatggcatcgtcaccaccggcagcaacccgaccacgctgggcggctacggcatcacggacgcactgcatgccagcgaggcggtcaccatcccgacggcgaacaagctgctcaggctgaacgcggccggactactaccggcctcgattacgggcaacgcaaccactgccagccggcttgcagcgcccatcacgctcagcgcaaccggcgacgcaacctgggcggcgcgcttcgatggctccagtagcgtcagcggcaccctgaccctggccaataccggtgtagccgtcggcacctacacgaaggtcagagtgaacgccaaaggtcttgtcaccagcgccacatcgttgacggctgacgacattccttggctggatgccagcaagctcgccaccggtattttgcctgtggctcggggcggtactggcaacgccatcggccaggcagcgactgcactcaagctggcctccccccgcacgctggcaatcgctggggatgccaccggcagcgctgcatttgacggcagcgcaaacgccagcattacggttacgctggccaataccggtgtcgccgacggcacctacaccaaggtcagggtaaaccccaagggtctagtcatcggtgcaaccacgcttactaccgacgacattccctctctggacgcctcgaaaattacatcgggcatgttcgccgatgcccgacttccctggtacgcacaagggctatgcaccagcgcacccaacacgacggacccgaacaccacgaacattccgctcatcctcacgaatcacgagaacggtccgattccggggcagtatttctatatccagacgatgatgtacaaccagcgcaacggcaacgcggggcagattgccgtgcgctacgcggcgaacgccgaaatgtatgtgcgctacatgtacgacgtcggcaacaagcgcggggtctggtccgcctggcgacgctgcgatgtgggtggctcatttgcaaaagagcctgatagccgcattggagacgcgttcgacctgaacacgcttgaggaatctggctggtggtatcagacatcaaacacctatgcggccaacggagcaaactatccgactgcaaaggcgggacggctgatggtttatcgagcctccagcgacttcacctatcagacgtaccagacccatgacggatacatgtttcatcgttgccgttatgcaggtacctggcagccgtggagggagcaatggacgacgctcaacttcaacccggccaactacgtggccaagtcggagtacaactggtcttcgctaccagggaagcccgcgaccttccccccggcagggcataaccatgacgctagccagattacctccggcatcctgccgctggctcgaggcggccttggggcgaacaatgccacgacggcgcgtagcaacatcggagccggcaccatcgccacagcatccttgggagcaagcggttggtggagggacaacgatacgggttacatccggcaatggggccgggtgactgtgcctggtgatggtaccgcggcgatcaccttccccatcgcgttcccgaatgtctgcttgggcgggttcgctggccaaactgcgaatttccacccaggaaccgacgcgagcacctcgttctataacccgtcgacgacaggtgcaactttggaaaacgggtataaattccaggcggttttgctttgggaggcattcggtcgatga

SEQ ID NO: 338728 - DNA, 201 bp, Pseudomonas aeruginosa
atgagccgtgtaggcaactatatccgcaacaacagttctatttcctccgtgaattacggctatagaagcctaagcgaactcatcaaagcttccggtctcttcgagttcgacatgcgccacaaaaacacagccatgtacatccgtagtaagccttacgattcagccgaaaccccaaatagcctcagcaacaagtttttgtag

SEQ ID NO: 338729 - DNA, 720 bp, Pseudomonas aeruginosa
atggcgcatttgaaggcacagggccttgcgcaggcggaaggtgagggggacattaccgcattccacggagcttcaaccaaaggaacgatggccatgtacatcaaggtcgctattcgaactgcggcacctatcgccgtagtgactctgctctcactgcctatatccgcacctgcccaggtcttcaaatgcatcgacagcagcgggaaaataaccttttcagatcaagggtgtgcagcgggtcactcagcggccgcgatagacgttgcgccggcgaacaccctcgacagctcgcagtaccgaaatccgccgcctcaacctgaggtaccagatcgcgttgcgccctcggtgcggtctggcgttcaagttaacgtcgtcgggggcaacaacgatgcagaacgtgagcggaaaaggctttgcaaagaggcctcgacgccctatcccggatctcgtggagggctgacctctgctcagcttgccgccgccgcgcagttgtgcgcgggtgtttcagtccctatacctgctacgcccgcgccggccggtggcagcgcaacgcgagcaccgacgatacctgcagcaccaggagtcctcaccagttgtgatgaaagtgggtgttgggacagcaacggggctaggtacaaccgaggcgctggaaatactcacttcccggcgagtggtgggccggcgtgcgagctcgttggtgggaacatggtgtgcccatga

SEQ ID NO: 338730 - DNA, 879 bp, Pseudomonas aeruginosa
atgctgacgcctgaacaacaagacgaactgttgctgtcgctgttcgccacctccgaggcaatgggtcagcaactcacgcccgccgcagcccaactcatggttcaagacctatgcgcctatgacgaggaggcgttaaccggtgccctgcaggccgttcgccgggagggcggacgattcacggttgccgctgtactccggcatgtcgagtccgccgacggtcgcccgtccgcgaacgaggcttgggccatcgccctgcagagctacgacgaggccgaaacagcgctgctcacgccggaggtccagcaagcggcggccgccgcggcaccgatcttcaatgccggcgacgaggttggggcgaggatggcgttcatcgccgcctacgaccgcttagtcggtgctgcgcgccagatggcgcagccggtggcctggattctgtcgctcggacacaacgctgagcgccggggcttggcgatcgagtcggcccagcgcctgggtcggctgccggcgtcgcaggctcagttgctgctcaagcagcacggcggcgcgccggttggaaacgatggtcgcgctattgccggcttgctcacccatgactcggttgacggctcctcgcgtgtacggcgccacctggaggagatccgccaggggttggcggtacagaaacgtgagcaacgagaagaacgtcaggctgagcgcggcgacgccccagaggatgctggcgaattgctgagccggagggaccggcgaagggagcggcttgtggcccaactactggaggttcagcggcaaggcgacagtctgatcgcccccgaacttgaggcaatttctgagcgcgccgcgcgagccgcgcgcgccgaacaggagaagaacaatggctga

SEQ ID NO: 338731 - DNA, 276 bp, Pseudomonas aeruginosa; identical to SEQ ID NO: 330346

SEQ ID NO: 338732 - DNA, 822 bp, Pseudomonas aeruginosa
atgcttcttttcccgcgtaacgttccacgtcgacagacagatgacgatcaggaagcacagcgcagcacctttgaacggccagcgcttccagatcggcacaatgtcattggcggccagttcctggcctgcggccgaagaccgcgtatgcgacttccagaatccgtagaactgtttctgatactcccggatgctggtattcacgatctcaccgcgcagaccgtcctggaccttgcggatatagcgatcattggtgccgaaagctgtggctttcttacagcgatacacgacctggacaaggtcacgaattgcacgattgatcttgccgtaactctgagtgatcaacagcacatcggccagttcgtgacgatgaagcgaataccactcctcaactggcacaggcgtgccgcgcagcggtatcgaaaggtgacattcatcgatcacatacaacggcccgaagccttcatcaggatgccgccaagggtccgcataatgatcaaccctactaaacgggcgtactaccctactctcctcctcgccactctcattgttgaacacttcaacagtagaatcccgaagctcgatcaaatgccaagactccgggaaaaacgccttgaacttatccatatccaaagccaggttcgtgatgacctttcgcccttgattcaacgcaggaacaacatgatagacaacggcctcatgagactttccgccaccaggctgacccaggatcaagttaatcattacgacccccagcggacaaatgggatagtttgcaacaggaatcggacgaccagagcgctgacaataagcgttatagcctga

SEQ ID NO: 338733 - DNA, 1377 bp, Pseudomonas aeruginosa
atgggcatttatcgccggtatgcggcagcgtttctagcattcgcgttttttctctcctctgaagtttcgtattccgcgactcgaaagagcgtcaccgtgcctagtgcaagtcttgtcgcgcgcggtggcggctctccttctgtttccggtccatctttaaagattcctggccagcctggtgttgagtatattcctcgatctggcggcggggcttctggtgttccgataaagatcatcccgacgattgatttctcgatcccaaggactattaaaggcagtgtttcttcgctcaagggtggaattgctggcattgctgcaactgcggccatgtcaatggctcttgatagtatcgggggctttattgacgagaatggtaagccggttaagaaggtaagtgacgccccttcgggggccgtggcgggcgtttattacgctaggccgccgcaaacggtcgggggtgtttatcttgatcttaagtatgggctgactcgtcagcaggcctgcgaatatgaggttactcagagtggcaactgtgtaattagaattaatggcattgtgggttcttctattatttacgccaatagttgtgaccctggcgtgtggtttaatgtttcaactggcaagtgcgatagtttgtggaagcctggtgagcatatagagtcgttgactgacccggattatgacgatattacggattcgctgtctggtgtggttgacccgaactggcttaaagatttgctaacggctacgtgtgaaggttcgttgaaccctgcggcgtgctatgaccagatgtctgaaacgacgcaccttagcggtccgtcctcggtgacggggcctaagacttcaagcacgacgacaaccacgaatcctgatggcactaccagtacgacgacgaaggacactcaaactaagtatgagattaagtatggcgataactatatcgactatacggaaacgactacgaccacgaccacgaaagacggtgataaaaccgaagaaacgactacgaccgacactgatgacgtgacggcagaaattcctcccgaagataaagaggaggagggcggtagttttgaagatgccgaatttccggaagttaagccgttctatgagcaaaaatatgaggatgggttagagggtgtatggcgtgacaagcgcgccgaatttgaagatacggaatttatgaagtttctccaagggttcattccgtcgttttcggggcggtgtccggcgtttgggctggatatgaatattgcgtcctgggcgaactatggttatcagcaattcgggtctatctgctatgtgcttgatttcgtgaaggcgattcttatggtttcggccttgttcttgtgtcgcgctctgattttcggaggttga

SEQ ID NO: 338734 - DNA, 135 bp, Pseudomonas aeruginosa
atggctgatattttcggtgcggtagacttttccagcgtttctacctgggtcgcaagtgccggtgttgcgatcatcggtattgcgatggcgttcaaagggatcgatctgggcaagcgcggcgttaagaaggcctaa

SEQ ID NO: 338735 - DNA, 294 bp, Pseudomonas aeruginosa
atgctgctgaccattcgcgacgttcccgaagacctggtgcgccaggccaagcttgccactggcaagggcactggcagtcaggcgttcattgccggcatcgagcttatgatccgtcagcgtgatcggatcgaggcgatggaggaggagattcggtcgctgcgcgagaccctcggcgtgttccagggcgtgcttgctgatgcccatgccgccgctgtgcaactggctgagattgccgggcaacgcgatatgctggtgtccgacaacccgctgcggcctgggtatcgtcgccgctag

SEQ ID NO: 338736 - DNA, 276 bp, Pseudomonas aeruginosa; identical to SEQ ID NO: 330346

SEQ ID NO: 338737 - DNA, 822 bp, Pseudomonas aeruginosa; identical to SEQ ID NO: 338732

SEQ ID NO: 338738 - DNA, 309 bp, Pseudomonas aeruginosa
atgctcttcgtctatctcggcctgactcgtgacgccggaacctcgaaaaagactggcaacgcctacgacatttcggtcgtgcacttcgccgtcgatgccacgcaatcgacccggcccgaccgcaagtttgccctcggcctggagcctcagaacctgccgatcgcgccggaagcggtcagccagttccagcgcgttgaaccgctgtcgtcggtgaagttcgagtttgagccggaccctcggaacatgcagcgcaatcgtatttgcggcgtgaagccggtaccgaaagcgggtgctcaggcggcgtcgtaa

SEQ ID NO: 338739 - DNA, 177 bp, Pseudomonas aeruginosa
atgaacatgaagactcgcatcttcctgcgcacgctgcgcttcgttgcctacaactcgtggctgccgttcttgctgggcaatgtctccgcgctggtcggctttgccttcactgctgatctgattaatgacgcgttcgtctcgtcgctcgaaacggtggtgcagtcatgcgcacggtga

SEQ ID NO: 338740 - DNA, 1125 bp, Pseudomonas aeruginosa
atgttctacgactggatatccggctatcaggatttcccgttcgacattccgcaggtgggcaaggtcattcgactgaacgtcgactcagagaccaatgaggtgctgagccagtcgtgcccgcccttccatgctgagggtagctacagcacgaagtttcgcattcaggtggcagggcgtcgggtgtacgtcgacggcaatgcgagccgcgttaaccgcctggacaacctctacggcctgaccacgctcgcggacaacatggccgtcatcaattcgatcttgaccgcaccggaaatcggtcttccgcctctcactcgatgcacccgtcttgatcgtctgcaggacggttcggcggtggtggacgggtttactttcactcggatcgatgcgacccggaatctcttcgtagggaagggtaacgagtcggcatatctgcgggctctgtcgagccagcgtttccggaactccatcggctacttgtacccggacggcggcaccgttgtgtggacgcccagcgggggagagaaagccggtcgcctggtttacccgggttactacaacaagggactggaactgactcggcatttgctgccgaaggttctacggcgttacggcgctgagtctgaggagtatcgctacgtcagccaggtgcgcgactggtgcgtagaagtcggagttgtccgcgctgaaatcaagctcaagagcgagctgctgaagagggattgcctctgccattggggcctgttcgacgaacagcgcatctgggatcacctgggcgaatttttgaaggtgggcgacaaaatgaccctgaccgcacatgacattgccagcatttccgaagaactgatgcgtgtaggcgtctgcgactccatgcaggcggctgggcgtactgcgacttacgcgatggagtggatgaacggcaagacgttcgatttcaacaagtctgccgtgaaaacgcatcgcgcccgtcttcgggctatcggcttcgatatcaagctgcctttcgacgcgtcgcggcacatgttcttcatccacaacgtgcgcgaagtctcccgcaccttcgacgttcccgcgccgagcttctaccggcgtccggacgtgccgcgccatctgcggttggtggcctga

SEQ ID NO: 338741 - DNA, 207 bp, Pseudomonas aeruginosa
atgagagaccacatgccaacaaacatccgactgacccaggccgaacaagaagcgctgagaaagaaagccgtggaggtcaacaaagagctagtgaagcgcgggctccagccactgaaagactcagaaatcgtgcacgccttcctcgaacacgccatcagcagcctggaggtatccgcctctgggaaactggtaattcacatagagtga

SEQ ID NO: 338742 - DNA, 1305 bp, Pseudomonas aeruginosa
atgaagctcgccgtgccgcgcccgcgcagcctcgccgcgcgcctggcgctgatcctcttcgccgggctggtgctggcctacgggctgtccttcgcctcgcagttctacgagcgctaccagaccgcgaagcacatgatgctcgacagcctcgaacaggacgtggcgatctcggtagccatgctcgaccgcctgacgcccgccgagcgcgaggcctggctgccgcgcctggaacgacgcacctaccgctatcgcctcgacgccggcgagcccggccagccgctggcgctggccgacgcgccggttgccgcgcactccatcgaacgcgccctcgacggtcaatacccgctgaccctgcgcacggtggccgacagccgtccgcacttccaggtcctcctgcgcctgcgcgacggcagcccgctgaccatcgacgtcacgccggccccggtgccgctgtccggctggctgccgctggtactgctggtgcagttgctcctgctgctgctctgcaccggcctcgcggtgcgcaccgccatcggcccgctgacccggctggtgaaggccgtggaacatctcgatccgaatcgtccggcacagcctctcgcggaaaccggcccacgcgaagtggcgcatgcggcggcggccttcaatgccatgcaggcgcgcatcgccgactacctcaaggagcgcatgcagttgctcgcggcgatttcccacgacctgcagacgccgatcacgcggatgaagctgcgcgtcgagttcatggacgcctccagcgacagggacaagctgtggaacgatctcgaagagatgcagcacctggtccgcgaaggcgtggcctatgcccgcagcatgcacggcagcaccgaaaccagttgccgggtggacctcgacgccttcctcgacagcctggtcttcgactaccaggacagcggcaagcaggtacaactcgacggccgtaccggcgcggtgatcgacacccgtccgcacgccctgcgccgagtgctggtgaacctggtcgacaatgcgctgaagttcgccggcgccgcgcgcctggaagtggaacgccgtaccgatggcggcacgcgaatccaggtgctggacaatggcccggggattcccgccgaggaactcgacgaggtgctcaagcccttctaccgggtggaaaactcgcgcaatcgcgacaccggcggcaccggcctcggcctggccatcgcgcagcagctgagcctggccctcggcggccgcctgaccctggccaaccgcgccggcggcgggctttgcgcgcgcatcgagctggacccctga

SEQ ID NO: 338743 - DNA, 741 bp, Pseudomonas aeruginosa
atggagcatgtcgatcacatcctgatcgtcgacgatgaccgcgagattcgcgagctggtaggcaactacctgaagaagaacggcctgcgcaccaccatcgtcgccgatggccggcagatgcgcgcgttcctcgaagccaacacggtggacctgatcgtcctcgacatcatgatgcccggcgacgacggcctgctgctctgccgcgagctgcgcgtcggcaagcacaaggccacgccggtgctgatgctcaccgcgcgcaacgacgagaccgaccgcatcatcggcctggagatgggcgccgacgactacctgaccaagcccttctccgcccgcgaactgcttgcccggatcaacgccgtgctgcggcgtacgcggatgctgccgccgaacctcaccgtgagcgagagcagccggctgatcggcttcggccagtggcaactggacaccagcgcccgccacctgctcgacgacgccggcaccgtggtcgccctcagcggcgccgagtaccgcctgctgcgggtgttcctcgatcatccgcaacgggtactcagccgcgaccagttgctcaacctgacccagggccgcgaggcggacatcttcgaccgttccatcgacctgctggtcagccgcctgcgccaacgcctcggcgacgacgcccgcgaaccggagtacatcaagaccgtgcgcagcgagggctatgtgttctcgctgccggtgcgactggtcgaggcccatccatga

SEQ ID NO: 338744 - DNA, 1530 bp, Pseudomonas aeruginosa
gtggctgaggaagttggcttcgatcagcggccggtcgtgcgggtccggcgagttcaggcggacccgcccgcggctctgcgggtgcatcaccgcgatgtgcaggctgaccccgtggccgaaggggacgaggcgctgcggctggttcttcagcgcgggggcgacgatcagacccagctccggggtctctgcctgcgggtcgaggcggaggaagccaccggactcgacggtgttcgaggtcagcgccccgcgccggccgaacaggtactgccagggcgagcgcagcagcggcagccagcccttcggcgagaagcccaggccgtagccgagcttggcctcggtgcggtacatcagcacgatgtcctggtggtcctgcaggttctcgccgaccccaggcaactcatggcgctggacgatgccgtggcgcgccagttccgccgccgggccgatgccggagagcaacaggagctgcggcgagttgatcgagccggcgctgaggatcacttcgcggcgtgcctgcaattgcacgacctcgccagcctggctgatctccacgccggtggcgcgggtaccttccagcagcacgcgcagggtcagcgccgagctgagcacggtgaggttgggccgcgccagggccgggtgcaggaaggcgcgcgccgcgctacagcgttcgccgttgacctgggtgacgtggaacgggccgatgccttcctggcgctcaccgttgaagtcggcgttgtacggccagcccatttcctcggcggcctggaagaacacctggttgatcgggcccgggctgcgctgcgcggcgacgttcaattcgccgccgcgcccgtgccagggcgattcgcccggctcgaaatgttccgagcggcgaaagtagggcagcagctcgtcgtagctccagccacggttgccgagggatgcccagcggtcgtagtcgtggcggtcgccgcggatgtagatcatcccgttgatcgcgctggagccgccccagaccttgccgcgcgggcaggcgatcggctggttggcggtgccgggctgggcggcgaagcgatgcatccagttccacttcgggttggcgatcaggcggatgatcccggccggcgtgcggatgtaggcggcggggagcggcgtgcggtcgctggggccggcctcgaccaggcagaccgagacggcgggatcggcggaaagacggttggccaggacgcaaccggcggagccggcgccgaccacgatgtagtcgaacgaacggcgggcagtggaagtcatgtcggcacctttctgggtgtgctgccgggcctcgcccggcgttctttttcgccccgcgcccatgggcgcgacgctactccattggacggggaagcgcgcccggccgcttgtcccagcctgccggcggggttgaccgaggctgccaggcggcgcgctaaagccccagcagcgagcccatgtcgaccatcagttgcaggccgacgacgaaaccgtctccgctcagttcgcgagcgccggggttgtagtagttgtccgggttga

SEQ ID NO: 338745 - DNA, 849 bp, Pseudomonas aeruginosa
atggctagcgcaatcaacgacagactccagaaaacgctgaacggtctcaatgtagatagcaggctaagcacctggctatggctcttcctgaaaagccaagccccacacgccaatctcggggagctcggcagccctgccatgcgagaccgcatggcagatatcatccagaacactcaattaaacgcagagcttattgaggcacaaagtgccttattcttgctgccagaaaaagatttagagtggataacaaacaacaaaagacaaaatttatttatatctagaaagcttattgaaaaacacggttatcagcccatcctgccgccaaccaacttgacgggcagagattttaccattgccatggtggacatatgggcaatagaaaaaacccacaagtcatggaatatcaatcaaataaaatttgaatgggaacagcactcgagatcagaccagatattcaaatggtttgatggcagcgacatcgagcaaaggctagaaaccgcatgggtaataactaaaaagaaattcccattcctggcataccaagaaaacgccccaaaagaaaaagaagaatttataatcttactcgaaacccagttcattaccacatcagataaaatactactcatggagtccaccaagaaacgatggagccaaaataaatatcgagcgaaattaacaggaaaaaagcaatacaacttcatcctatctgaaaaggcaattaatcgccttgacaagctagcaggcaaatatgatttaagaagaaccgaagtactggaaatacttcttcaaatggaagaggaaaaaggaatttatattccagaaagaaaagctctaacaaaattaatttag

SEQ ID NO: 338746 - DNA, 1200 bp, Pseudomonas aeruginosa
atgcctcttaccgatgccaagatccgcaacactaaggctggcgataaacccctcaagctcaccgatggtggtgggctttacctggagattcgcccgaccggtgccaagctatggcgtttgcgctatcgcatagacggtaaggagaacgtgtttgccattggtggctatccggagatcggcctggccgatgcgcgtgatgcgcgggaaaaggccaagccgctgattcgtcagggcatccatccatcgcacaatcggcaggctgagcgactggctaacagcgctgccaatgcgaacactttcgaagctgttgcccgcgagtggatcaagaaaaaagccccaagttggacgccatactacttacgacaggttgagcggttcatggcagccgacgtcttcccctttgttgggaagttgccgatacgcaatgtttctgctgcgcatttgcttgagatcctcaatcgaattgaagggcgaggggccgccacagttgccttgctcgtaaggcagtggtcatcggcagtgtttcgatatgccgtcgcgacattgcgtgcagatgccgacccggctgcggctctgaagggggctatccagcgtcccagggtgcagcaccacaagccgctcacccgtgatcagatagcggagttctctaaggccttggagcaatacggtggctacagagccacggtaatcgcgctacgtctgatgctgctcacattcgttcgcactgtagagctgcgcaaggcggagtggattgaattcgacctggatcgtgctgaatggcgaatcccgggtgagcgcatgaagatgcgtgagccgcacatcgttcctctatcgagtcaggcagtcgcactgctccgtgagctagccacccatacgggcggtcgtcgccagcttttcccgaaccttcgcaatccgaacgaatgcatgacggcaacgacgctgaaccgtgcgcttgagcgcatgggattcaatgggaaggacagtatcggtttttcggctcatggcttccgcgcaacagcttcgacaatgctgaacgaaatgggatatcgcgcagatgttatcgagcgtcagttggcgcatgccgagagaaacaaggtgcgcgcaagttacaaccaggcggaatatctggatgagcgacgccagatgatgcaggcctgggctgatgatattgatatgaatatttcaaaggggtgccgttga

SEQ ID NO: 338747 - DNA, 876 bp, Pseudomonas aeruginosa
atgtaccgcgccaagtcgcggggccgcagccgcatcgagtactacacccgcgaactgacctacctggccaccgagcgcatggcgctggaaaccgaactgcgccgcgccctcgagcgcgacgagttgcagctctactaccaacccaagctgagcctggagagcggcttgctggtcggcgccgaggcactggtgcgctggtaccatccgctgttcggggaaatttccccggagcgcttcatccccctcgccgaggattgcggcctgatcctgcccctcggcgactgggtgctggaacacgcctgccagcagatgggcgaatggcaaaagctgcacgcgccgttcggcccgctgtcggtcaacctcgccggcgcccagctcggccagccgcaactgatcgaacgcctcgagcaactgctggagcagtccggcctggaaccgtcgcggctgcaactggaaatcaccgagagcttcatcatgaaccagaccgaggaggccctcgccgtcctccacggcctcaagcgcctcggcgtacagctggcgatcgacgacttcggcaccggctactcctcgctcagctacctcaagcgcctgccgctggacatcctgaagatcgacaagtcgttcatccgcggccttcccgacgatccccacgatgccgccatcacccgcgccatcatcgccctcggccgcagcatgcagctcacggtgatcgccgaaggcgtggaaaccgaaggtcagcagagcttcctcacccacgaaggctgcgagcagatccagggcttcgtcctcagtccgccgctgcccgccgagctgttcgccagcaaattcctcaaaccgcgccagccgattggcgctccccgagaagcgccggtataa

SEQ ID NO: 338748 - DNA, 237 bp, Pseudomonas aeruginosa
atggatttgccagcgaagttcaaggcgatacgtgccaaggaaaagctcactcaggcggagttctgtgccttggtggagatcagcatcagcagttggaagaaatacgaggcatccataatcgacatgggggccactcccctcctgaaagtcaccaatcacccccgtttcctgaagtacacgctgtggctgatgacagggaccacggctccagcgtgcggccaggtcagcccggagtga

SEQ ID NO: 338749 - DNA, 243 bp, Pseudomonas aeruginosa
atgcagatcaccatcgacacgccgtatgtgacgccaaacgagtttgcgcggcgtgctggcctcaacgaacgcaccgtgcgaaacaagatcgagcgcggcgaattcctgatccgcccaaagtggccgggcgaagccaaaggaacggttttcatcaacatgatcgacttggccatggaggccgccgagcaggcgcaacgggtacgcgccgagaaaaaagcgaacggcaaggccggtaagcagtaa

SEQ ID NO: 338750 - DNA, 198 bp, Pseudomonas aeruginosa
atgactactgataaggtcgtccggaatctcaactccgcggagttctggatgatacatagtatcccatggcgtcccactctggtgcgtcagataggaaagctgaggtccagacaaatggccatatttatcaaatacatctgtcaggaagtctacgtcctccatactgactggcggaggcccctccccaaccatgtgtag

SEQ ID NO: 338751 - DNA, 327 bp, Pseudomonas aeruginosa
atgaaaaacaaaattgaattttatataatagatttcaaatacaaaatctctaccaatgaagctactttccatggagagaatcgaatcgccttcccctcagccgtaataccagaaaatttttctgaagacggattccagaaaagagtctcagaaatcatgaacagcaaagcactcgaactgctgcctcaaatttttattgagcacaacatcaagaccaacgacagtagtgcaatctcccttgaccttgaagtagttaaatcaacaaaaatcagcacctctgtttcaaccgccatctcacaacaactatccgaaacccctaaagaataa

SEQ ID NO: 338752 - DNA, 267 bp, Pseudomonas aeruginosa
atgctggtgattcgattggcggggaagtggacgttaaagctggaccgccagataggcagttccggcaagcacgggatatgggcattccactgctctgaaagcactttcgcgccgtcttcgaacgacctgcggcgtactgcggcgatccttccagccgagcccaaggaaggccagacggtggacgtatcgatctgcgacaccgcgcactcgccagatggatggattgccgtcggatcaggcgtagcggcttacgaggcggagcgctga

SEQ ID NO: 338753 - DNA, 369 bp, Pseudomonas aeruginosa
gtgatctccgctcgcgctttatcggtcgcgctggcctgcctgctgctggtcggcctcggcaccgccggcggtgtctggatcggagcgcggcactaccggccgcagttggatgccgcgcaggcggatctggcagcctgccgttccgctcgtgggagcctggaggccgcagtagtggagcagggcgggcagattgccgcgctgcgtcaggctggtgagcagcgcgccagggaggcagcccatgcgctggagcagggacgacagcaggccgccgagcagtatgccgaagcccagcgcctgctgtaccagcgaaccgctggcgagcagtgtgcggctgccgaggcggtcatcgatcaggagttgggtctatga

SEQ ID NO: 338754 - DNA, 1362 bp, Pseudomonas aeruginosa
atggttacattctccgaaaaattaaaaaaagtttttatactaatagccggacctcttgggtgctacgctacttatcattatttatttatattaagataccttgaccactcaaagtacccattacttacagatatgtatggggggatatcattaattgtagacgtatcatgcgcgataattatagcaattattagttcgctgtttcttagcaagcaaaagatgttagacaatttcaagccaagagggccgcgcctctcaatatatatattgattttaataaatataggaatcttaatattattattggcaaatacgtacaggataattggaagcatctcgccaaattacataataaaatactatcaaaccttgagttatagctctacaaagggtggcgcatggatggttctttccatgtactgcgccattttcattcagctaataaacatgtacgtcagcggagttagtaagacaaacatagcattccttcttataagtcttgtcatagcatcactaagcggcggcagaggaataataatactcttcgcaatgacgtttcttataatgatgatgtttgaacgagtaaaactaactggatttatcgcggcatctttaataacggcagcatcgatggcattatcttatgtcatcgtaacagatcttagagcgccagattcaagcaaaatactattctcaaaaacaaacaatgaagaactaaaaaattcagaaaaagaatatacaattagcgaaaacaaaaacatacttcaggcggacagccaaaaacagaaaagctctggagatgcagagcttgaacaaataaccccatctgtacctgtatccccaacagatagctttgaagacctcaattacaatgcagcatttattacagaggacgtacttagaggtttttcaagtggaaaattaactgcaaaaatgtattttgcggaggatgcagccacaatatttgtgccaagaagcatactgcctgaaaagccaacatcaacgtctgaaacgagagaagtataccccgatgttgcgtccagaggaacaaacataacattcccgctaaaggctaatataataatgcacatggggtctggcgctttttatttggactggctaatagttgcagctttccaaataattatgataatcggaattgcaaggcgaaacatatcgcctgatctcctaggcttttccatgatgttctgcggccttggtttcatgttaatagccagaggcggcatatttaatgcaagaatccttgtgattgcagcatgcattttgctttcatacctgggatacatatctgcaatcaagatccaggagaaggtatattacctattcagaaaaaaatattaa

SEQ ID NO: 338755 - DNA, 2040 bp, Pseudomonas aeruginosa
atgcccttccgatacaacaccatgaatgcggttgagccggatggatcgttcgacttccgcgacgcccacgacaacaccggcaaccttgatctcgcgatgaacggggcggcgcttgcatggacggaccgtctcggccgttctaaaaagtcctgggcaggcatcgaggatcaggtaaacgcctggctcgacagccagggcttcgagccaggtttcctcgtgtacgtcgacggctccccgctgaccgtagatcgcccgacccaactgatccagcgcggggacaacatctacagcgtcaagcgtcctgcatcgttccccgtgaccctttccggcaactgggcagccgatcaggatctccttgttgctcaggcggaccagtctctacgtcaggacatttccaatgctacagacccatacaaagggtctgcgttggttgggagacaaccactaataattaattctgtcgcagaactccgactgacccctggaaggttttctggcgacagagctttcctaaagaactacctggatggtgatcgtaaggggcaacggtatttgacctggattccagggacttctaccgatgatggtggaatgatgttttctgctactggtgggacttggcatagtgacctggacgaacatgggcgcgtagatgcccaattttacggattgccgctgtcgtctggattctgcactgctcaagaccttgccattgaagcgtactgttatccgaggggaattagagccttttacggtccggggccagatggcccaggcgtttatgatttcggagatgcaaactgggcatggtcaggtccgcgcgtagctggtcagccaatgaaggactatcagggtggcggaatcgatttctgccggacaacgactctgagaactacgtctaccgatggcgctgatgttttgcaatgctgcgggataaagaacgctcattttaccgggtttcccaatgttactgccacaattgaccctggagccactagcggatcaaacggggttagccttgtattcggagcagagaatgtaacgtttgagcttaattgtttagaccttccggcaatttacaagacagatgggtctattgatggcggacaggcgttcactatccagcctggaactggtaacaccaatgcatttaggaatatcaagttcagaggcaatgctaaaaactgctctgtaggatttggatcagatgtagctttgaatgatgctgcatctattcctctttcaggaatagatattgacattacagctgaagattgctatagggcatttgtcttcggtggcgcggcatacacctcaactccatcccaatttgcatttgccggcataaccggaaagattcgagctataaattgccaacagtctgttgtgctggctcgcgcagttggagtagacataaatgtcagcatcctttgcacgaaggataaatcagagcttatcaagcaccagtacaatagcagtgtatttgttaccgatataaaaggctcaaagagttgtaatgttgacatcacagggagaattgttaactctgactctatgctaagcatcggagggatagccatgtctggcggcataagttcttccactgaaaatattagactgcgccactctgtcaccttcagttcagcagcaacgcaagtttctgtagttgatttcggtggaggtacagtgtcaagttctgagttgcacctttctttcttgagttctggataccagccactaatcgacattggtggtaatagcgtatacattgatgggtgtctttctccggttgcgcttttgccaggcgacgagagttcgtttgtaccgaggtgccagcgcgcaacagttttgtatagatcgccaattacaggtgttaggtcgataaattttccatccaatccacttaaagggcaggtcgtcaaagcatatagaactagtgcggcgaccggaggtactctttcttttggtggattaataaatatgacagaaggaacgactcaggaagcgattttcgatggatcctcttggattcttctttaa

SEQ ID NO: 338756 - DNA, 1344 bp, Pseudomonas aeruginosa
atgcctgatcaccttccctacaccctgcaccttggcgactgcctgcaggtgctcaaaaccttccccgacaacagcttcgacagtgttgtcaccgaccctccctacgggctgacgacgaacaagaaaggcggaactggggtcgcctcgatcaatctcgacagcccctacggccgctctcgcatcggaaccggaaacggcgctggcggcttcatgggcatgaaatgggatagcgacgtgcctccggttgaggtctgggccgaatgccttcgcgtgctgaagccaggcggttatttgctggcgttcgccggaacccgcactcaacaccgcatggccgtccgcattgaggacgctggcttcgagatccgcgacatgatcgcgtgggtatacgggtctggcttcccgaagtcgaagaacctcgacggcgaccggcaaggctggggaaccgccctcaagcccgcactggagccgatcacagtggcgcgcaagccgctggtgggcacggtcgcggcgaacgtcctggcgcacggtaccggggcactgaatatcgacgcttgtcgcattccaaccgacgagactctgcgcgccggttctggcggaattccccgtcggcacgacgagcatgtaccacgcacgcggtccggcgaagccagcgccgagcgtcgctacattgaaaccggcggcaccaacttcgcaatgaagccagggccgcgcggcggcgatgctgcaggccgctggcccgcgaacctgatccacgacggaagcatcgaggtggtcgcgctgttcccagccgatgccgggcaggcggctccgctggcaacccgcaacagcgacaagacccgcaacagctacggcaccttcgccgtctcacctgatgcccatttctctcagcacgacgccggcggcagcgccgctcgcttcttctactgcgccaaggccagccgccgcgaccgcaacgaaggctgcgagcacatggagcgcaagccgctgcactggtccagcgggagccagaaccctggcagtttccagtcagatggcaccgacaagaccagccagaacaaccaccccacggtgaagccgacggacctgatggcctacctggtgcgcctggtcactccgccgggcggcaaggtgctcgacccattcacgggtagcggcagcaccggaaaggcagcggtacgcgaagggttcgagttcgtcggcatcgagcgcgagccgccctaccttgccatcgccgaggcgcgcatagcatacgaactcgagcgcgtcaccgccgccgcactggaaacagcagaagcagaggcgcaactcgatatctttcgagacgccaaggagcaaatcgcatga

SEQ ID NO: 338757 - DNA, 1911 bp, Pseudomonas aeruginosa
gtgagcaaggaactgaacaaggcaccggtagagcaggcaggcggggatgagcgcgacttccaggcagagggcgcacaggaggttccatcgccagtctcacaagagtatgaccgacatttgatcagtcttttgcgtaaaggtgaggcacttcctggccaccaggaggaggccgctgacgagatcgagcgcctgcgcgattggaatgatcacctgaacaacaccgttctacccaacatactcaatccaaatttcctgatgctcatgaagggtggcgagaggctgcttgacctgtgcacgaaggacggcaagttcattggcgtatcgctgaatgacatgaaggacgtgtttgattggatggtcacgcacgctcgaattgcacctgatcacgccgccctggcgcaaccctcccctatgcgctgccttgcgtgcggaggctatcacggcaatagcggattgccttgcccaaatatgcgcgtcactgcgcaagcgcaaccctccccagcgcaggccgagcagcactggccgaagctggaaaagcctgcccaggtaggagccattcgcttcagcgctggcgtgtcgtctcggctggtagtcgaagccgcccagcggctgtacgagttcgagtccactccggagaaagaggcggagcgcatcgagcggctccaggcgtttcgcgagcaactcgacccgctcaacctagccccgcatgcggaagcgttcaacgaagcgcccgctgaagcactcaagcctgagcaggcagaggcggagcggccggaaatgtcgtcagaacgggccgcgtacttcatgcgccgcttcaagtcagaagagaagctgctcggccccaatgagcaagcggcagtggactacgtgctgtcgctgatcgcccagcatgaacgcatcgtcggggtgctgcgggcggagatcgcagaatggcaagaagccgccgggagatctcgttctgatgtcgtggcgtacatcgcggagcgcgcaaagctgctggaagagcgcgacgccgccctggtcgaagtcgagcgcctgcgcgaatccaaaggtgatcctgttggtagcctcgaaaagtgcatgaaagtgatgtacgagcgcgacgaacacgctaagcggctggaagtcgcccaggccagggtcgcagatatgaaaactatggcagacaactattgcgcgctgctgatggacgccaacgccaaactggcggagcttgagaagcaggagccggtggcgaccgttgcgaaggtaccgggtgaagactggaacggccttcatttctatcgcgacctgcaaggcatgcagccgggcacgaagctctacgccgcccctgtagcccaggctcagcaactcaacgacctggacaaacagtgtcgcgatgacgtggcacgtgcgcttggtttgcgcccgaatcaggagcgcggcttcgcctggtcctacctgttggcgtcgatcaagtcatgcgtgaaggcctccggggatagcgcccaggctcagcacagcgtgccggaagagttcatcgggcgcctgtccgaattcctcgcgcagcgcggcgctaccgggaaagctctgctccgagaactgcgcgccatgctcgccgccgcgcccggcaaggaagtgccgcaggcatggctcgacgtgcaggcagagcgccgccggcagatcaccgccgagggctggacgccggagcacgacgacctctattgcgccgccgaacttccgcgcgccgcagcggcatacatcctcaacggagccaatgacgaagctccagctatctggccgttctcggcgaagtggtggaagccccgcgacgcgcgtgcgaactacatgcgggccggcgcattgatcctggccgagatagagcgcctggaccgcgccgccgagcgcggcaaggaggtaggtcatgaatga

SEQ ID NO: 338758 - DNA, 336 bp, Pseudomonas aeruginosa
atgaatgagatgaagcggtactactcgttcttcacaagccagccgggagattggcgcccatgctccaaggagcaccacgacatggtcagagcaagccctcaggactggccaggctatgaagttagggagttggcagttattcccgagggccatgtggtggtcagcgaggggctgttgcgcgaggcaaggcgacatctcggaaactggctggaactccacgagtgcgagtgcgaaggcggctttcattactgcgggcgcgaacaggtggcgaagacccatcgggaacttcgctccctgctcgacgaggggaaggaggatgatcgagatgaagcctga

SEQ ID NO: 338759 - DNA, 300 bp, Pseudomonas aeruginosa
atgaccgacaccaacaagctgaaggaacttgcagcccagtaccttgcaaatccatctggtactgctggcgaagactcggaattccgagccgccgccaaccctcaagccatcctcgggctgattgccgaggtggagcggctgcgcacggacgccgctcgctaccggtggctgcgagagcgagacctcgaaacgatcagacaaggcggcgtattcgccgggatgaccccggagaacatcgtactcaaccaggaagacctggacgctgaaatcgacgcagccctagaaggagcaacgcaatga

SEQ ID NO: 338760 - DNA, 309 bp, Pseudomonas aeruginosa
atgaacgaccgcacactactcgaactggcggcgcgggcggcggggctgaccgtgcatgaacatctcaacgatggcctatgggtcagctatggagacggccctaggttcggatggaaccctcgcgatgacgacggagaggcatttcgactggccgtaatgcatgaccttgagatccacagccccaaaaccaatccgacagtcatgtttaggaccgctgaggatgatgtcttctatcaggacacatgcattcgactagccatcctgcgcgccgccgccgagatcggcaagtctatgggaggtggggaatga

SEQ ID NO: 338761 - DNA, 1305 bp, Pseudomonas aeruginosa
gtgaataataatctgcgaagaattttgattgaatacatcttggcgacgagaaatgaaattaatatagatgtacatctttataagttaagtggtttacaaccgcgcgaacttggctatcttccccgcccaagcaaaggtctaggatttggtaaagtaggagtattctttttctacttgttgcgttacttttggcgctatggagcggcttattttttcttttatcttgaatggctgcgcctgcgtggtaaagttagaaaaaatggagccttcccatctttgaattttgatgttttcggattagcgttttcttatagggtagcagatctagcatcttcaagcataaaggggcagagtttctgttggctgaccgttccttggattagttttgagttgggagaggatagagcgataagcctttttgagtttcttgataaggatgacttgcgtcgagctttcatattgtcttgtatggcggtgcgtaagttaactattttacgaaagacaagaaattgggagcttcagggatatactgcattccgttggttttgtgtacgttttgctttagataaattgccggcaagctattttctaattggagagcacttcgatcgctgggctgttcttgttgatgctgtggtttcagcgaagaggcgaaataaatcggtaactaattcggataatggcattattatgctacaacatggttcattggcttctctgggcgaatgtaactctgttgaggaaacggactttccaataagtttgcctgttcgcctacggaatgttgtaaagctatacgtatttgatgatgcttcaagatttatctttcgtagatatgtcttttcaaagctttgtgcgctcagggatgaaagcgtagttatatataaacctcggctaaacttgacgcacttcaagcataccagacctgtgaatattttatttgtagggcatcctttgtgtgaaagtgcacatgttgatatttttcgggggctcacagatgagtttgttgtcggcttctattacaagcctcatccggttaatccatgttcttcgaaggttttcaaggaagaatgggttgtcatccgcgataaggcgcttttcccgaaggtagatatgttgatttcctatccgtccactctggtggaggagtacgagtcgatggggattcctggtatcattcatcctctaaacattcaaccctcttcggtgggggaagtatgtgattcggcctcgcggctattggaggcgctaggctgcgaaaggaaggttgaccgacagggccaggagtttttgaggaaaaaatga

SEQ ID NO: 338762 - DNA, 1044 bp, Pseudomonas aeruginosa
atgtccgaagctaaggacacactactcagactcatcgccctgctgcgcctaatcccccgagagccagctcgcatcgccactcccactctgcaggaaaagctcaaggacagtggcttcccggttagcctccgtacagtccagcgcgaccttgaacggctctctatcccttttgcattgcaatgcgacgaaagcgtctcgccatttcgctggagcttggcgcagaaagcacgcgttgatctgtcagctataaccccacctgtagcactggcgttgtacctcgctgaaggccatctgcagtcactactcccacaaagcatgctggatcagctcaccaccgaattccgtaaggcccacgattgcctcgacagcatggaacacaacggtctggcacactgggctcgcagggtgcgagcgcaccctaatggcaagtccttgcaacccgcacagatcgcctcgcaggtctgggaacagacctccaccgctctgctggaacacaaacagctgcaaatcaactacctaagccgcagcaaaaccgaactcaagcagctattgatccaccccgccggactagtttcgcgtcacgccatcagctacctgatcggcagcgtcgacggctatgacgacctacgacagttcgcgctgcaccgcatacaccaggctgagtgtctggacgcagcggcccgcgcccaggacgacttcgagatcgacagctacatccgccaagacctcaacaccactgcacctattgaacaggtagaactggtcgctgatgtatcaccgcagattgcctggttgcttagcgagacaccattgagcaatgagcaaagtctggagccgttagcagacagcaactggcaacgcctacgggccatcgtgccagacgatcaggagactctgtggtgggtgtttggcctgggggaaaatgtgcgggtgtgggaaccgcagcattgggctaccgatattcaaaagagagcctcccagatatcggcactctacggatacgcaatatctcctcacgtatccaactcgccaccgaccccctga

SEQ ID NO: 338763 - DNA, 864 bp, Pseudomonas aeruginosa
atgacacagcaatcactgcagtacgagcaactggaagaaaattgccacaacttcctacaggaaacttctctgaatgccaaaccagtcatagccgcctggggtttggtcaaagccgggaagagctcactactcaacatgctttccggacacatagaggacgagttcttcaagactggcgtggtgcgcaccactcgactgaaccaagaacttgaaacagcgcattaccgactgatggataccccaggcctcgacatcgaccaggctgacagccggcaagcccaaagtgggctggacaacgcggacgtggttctcttcgtccatgccccacccggagagctggatcaagaagaaatggaactgctgactcaggtcaaggcaacctatgctggggacaccgagaagcgcctggtgctggcagtgagtcaactggacaaggatcaggacggagcgatggagcttattcgccagcgcatcctggtgcagttgcgcgagcagctcgacattgagcctcagtgctttctgatatccaacagccgctaccgcaaaggcattgcccatggaaagcagaagatgatcagcagcagcggtatcccgcagttgatcgcccatctcgacgggctcgtccagtccatcgacgggaagctgcaaagtgtccgtgtcagccgccgggcagcacgcaaagccgagctcctggcggagctggagcagagcatcgcagccgaacgccagcagatcacccacttgcagcagccgtatgcgagcaaggcgcgagccttcaaccggatgatggcgaaactacgccagggctacaccgcacaaacggaaaaagtggccgccgtccagaaagaactcaatagcctctaa

SEQ ID NO: 338764 - DNA, 552 bp, Pseudomonas aeruginosa
atgcccataccctggcttatcggtgtcgcagtggtcgccgcggctgcagtcgtggtcaaagcggtcagcgatgatgacagcaagccctcgtctgactctggagatgccgaacgtcgcaaacaagagcgggaggcccgacgtaaacgtgaacaagatggcctttccacccaattggggaacctcaagttagagcgcctggaagaggctcgtaggctactcgcgctatccgcagaaaccctgtcacagctcccgcaagaggtgatggaactcagcacgcccgagctcgaagccgcccttatggccgaacagcaggccaactccgactatgcccagggcatgagtgcaatcctcagcattcccgaccatagtcgaaagtgcttgccccggaaggagcaagacgagttcctagtcaatctgcagatgctggaaagcctctatggccccatccccttcgacagtgaaggagaacgtgatctcaccgccctacggcaaactgaaatgcaactgaacaggctgatgcagctgaaacagcagatcgaagaacaaggttga

SEQ ID NO: 338765 - DNA, 1770 bp, Pseudomonas aeruginosa
atgcaagaacgctcaatctcccgcgatgaactgatggcctcgttccatcagctgcagacccagttcgaccagcagcgcagcaatatccacgacaaggaagcgcgcttcgaccaagctcgcaagagcttcgacgagcgccgaaaacaataccaccagggcctaggccagactcttgacagctataacccgctgagggttttaggcgacgatctcacttctgctctggatgggctcttcagcacctgggagaaacaggtggccgcccgcgtcaagggcactcgctttcgcgagggcttcggcgattcgttgctcgtattcatctacggcaaggtgaagtcaggcaagagttccctaggcaactacatggcctggggccacagcgagcccgatgcagagatcaaggcctgcatgcctctgcagccgacctatggctccgacgagcgtaccgatgtgatcagtggcgatcaggagcgcgaagccgagcaacacaggcagttccgcgtcggtgccaccgaggctactagctctatccagaggttcacactaccagggctgacctgggtggactcccctgggctgcactcggtcaacgcccgcaatggcgctctagccaaggagtacgtcgaacatgcggacctgattctctacaccatgagctcccaggccccggggcgcgcctccgacatgcaggaaatcgccggactgctggctgccaacaagaagctcatggttttgctcaccggcagcgacaccaccgatgaggacgaagacgagaatggcgagatcatcaccacggtggtgatgaaagatatctctgaccgctgcgaccagattgcctatgttcagggagagcttgggaaactggacaacagcgctagtgtgctagccgaagtgctgcccatctccactcgctacgccgaacgcaatccgacccccgagggtatggctgccagtggagtgggccgactactgcatgaactgcagaacatctgtcaggggcctgcccttgagcttaagctgaacacgccaatgagtaacctgcgccactcgattcactgcactaccaacgacctggccggagtgcgcgaagtcgttgctaagttctcagcaggcatcgagcaccaagacgacgcactgcagcgtgagctggccgaactgggagccaggggcgccagcgagatgcgcgcatatattcaccagctaatcgacacgagcggcaacgaagacctcgaagaggcgctacgcaagaaagccggagaaatgatcgcacaactggctcaggaggcctttgcacgtatcggtgagcgccaacaagaggggctgcgccaggctttcgacagcagccgcctagccggcctgcccgagtaccaggaaatcaccgaagagaaggagtacttcagcggtacccgcaaaggcaccaagaactggtggggcctagctggagccatagctggcggcgcagctggatttctggctggaggacctgctggggctgccattggcgcaggcttgggagccaacgccagcatctttggccgctcggccagcgccgagtacaaccgtcaccaagtcgtggtcggcgacaaccgcgaagaacgtcgacaggcggcgctggatcactacgcaaagacactgccggaattactaaccggtcatgtcaatgcgctttacacaccactgcgtactgccctgcaggaatactgcgagagcctgaaccgcgatatgaccgatctgatgaacaccctcgaacaactcgccaaggcagattga

SEQ ID NO: 338766 - DNA, 1644 bp, Pseudomonas aeruginosa
atgcaagacacccttctttccagcgctttttccgccttcgatggcatcgacgaaatcagcgccaagtacaacgcagccgggctcgcccccattcgcaagctggtggcggaaaagcgtgcctcgcccagcgcctcgatcatggtctatggcgtgtataacgctggtaaaagcaccctgatcaatgcgctactgggggccgagcgcgccaagatggctgaccgcccggaaaccgacatcgttaatcgctacccctggcgcgaattcgagattctcgatacccccggcatcgatgcccccatcagccacgaggaagtcacccgggaacagttgcatgcagcggatgtggtgatattcgtggtcaaccccttgggcgtgatcgaagaggccaagaccctctccaccctgctggaactggtggagcgcgacaagaaagtcgtagttgtattcaatagcaagaaccacctcgaacccatgatcgccgagcgcctcaaggacgaattgcgtcagcacctgcaggtcatggcccaagaacgcggaatgccaccagtactgcaggctattccgatcctcgaagtgaacgcaaaaagcgcgctgaaggccaaactggagggtaaggagaatctcctcgccagatccggcctgccgagcctcgaacgggacctctacaaattcctcggttcaatccagcacagcgaactggtcgcctccttcatcgctcgcctgaatggtttcattggcgaaaccattgagttactggatcggggccgcgcctcggacagcatggccgccattgacagcttctatgcagaggtggcccaacgcgaggtaagtctgcgggccaacctcaagtccctagcggaaaccaaggcagccttcatcgagcagcgcgcttttagtgctatcgccaatatgccagacagtgcccaggagcgagtcgagcaactgatccaaagtgccagcagcgaaatcctgaccgaactggagcaggagctgcacaaactggcgggtgatgcctcccggctactggacgagatgctggaaagcatcaaggtcgatggccaagtgcaaacatccaaggccggcttggtcgtgccaacagagggcggtgcagtgcctgtatccagcaacccaggctctagcttcgatttcggcctactggaaaccggcgcccggcaaatgggtagtctgctcaagcctgagcatgtggtcagcgcattgaaggtcggcaaggatctgctaccaagcctgttcaaaggtatcggccagaaaaccatggaaaaaattgccaccaaggtggtggggaaagtggttccagccatcggtctgactatccaggcagggcagattctctactccttcatagccaaagatcctgaggagaaacgcctggaagaggaagcacgcctgcgcacccaacaggaggagcggcggaatcaactcattcgcgagttgagcgaagagatcgcgtgggacttcaagaactccatcatcagcgtggtggacgagaacattcacggcaacttcgccgaagtcaatgccaagctacgggatattcgaaccggcttctccactgcagaacgcgagcgaagcgaagaccgcgcggccctggtgcaggctcaagcgatgctgcaggccaatggctga

SEQ ID NO: 338767 - DNA, 345 bp, Pseudomonas aeruginosa
atgtcagaagaaaacggtttcgctaaagacttttccgacgatggtttctggaacaaggtcgtcaaatatgccaaagctgccggccaggaggtcatcgagaaggcactgtggctttactacgcagcgcaaaacccgaaaaccccaacatgggcaaaagcgaccatctacggcgccttgggatacttcattctccccgtcgacgcgatccctgatgtcctccctggcgtgggttacactgacgacctcggcgtcatcgctgcggctatcactgccgtctccgtgtacatcactgacgaagtaaaacaacaagcctcgcaaaaactgcaggactggtttggcgcctga

SEQ ID NO: 338768 - DNA, 201 bp, Pseudomonas aeruginosa
atgccaataccgccccctccacttaccaccatctgcacgcactgtgactggaagcgcaccagctttccaaccagcgacgccctcaagctgaatgtctacttgttctgccgctgccccgtctgccagcacaccgaactggagatccgcccggccagccgcgcggaaatcatgcggaaacggctgagccaattccttcgctaa

SEQ ID NO: 338769 - DNA, 123 bp, Pseudomonas aeruginosa
atgctcaagaatcttcttgctacagtgggcctggccgtcgtgcttaaggccgcctttgaacactaccgcgagttccgggagttgaagcgcgaaaagcaggagcggacgacgccactcacctga

SEQ ID NO: 338770 - DNA, 1005 bp, Pseudomonas aeruginosa
atgaaatccacttcattgaaccgcagccccagcaaaccccgcccagccctacgcctgatcagcaccaaggaattgccccgtgaggactggctgcagatccgcaagcaaggcatcggcagttcggatgcagctgcggctgttggcctcaacccctacaaatcgcagctggaactctggatcgagaagaccggtcgcgatgccggcatgcccaaggccgaccctcacgacgaggaaagcccgatgtactggggcaatgtgctggaacccatcgtggcctggcattacagcaagcgcaccaagcacaaggtgcggcgcatcaacgccgtactgcagcacccggatcctgagctgtcctggatgctggccaacatcgaccgcgaggttgtcggggccgatggcgtgcaaatcctcgaatgcaagaccgccggcataaacggcgcacgcctctggaaagaggacgtgcccgagtacgtgcaactgcaggtcatgcaccagctcgccgtcaccggcaagcaggcagcggatgtggccgtattgctgggcggccagacgctggaaatccaccgtatcgagcgggatgagcagatgatcgctcgcctgatcgagctggagcgccagttctggcactacgtggagactgatacgccgccaccggctgatggcaccgcttcggcagagtcagcactgcgctgcctctacccggaggacaacggccaagtcgtcgacttcacccagcatgccgggctcagcgcggcttacgtcgaactgaaggctgttcgtcagtcgattgccgacaaggaaaaacgcgaggccgagctaaagcagatgctgcagcaggccatgggcgatgctagccgggcggagttctccaacggttacatcacctggcgcaaggccaaagacagtgtcggcttcgatgtcgcgcaactgctcaaagacaagccgcacctgcaggccaagtacccactgctgaaaacgggtgcacggcgcttcctggtcggctga

SEQ ID NO: 338771 - DNA, 183 bp, Pseudomonas aeruginosa
atgaagctactgctacgcacgttcgcagccgcgctcatgtttgccgggatcctggctggctgcctggcgatattgctactggttattctgatggtgcgctttccgctgttgctggctgcagtagcacttgcgtgttggatccttaaccgactaatgcaagccacagataaaaaatctcactga

SEQ ID NO: 338772 - DNA, 1383 bp, Pseudomonas aeruginosa
atgcatctgcggagttatgtgggggtagtcgattcacttcagaaagtcctcgacacccgtgaactgtcagcggctcgacaggcgctggacatcatccggaatcaggccgggcagagcccactgaacagaagtgtgctgcaggtacttcagccacagctggatcagcacctagacgaactgacccggcagcaccttcagcggcgcctggcagtcgatgtggaaaacgcacgcagccagtgccggcagtatctacaagccatccgtagccggacaccactgatccagacggaaaccactgtgcgcgaaaccctgcagcgcctgcagcagcgttacgagcagcttagtgaccagtgggatgaggcttacgagaagttttcctggtggaacaagattaagtattccgatggcccagatttcagcgaaatcgaccaggccatcaggcagctcaagaagatgcatgagcggttgaaggctgattacgccgacgaatttatccgcctcgataagcactttactgagctcgagaaccgtgccgaagcacgcatcaaggctagcgaacacgagattgagcagttcattgcccatggagtaacacgggagcaggagaaggaactgccgttcagggccgggtttatgctctcagccatgtcggtaccgttttccctgtggggtgacctcgccaccgctggcaatatttacgatgccctgcgaagggtcaacggcaactatgttgacatgagtgatggcgaaatctggttggaaaccctgtttatgcctggtgagagtctggccggactgacctcgctagcaaagggggcctattttgaacagctggtagcggctgatagcggcggtgctctgttcgaacacttcaataatcccggaaccgatattgtcatcgacggagtggcttaccagcttaaatccacttccagtgccgcgtatgtcaacagcgttgacgtcgatatcccaatcattgccacctcggaagtggccgagcagacccgtgcgatcgactcaggcttcagtaatattgagctggagcattccgtagacctcgcactcggtggctcagtgattgacaccaaggacaccgcccttgatgcactgcttgctggcgtcggcgggctcggaatgtttgccaccatccagggtatcaaccatgctgcagaactctacgaaaatggcggcgacggtgtagagtcgctttttgcaggtgcgggtgttgctattgaaggtaccgcacgtgcgctggttggaactgcagagctgggctacaaggtactcaactcggcccctagccgttttgtcggccgcacactgctggccggattcaaaaggctcgatgacaaaatgatggaggctggctctaagtccgaatga

SEQ ID NO: 338773 - DNA, 1140 bp, Pseudomonas aeruginosa
atgaccgccgtcgcagaacaggaggaaagtgcatccaacagcgctgaggggttcatcggacgcattccggtgcgcaacctctggctgctgatgctctacgcttctgatctgttccgcactcgcggtatcggcaagatcggcttggaagacagcccggacgatctaccggatctagttgcggagatccttgcccactcggttgaagtgcgacagcgtcgccgcttgagtcttggatatcgatctcgtgacgcagtcatcaatcgcgtgcgtggccggatcgacgtcttgaccaccgaacgccatcagttgatggatagaggcctggtggcgtgccggttcgacgaactcaccatcgacaccccacgcaattgtttcgtacgagcagcattggagtccatctccaggatcgttcagaggaaggacgttgcccatcggtgccgcgcacttgcggttggcatgaaggcaatgggtgtatcaggggacgcaccgacccgcgcccaaatgagcaccgatcgtttcggccgtaacgatgcggacgaccggttcatggtggcagccgcaaagctggcgttcgacctagtgctacctacggaggcgtcgggtgcgaatgtactctctctgccggacagagaagcgacgtgggtacgccgtttgttcgagcgggcggtgggcggcttctacgaagtcgtattgagtccgcagggctggcgggtgctatgcggcgggacgatgggctggcagatcgagcagaagacggcggggatcgacaagatcctgccgacgatgcgaactgatgtcgtgctcgaccacccgtcaaccgggcagcggatcgtcatcgataccaagttcacctcgattgttacgagcggttggtaccgtgaggaaactctgcgcagcggatacgtgtaccagatctacgcctatctgcgctctcaggttgggtgcggcaatgcgcttgcagatcgcgcgagcggattgttgttgcatcctgcgatcggtcagatggtcgacgagacagtagtaatccaggggcacagcattcgattcgctaccgtggatctgacggcgtcgacggcagatattcgattacaactgctacggttctttgacccgattaagtcaatgatgacgagcccatga

SEQ ID NO: 338774 - DNA, 2223 bp, Pseudomonas aeruginosa
atgaccactcagacgatagatagtgcaccgcatgcaacctggtttgtcggcgccagctacggcggtaccgatgatcagatgccgcgatttcttgcagaaggaatttgggagaacggctacgacgacaagctcctcgatgtggtgcgttccatgcgcccgggagagcggatcgccatcaagtcgtcttacacgagaaagcacggtctgcccttcgatagccgaggccgagcggtttcggttatgggcatcaaggcggtcggcacgatcaccgaaaacctgaacgacgggaagcgggtgaaggtggactgggccaaggtcgagccggtacgggagtggtacttctacactcaccgagcaacgatctggcgcgtgctgcccggcgaatggatgaacgatgcgctgattgcatttgcgtttgacggcaagccgcaggatgtggatcgctttcgcaacgagcccttttggcgtgagcgttacggcacgacttcgccagaaaagcagcgcttcgagtggacggacttctacgaggcagtggccgaaaagctgctggcccacgcagacgatcgaactccgctcatcgagggcatccacgagatcgcgtcccgggtgccggggctgacctatctccaggataagtttcccgatggaaccagtggtccgctgcgggacatttgcccgttcaccacgatgggcacctttaaccggtccatgaccgatgccaaccgcaagaccatcgcgggcgaacttgccaagttgctgggtgtgacggtgccggtcccgccttcattcgaaggcattcccgttctcaacaaccaacgttcctggtttttcgcctatgccgacaagcgtggtgcgggcgacatcgacgcgctatggaaggtattcgttgccgcgagcaagatggtcgatggcgaccagttggacactcgcgatgccttcatccgggcttatgacgaggcaacccaagtgtggggtgtcgcatggaacctttcgacaggtctctactgggcgcatccgtgggaattcctgaccctggatagccagtcgcgccactacatcaacaagcggctcggcctgaatgtcgccatcagtggccagcaaggcccatgtgatggtcgggcctatctgaagctgctggacgatttgcgttcgcgctttggcgaagacggctacccggtccacagtttcccggacttgtcgcttgcgtcctggatgtacaaagacccggttgacgagcctgtgccggctggcgatatcggtaccaatgccggagcagaacaggaaactgaaggtgaagttcgcgaagcctttcaggtggcagcgccaatcgttccctactcggtggaggacatcctcaaggacggctgtttcctggagcgggccgagattgaccgcttgctcgatcgtttgcgcacaaaaaagaacctcatctttcaggggcctccgggcacgggcaagacctggctggccaaacggctcgcgttcgcgctcatggggcagaaggacgacagcaaggtccgtgcagtgcagttccaccccaacctgtcctacgaggactttgttcgagggtggcgccccactggcgaaggcaagttgtcgctggcggacggtgtcttcatggaggccatcaaggccgcatcgaaggacccttcgtcgaagtttgtcgtggtgatcgaggagatcaaccgtggaaacccggcgcagatcttcggcgagttgctgacgctgcttgaggccggcaagcggacacccaacgaagcgctggaactctgctatccggatgcggacggcaaacgacgtcccgtccatattcccgagaatctctacgtggtcggcaccatgaatatcgccgaccgatcacttgcactggtcgatctggcattgcgtcgccgctttgctttcgttgggctggagccaagactgggccaggtttggcgggattgggtggtcaaggagtgtgctgtcgatccgggcttggtcgcggatatcgagcgccgtatcgccgagctgaacgaccagatcgcggcggacgcgcgccttggcaagcaattccgaattggtcacagctatgtgacccctgcacatcgactggaagccggagacacgaagaagtggttcctgcaggtcgtggaaacggagatcggcccgttgctggatgaatactggttcgacgcgcccgacgaagcacaaaaggcgattgcacggctgacgcagggctggtga

SEQ ID NO: 338775 - DNA, 1155 bp, Pseudomonas aeruginosa
atgattgaaagggatttgaagcccggctggcgtcgagtgaaatttggcgatgtggtacgactgtccaaggcacgtagcaaagacccgctggccgatggcattgaacgctacgtcggcctggaacatctagaaccgggtgacttgcgcattcgcagttggggcagcgtcgctgacggcgtgaccttcaccagcgtttttcaaccggggcaggtgctgttcggcaagcgacgcgcttaccagcgcaaggtggctgtggcggatttctctggggtgtgctccggcgacatctatgtgctggagaccaaggatgcgcaggtcttgctgccggagctgctgccattcatttgccagaccgatgccttcttcgatcacgccgtgggtacgtcggctggctccttgagcccccgcacgaactgggcgagtttggcggatttcgagttttcgctgccgccgatggatgagcagcgacgcgcagtgcgcatgcttttgtctgtggacgagcaaattgaggctgttctatgcgcactaagggccgcaaaaaaattaaggaaatcattcgcattagatgcattctccgcgcttgaatacccgaaggtaaagatgggagcggttgcagaaatcaagaacggctcaactcctcggcgggctaagaatgagtattggaaaggtaagattccttggctcccaaccggtaaggtaaatgaccgcgtgattctggaagctgacgaattcattaccgaacaggccctgtcggaatgcccgctgacattgattcccaaaggctcaacattagtcgccatgataggcgaaggacagactcgaggacgtgccgcaatgctcggcatagattcgtgtattaaccaaaacttcggcgctgtcattccaagcgcttcgcttgatccttggtatctcttttacctattggaatctaactatgaagctttgcggcattggtcgcagggcacaaatcagcacgcgctaagttgcgggctgctaaaaagctttccgatcccaattcctccaatagagatacagcgggggttagttggtcagctcaaggaaattgagactacggagagccagctggcaacgagactcggcgcaactcatgagatccgccgtgccgctcatctagccgcgttatcaatggagtag

SEQ ID NO: 338776 - DNA, 1893 bp, Pseudomonas aeruginosa
atgcgtagcgctaccgatctactggatgaactcaatgcggtagacgagtctgcccgtatcgaagccaagcgtgccagcgacatgggtaaatcggtgatggaaacggtcatcgcctttgccaacgagcccagcctggatggcggctacctgctactgggcgtggactgggcgatcaacgacaagggcgataccgtgtaccggccggtggggttgcccgatccggacaaggtgcagcgtgatctcgccagccagtgtgccagcatgctcaacgtcgctctgcggccagagatgcagttggagcaggtgggtggcaagacgctgctggtggtgtatgtgcccgaggctgacgtcactcacaaacccatctacaaaaaagctacgggcctaccaggcggcgcttaccgccgcatcggctcaagcgaccagcgctgcgtcgatgaagacctctgggtgttgcgcggtgaaagccagcccttgcatggccctgattcaagcattctttctgatgctcgcgccgacgactttgacccgaccgccattgccgcgtatcggcgtgagcgtgcccgcatcaacccccaggccgaagagctggactatggcgacgaagacatgctcgaagcgctgggggcactaaggcgtgtggatggtgctttgcaacccacattggctggcatcgttttgttcggtaaaccgctagccttgcgcaggctactgcccatggttcgtattgactacatacgtgtgccaggcaacgaatgggtcgaagatccagaaaatcgcttccaatccatcgacatacgcaagcctctgatactggcattgccgctcgccgaagccagcattattgatgagttacctaaaggctttcgcctgccagagggccagctacagagcgtgcaagagcccattctgccgcgcaaggtgatccgcgaggcgctggccaatgccgccatgcaccgcaactacaccctgcacagcccgacgcagatcattcgctacagcaaccgtatcgaaattcgtaacgtcggctactccctcaaggagccagcgcagctgggcttgccaggttcacgtctgcgcaacccagccattgcagcagtgctgcatgatctgcatctggccgaagccaagggtacggggattcgtgccatgcgtcgcctggctgcggatgcaggcttgccgctgccagagttccactcagaccggcaggccaatgaatttaagctcactctgtttctgcacaacctgctcaccgaagaagaccacacctggctgcgcaattatgccggcagcacactgggccccgccgaagccaaggtgctgatctatgtgcgggcaaccggcgcggtggataacaccgcttgccgcgacttctgcggctcggataccctggcagccagcatggtactgcgccggctgcgcgaccggggcctgcttgagaagcggggtgcaggcagtcgcacctattacaccctggccggtaatgagcctcgtccgactctggagagcgcacagtcagagctgccgttggatgtccccgcagacacccctcctgttggccagcctcagcctgcagaggcggtagcgggccagcaagcatgcaaccctcagcttgcaaccttgccgtctgagcttgcaaccttacttgcaaccttgcagggccggatcagcagcgaagccttgcgtaacggtatccgacgcctttgtcagtgggcgcctcagagtggcgaccaacttgcaaccttgctgggaaaagaccgcgactacctgcgtaacaagcatctgatccccatggtgcgtgacggccaattacgtttcctctacccggaaagcgccaaacatccacaccaggcgtatgttgccccagagggcgaggacaagagcaatgattga

SEQ ID NO: 338777 - DNA, 1632 bp, Pseudomonas aeruginosa
atgagttcggaccgcccattcaaagacaacaagatatttactgaagaactggctaatgctgcgcgcgctcgactgaaggaaaagtttgcccagatggaacaagagaaagctcgtagcaccaaacgcatcagccaacaagaactcgaaagctacctgtggggcgccgccgtgctgctgcgcggcctcatcgacgccggcgactacaagcagttcatcttcccactgctgttctacaagcgcatctcggatgtctgggacgaggaataccaggcggcgctggccaactcaggcggtgacctctcctacgcgcagttcgcggagaaccaccgcttccagattcccgagggcgcgcactggaacgatatacgccagaccccaaagaacgtcggtgccgccatccagaaggccatgcgcgccatcgagacggccaacccggatctgctcgatggcatcttcggcgatgccccttggaccaaccgcgagcgcctgccagatgaaacgctgaagaacctcatcgagcacttctcgacgcagacactctcggtggccaacgtccccgaagatgaattgggcaacgcctacgaatacctgatcaagaagttcgcggacgattccggccacacggcggctgagttctacaccaaccgtaccgtcgtccacttgatgacgcagcttctagcgccgcagaccggcgagtcgatctacgaccccacctgcggtactggtggtatgctgatctcggccttagatgaagtaaagcgcgcaggaggcgaataccgcacgctcaagctctacgggcaggagcgcaacctcatcacctcatccatcgcccgcatgaacctgttcctgcacggcgtggaggacttcgaaatcatccggggtgacaccctggccgaacccaagcacatcgaaggcgaccgcttgcgccagttcgatgtgatcctggccaacccgccgtactccatcaagcagtggaatcgcgaggcctggagcagtgacaagtggggccgcaactccctgggtacaccgccgcaaggccgcgccgattacgccttccagcagcatatcctgaccagcctcaccgccaaggggcgctgtgccgtgctctggccccacggtgtgctgttccgcaatgaagaacaggccatgcgcgccaagatggtcgagcaggactgggtcgaggctgtcatcggcttgggtcccaaccttttctataactccccgatggagtcgtgcatcctcatctgcaaccgcaagaaggccgccgcacgccagggcaaggtgatcttcatcgacgcggtgaacgaggtcacacgcgaacgggcgcagagcttcctcaagcccgaacatcagcagcgtattttggccgccttcaaagcttttgctgatgagcccggctttgccaaagtcgccaccttggccgaaatcggcgctaatgcgagcaacctctccatccctatgtacgtcaagcgtatagctgcagccgtagcggttgacggcaacggcgatgcggttaccttgcgctctacctgggagcaatggcaaaccgatggccgtgcgttttggcaacagatggatacgctggtcgaaacgctcgatggcctcgtcgctcaggaggctgccgatgcgtag

SEQ ID NO: 338778 - DNA, 1692 bp, Pseudomonas aeruginosa
atgtggctgtttaccaatttcggtttcttctcggtcgtaaagaaagacgaaagcgatgatctcaccgttcgcagccgcaccaagagcgacctggaccgtcttcgcaatcactatttgccctcgctctccgcctcccgagcccacgagggcaccgactacccctggcgagccacgacgtccgccttcgccctggcagaggcgatgagcgctattgcgcaggacattggctattcgaatttcaaggacgaagtagcacttggcctagggaaagatcgcgccaagcgctacggcaagatctggtcggcgctatacgacatgccggatgatctcagcgaaccccaccctgaaggctttgagagcctgccctggccacagagcgccggctctagcaaggcagttgcttatggcggcgtggtgatcgaccccaatggcaacctgcttttgcgcgaggtgaaaaaccatttcgatggctacgtttggacgttcgctaaaggtcgggcggataaaggcgaaagccccaggcagactgcactccgcgaggtgcgtgaagagatgggcatagaagcctccattctcaccgccatcagcggcgagtttgtcggcggcaccacgatcaaccgtttcttcctgatgctgacagaccgaggaacgccagaccttgcctttggtaaccgggagaccgagcgcctctgctgggcaaccccggaggaagccaagcgactgatcgcccaaacaaccaacagtaaaggacagcagcgcgaccttgccatcctggaagccacactggcccttctgcctgccacaccgcctctgaaacgcgccatagctcgacgggccgactggaaaagcagatacatgcccgccacccgaatcacgttgccgctggaaacccgctactcgcttcaagagatggccacaatcatccgtggcttcgtgccggctgcgatggaagagaagtggttcatcttctacgaagacggcatgttgcactgtcaccgcagctggactggcatctgcattttccgggttcacttcaagccctgcggcgacgcatggcaggcatggcaggtggaaatcaaccggcaccctgggcagtacacagcaaccgatgaacgcgaggatctggcgcaactggactcgctcatcgaaaacctactgatccatggccccaccgagcccactgtcaatggctttgctcaggcgttgctgcagacaactcagcctggctatctggggtcacctcaagtagtaggcgagctgctgcaagagctgtttattgccatcgtcgaagaacagcaaggcaccgcccaaaaaggggcgtccttggctgttatccacaagcattccctgattttttccgaagacactgagggctatacacggatgcctggctggcacagcgcagatcaactgggcaaagctctagtgcgcttctgcaacctagatgaggattattgcgaaggcgaaaacctctgctgcctggtcgcagaaggattagctgcactgaagttaaaaattatcgaactgctgcaggccttcgaggcagatgacgacgcgcaatgggagcgagacgccctgcctcagctcaacgaagtgcaccactttgccacagcggtgctgcttggcagcaacagcgtgacccatccagagctcacactcagggacttcagctggaaattatcgaaagcctga

SEQ ID NO: 338779 - DNA, 657 bp, Pseudomonas aeruginosa
atgttacgtcatcatcaaaacaaaaatctactcattcattatgggggtgactattgtggactgccagtccagagcgataaggggccattttttcagcagtatctagaaaagcttcttggtgtgattgatagtgctcttcagcagtactctagagtgttggcttttaggattgacctgaggtttccagttggaatcactctcccagatgaccattgcactaataaggtaatagagcgctttataaagtcgctcaaggcgaagatttccaataatcggaaaaatgcacgtcaagagaacaaatatgcacatgacagcgttgtgcgattcgtatggacgcgggaagttgggtcgaatggaaagccacactatcacatggctattttgctgaattttgatgcgtttaatgccctcggtaaatttgagacaggaagggacaacatgttcaatcgtctcgaacaggcgtgggcaagtgccttgggcttatcagtggaggccgtcagagggctggtggagataccggccaattctgcctactgcctacgtcgtaatgatccacagagtcaggccgattttttctatagggccagctacctctgcaaggttgctaccaaggtctacgggaatggcctgcatggtttcggggcaagtaggctctga

SEQ ID NO: 338780 - DNA, 534 bp, Pseudomonas aeruginosa
atgacgcgagagtgtcacgtacggttctgcgagcggctgcgggggcagttcccgcggccgactcaccacttcggcatgaaggcgcacatcggcgtggatgacgagtcgggtttggtgcacagcgtagtaggcactgccgccaacgtggcggacgttacccaagtcgacaagttgttgcatggcgaggaaaacgtggtctgcgctgatgccggttataccggtgtcgagaagcgtgccgaacatgatggtcgtgaggtgatctggcaggtggcggcacggcgcagcacttacaagaaactgggcaagagcagcccgctttacaaagccaggcgcaagatcgagaaggccaaagcccaggtgcgggccaaggtcgaacacccgttccgggtgatcaagcgccaatttggctatgtgaagacgcgcttccgtggcctggcaaagaacaccgcgcaactggtgacactgttcgcgctgtcgaatctgtggatggctcgacgacatttactgacgaatgcaggagaggtgcgcctgtaa

SEQ ID NO: 338781 - DNA, 540 bp, Pseudomonas aeruginosa
atgaagcagatgaccttcgccgatgccgagtacgccggcaagcgcaagcagacccgcaaagagctgttcctgatcgagatggatcgggtggtgccctggaaggggctgatagccctgatcgaaccgcactaccccaagggtgaaggcggccgtccggcctatccgctgatggcgatgctgcgggtgcatctgctgcagaactggtttggctacagcgatccggcgatggaagaggcgctgtacgagaccactatcctgcgccagttcgctgggctgaacctggagcgtatccccgacgaaaccaccatcctgaacttccgtcgcctgctggagaaacacgaactggctgccggcatcctggccgtgatcaatggctacctgggcgaccgaggtttgtcgctgcgccaaggcaccatcgtcgatgccacgctgatcaatgcgccgagttcgaccaagaataaagacggcaaacgcgacccggaaatgcaccagaccaagaagggtaaccagtactgtgtgtcacgaacacaggtcagatga

SEQ ID NO: 338782 - DNA, 2187 bp, Pseudomonas aeruginosa
atgcggttgttcatagcggagaaaccccagctgggccaggtgatcgccgaagcgctgggcggcggtcaacgtcgaggcggcagtatccagtgtggtcaggacgtggtgacctggtgcgttgggcacctactcgaactggccccgccggaagtgcacaacccggagtacgcgaagtggaatgcggaggatttgccgctgaagctgcgcccggtgaagtaccagccgattgccggaacggcggaccagttgggggtggtggggcaattgatcgcccaggctgatgagatcgtgcatgccggtgacccggatgaagaggggcagttgctggtggacgaggtgttggcttatttcggcaacagtcgaccggtgaagcggatcctgatcaacgacctgaacgcagccgcggcacggaaggcgctgggtaacctacgcgacaacagcgagttccttgggttgtcgctgcggggccaggcgcggagcatcgctgatcagctctacggcttcaacatgacgcgggcgtacagcttggcggcgcaggcgcgggggggccgaggagtgttgtcggtggggcgggtgcagacgccgatcctgggcttgatcgtgagtcgctatctcgcacgtgcggctcacaaggccaccttctacttcaacgtgtcggcagcgttcgactttaccgggcggatccgagcacgcttgcaggtcgccgccgacgcgccggttgacgaaaaggggcggatcctcgaggaggcttatgccaacggtatcgtgagtgcttgtcgtggtcggccggcccaggtcgggtctgtcgtccaggaggaaaagtcacaggctgcaccgttgccgttctcgcttctggaccttcaggtgcagatgagccggcatgggatcgatgcggagaagaccttggcgatcacccaggcgctgcgcgagaaacacaaggcgatcacctacaaccgttcggactgcaactacctgtccaccgagcagcatgccgaggcaccgggaacgctggcggcgttatcgcaagcactaccggagctacggacgaccttcgagcagcttgacccaggacgtaaggggcgggctttcaacgattcgaaggtgtcggcgcataccgcgatcatcccgaccgcggtggtggtggacatgaaggcgctgagtgccgatgagcaagcggtctacttagcgatcgtcaggcagtacctggtgcagttcatgggcgagaagcggtatttggccgtgaaggcgctgtttgaggtgcaggggcatgtattcgaggcgagcgcgaccaagaccaccgcgccgggctggacacagttgctgcgcgaggtagccgatgaggcgagccaggccagcgaagaagatgagggcgaggtggaggctacgcagttcgaggagctgtcggctctcgctggaggggagcaaggccgttgcctggatgtatcggtttccagggcgaagaccaagccgttgccgctctacacccaagcatcattactggaagacctaaaacaggtggccaagtatgtgcaggatcctcgcattaacgcgctattgctggaacgcgatgaaggcaaagccagtgaacgcggtggcatcggcacgccggctacccgggcagcgatgctaggcaagttgcgggaacgcggtttctacacgatcgagaagaacaaactggttccgacggccctcggagtggccttcatccaggccctgccgcggatcgcaacaacccccgacatgacggcgctgtggcatgagcagcaagtgatgatcgagcgtggcgagctgtccgtcgatgccttcctggacgagctggaggccttcatcggtgagcagatcagcacgatcgatctcggcgacatgcccattgccggacgtgctggggtcgagccgctggcggcgcgctgccccatgtgcggtggcgagctggcaagaacggcaaaggtggtggggtgcaaggggtgcgagtttcgcgtgtacccgagcatcgccggcaaagagctgaccactagtcacctcgaaagcctgctcagcaagggcaagaccagtttgatcaagggattcaagagcaaagagggcaaggccttcgacgccgccctgcgcctcgatggccaaggaaaggttgtgttcgatttcccgaagaccagcaagaccagcaagaccagcgggaagcgttacgcgtaa

SEQ ID NO: 338783 - DNA, 678 bp, Pseudomonas aeruginosa
atgtgtggcaggctttcgcagtacacagggcttcatgatttcgtcgacgcactgtcgatgcccaacgcgctggtcaacctcgtcggcgagcagcccgagcgctacaacgtcgcgccatcgacggccgtgacgacgctacggctcgaaggcgatgccctggtcgcccaggccattcgctggggctggaggccgttctgggcccgtgatcgctcggcgccgatcaacgccagggtcgagaaagtggcgcatggacgcttcttcagcgccgcgtggcgccatcgcgcgctgacgccggtcagcggctggttcgagtgggttgacgaaggcggcacgcggaaacagccgtatcacatccagcacgccgacggctcgccggtcttgtgcgccgcgatcgggcagttccccgggctcgatgatgatgagcaggccgagcagcatggattcgtgatcatcaccgcggactctgccggcggcatggtcgacattcacgaccggagaccggtcgtgctcccacccgatctggcccgcgagtggctgaacccggcgacgccgccagagcgcgccgaacagatcgtcctgcaccagggcgaacccgccgaggcgttcacctggtacgcggtcagccgcgacgtcggcaacgtacgcaaccagggcgcctacctgatcgagcctgcgtag

SEQ ID NO: 338784 - DNA, 1128 bp, Pseudomonas aeruginosa
atgatttatggctctgcggggcttcaaggcgtgccgtgggagctacctatcaaagcgttccgggaggcgctgggtaaggagcaatttgatgtgctgcagacctaccctgagcgtttcttcgagtttgttgagcacaacgacaagctcttctccgctgagtccaaatccgatgcgttgctctccatggtgggggctgctgcgttccgactccaactgctaatcgccaaaaaccttgaggtctcggaaattgacgacctagcaggcaaaggtgtcgctgaaattgagcaagcgttagcggaagcagagaatcttgtggatggtatagctctcgacgatcggctcaccgacgttgacgttgctaatgcagccgcaagcactgcagaagccatagcgaccgaggcgcccaccacgatcgaccttttcatccagtcggctgaccggcaccacctgatcccaagattcgctaaccttctggccaagttggccgtcaagcagttcttcttgtatgcagacgtaaccggcatcgtttttgctggctacgggaaagaggactatttcccgtcgctggaggtatatgaatgcttcgggtttctcggcgaacgtctgattttttcacgcgacgacaacagtcgagccatgagcgccaactctccggcggttatccagccttttgctaccactcacatgattgacacctttcgtacgggggtgtcactcgatgtgttcggtgcgatgcacgatgccaacatgtcagcgctccgagacgtaggcagaaaggtcctggctgaatgtggggcgcaaacccccataacagaagagcggcttgaagaattggcaaccgaggtgcaccaagcgcacgccgacaagtggtatcagcagatgcgcaatcagcatgtctttccgctgtctagtgttgtaaattcgctgcccctgccggacatggcggctttggcaaaaagcctgattgagctagagtccttgaaagagagggttaccaagcctagcgagtctgtctccgggccgatagacgtagccgtgatcagcaagcatgacggctttgtctggatcgacagaaagcactatttcagacctgagctgaaccctagattttttaaacgagcagactga

SEQ ID NO: 338785 - DNA, 237 bp, Pseudomonas aeruginosa
atgatgatcgatgccgaacccctcaaaccgtacattgcagccgtcgagcaggcccgtaaggactggcagtctgtaggcgctgcctacgatgccgccccggcggagaagagaggcgagttgttcgccgtgaaattcccgcaggccgagcaagcttattaccgggcctgcgaagagctggcgtctgtagttcgcgcccaggtgaaggacgccgaagccaagtccgccgactgcgcataa

SEQ ID NO: 338786 - DNA, 336 bp, Pseudomonas aeruginosa
atgaacaaagaatcgaagcctgtggcagccgaagcagaaacactgccctgcacacaccctttcctagagacgctggcagagctggccacctggtgcttcctcaccttcggtgttgtggcctgcctgctgttctggatgggcatgattgactggagcccattggatgccattgacgcaatcaacaggccttcggttgagagctttatcagcctggaacaggtggccgctgcactggatcttgttcgccccttcatcggcggactggtctggttattctgcggaggactgccggcactcgcggcggcgctcttcctaagaaaaatcgcccagggctga

SEQ ID NO: 338787 - DNA, 219 bp, Pseudomonas aeruginosa
atgcctatcgaaccacgcacccttgccgccgtcttcacccaggtcgcccgctgccttgagggacacgatctggcactggagacgctggatgcctacagagcagacgcggccgccggcttgctgaccgtagaccgtctgcgcggctttctacagggactgagcgctgccggggcgcttccctatgaagactactgcgaagtggatgccgccctggcgtga

SEQ ID NO: 338788 - DNA, 186 bp, Pseudomonas aeruginosa
atgaacaaagaatcgaagcctgtggcggctgaagcagagacaccgcctcgcaaacaccctttccaaaagatgctgccagaactggcggtctggtgcctcctcgccttcggcgttgtcggcagcctgctgctttggatgcacatcatatgggtgcacatcattcctcgcgctgtaggagcgaactga

SEQ ID NO: 338789 - DNA, 228 bp, Pseudomonas aeruginosa
atgaacgtaggattctacagcgatcgtggccagctgctggacgagtccaggatctcatgcagccgtgcggagtatcaccttgaggacctggcccgcgaggctcaggacttggcgaatgagtgccgttgcacagttgtggcgtggatccgcaacgaagacggcgaaccgatgtaccgccttggtatcgaggtggatccacgaacagacacaggacacttagccccatga

SEQ ID NO: 338790 - DNA, 345 bp, Pseudomonas aeruginosa
atggatgattcatcttccaaaccctttttcatcgctttgctggccgggggcgctcttctactggctggaatcgctataggcgtggtcggcacgacagcggctgtaaaaagtgagtggcttgtgcttggccggtcgagcgctgagagccagtccatttcagctccgaagctggagtatgaagagaaccagggggtggattcgatcctctgcattgacggccgtgcctacaaagtgcgtctcggcactcaggaactcatgcacaggctggaggagcttccacgtactcaaagcattaggcaataccagctcaagcccatcccctgcgcagctcttcataaatcgtga

SEQ ID NO: 338791 - DNA, 1941 bp, Pseudomonas aeruginosa
atgaatacctcagcaccttggatggatagcctgcaaaaggcggtgcggcggggactcatggcgctctacaaggagccgccgaagacgccggtggagtgggccaacgagcacttctacctgtctagcgaatcgtcctatcaggagggacgctgggagacgttaccgttccaggtagcgatcctgaacgcgatgggtaacgacgagatccgtacggtcaacgtgctcaagtcggcacgggtcggatacagcaagatgctgctggtggcggcggcctaccagatcgagcacaagcggcggaacatcctgttcctggtgcccagcgatgcgagtgccgccgagttcatgaagtcccagatcgagaccatggtgcgggacgtaccgccattgcgagacttggcgccgtggtatggcaaggcgaaccaccgtgacagcacgttgaacctgaaacgcttcagccatggtaagcagctctggtgccggggcggcaaggcagcgaagaactatcgcgagttgtccgccgatacagtcatctacgacgaactggcggcgttcgattcggacgtggagaaggaaggttcgccgctgtttctgggtgataagcggatcgagggttcgacgtttccgaagtcgattcgtggtagcacgccgaaaattcacggccccgtggatgagggcggctgccagatggagacggcggccaatgcttctccgcatctaatgcgtctgcatgtgccttgcccgcattgtggcgccgagcaggcgctgaagtggggcggcaaggattgcgcctttggcatcaagtgggatggggataatccatcggctgcttggtacgtgtgcgaagccaatggttgcgttgtgcagcagcatgaaatgcaggcccagcagtcgaaaggccgctggatatgcgagcggacaggcatctggacgcgagactcgcaggatttcttcgacgcggacggagagacgatccctgttcctgactcgctgagcttccatgtttggacggcgtacagcccgttcgtatcgtgggggcgcatcgtgctggacttcctgcaggcgaagaaggatgtcaacggtctgaagacctggaccaacaccaccctcggggagacctgggtggaggatcagggggacaagatcgagtgggaacttctctatggtcgtcgtgaggtctggaatcatctcccctctagagtggtggccctgacggggttcatcgacactcaggacgatcgctacgaggcgcgtatctgggcgtgggctgcgggcgaggaaggttggctggtggatcgttggatcctgtacggcgaccctgcgagtcaggagttgaagcgcaaggttgggctcaggcttcaccagcagtaccagcgtgaagatggtgtgagcatgcgggtggccctgtggggatgggattcgggcggccaccatcgtgatgatgtgtacgccgaaagcaagaagcatggtcttctctgggtgataccgaccaaggggcacagtgtttacgacaagccgattgccgacttcccgcgcaagaagaacaaggatggcgtctacctgaccatgatcggcacggacaacgccaaggaactgatctacagccgcttgaagctgcagccccaacccggcgccatcgtgcctggggtattgcacctgccggccaacgacgacatctgcgatgagagcgagctcaagcagctcaccgcggaaaccaaagtgatgaagatcgagaagggcaagcgggtgtaccgctgggatgacaagggaaggcgcaacgaggcgctggactgtgtggtcggcgccctggcgatgttgcgtgtggcgcagcagcgcttcggcctggtgcttgaggttccatccacagccgttacggctccatcgcctgtggtgacaagcaaacgccgcagcaccggcagcggctatctgaaacaacgtcgataa

SEQ ID NO: 338792 - DNA, 546 bp, Pseudomonas aeruginosa
atgagcacagaagacctccagaaaaagcgcggctggctgaacaagtcggaaatggccgcgagcctcggtatttcacctcaagcctttgaccgatggggggttgcccctgtctccaaggttggccgcgaggtgttctacaccgcagaggcggtgctacggaaccgactcgagcaccaggctcggaaacaacaaccagcggggatggatgccgagggtattgatccgctggccgaacagaagctggtacaggagcgtttgcggctgacggcggcgcaggcgtatgcgcaagagcagaagaaccaggtcaatgacaagcagttggcgccggctgatttcgccatattcgcgctgagtaagctggctgcgcagatcggctcgatccttgacaccgtgccgctgaagattcgccgccgccatcccgacctggaggcgcgtcacatcgaatcattgcaacgagaggtcgccttggcgcgaaacaccgccgccgagttgggcgaacaactgccggagttactggatgaatacctcagcaccttggatggatag

SEQ ID NO: 338793 - DNA, 333 bp, Pseudomonas aeruginosa
gtggcgcgcgccctggacctccagggcttggccgagttgtcgggtttgcagttcgatgtcggcgacgcggccgagttggcgttgctgttcagcgagaacgccggcctgcaggtcgatcatctgctgattacggtcacgctcctgctcggcgacggtggcgcgacctctatcagcggcaagctggagcctcaagtgatccatccgccaaagcaacagcgcgacaccaagggcagcaatagaccagaacttcaaattcatctttacgtatccacgctgactaattacccgttgcccgcaccgactttttctgatgaccagccaagcatttgctaa

SEQ ID NO: 338794 - DNA, 1113 bp, Pseudomonas aeruginosa
atgctcaagccaatgtttggcgtcgttgctctgacgctcttgaccagtcatacaacgctgggcgctacggtgaccggcggtggtgcttccatgccggccaagttgtacaaaggttctgccgacagcatcctgccaatcaacttcagctatgccgcaagcggcagcggcattggcaagaccgctttcctgatgaataaccccatgctgcttggcgctactaccggcaccgtccactacattggtagtgactcgatcttgagtagcagcgaactgagcgcctattcaaccaactatagaggcgcatatggtccactgatccagattccattggcgggtaccgcagtaaccattccttacaagaagcccgacattaccgacctgaacctgaccagtgcccagctctgcgatgccttttccggcgccaaggtcacttgggggcaactattggggaaccccgccgaccgtacgccgattcgtatcgtctaccagcggggcggcagtggagccaccgagttgctgacccgccacctgaactcggtctgcccgactcgcttcgccaccaactcgatcttcacgaacgcccgtctgccggccggcggtgcgctgccgagcaactgggtggcagtacagccttatgaaagtgtcaggaatgccgtcgacaatgtgtcaggctcgatcggctatgaggggcctgatggtgtggacctgagcgacaattcaaagatcgcgcgagtgaatggcttgctccctactctagccaatcgcgtgatcgctgttcgtagcgtggctccgccgggtgtcgctgcagatcgcgccgatccgagcaagtggataccggtcttcgtcaacccgaacgcaggctactccatcgtcggctataccaactttgtctttggccagtgctacaaggatgccactgttgccgccgacctgcgtgccttccttacccagcattatggcggcaccactacaaatagagcggtagctgaccaccgtttcgtacccctggtcgcttcctggaagagcgccatcatgagcgccttcatcactggtaccagcgaaaacctcgcgatcaacaatccctccgtctgcaacggcaaagggcgtccatga

SEQ ID NO: 338795 - DNA, 1902 bp, Pseudomonas aeruginosa
gtggccctgggtgcccaggtagccaccgacctccagcaggccgccagcggtgtaccagcggtcgctggcatagccgttggtgccggcaggcacccgtaccaggtcgcgcacgtcgacccacacgtcctggctgttcagaccgccgccctcgcggttgaccgaggcgtcgcgctgctcgttgccgcgcacgttgaccttgatgctgttggtctccatcgccacctgcacgccttgcgcgccggagacatcgatcaccgcgccgtcgcgcagcagcgcgcgctggccagcgttgaccgccacctggccaccgctggcgagggtgatggagccgtcgcggaaatcgacgctgccggcggagtcgatctccacccgcgacaggtcgcggcggtcgtcgtcgccccgactgacggcggcactggagccgttcaacggcttgagcaaggcctcgcgctggctgtcgagggcggcgctgccgctgctatccaccaggatggcgctggtggcgccttcggccagggtgatccgctcgctggccttcaggtgcagggtgccgcggctgtccaccgaactgctggaaagcaatacgccggcctgctccacctcgcggccgctgaggctgatatcgccggtggcggcctgcaccaggccgctgttgcgcacccggccggcactgctgtcggcggcgaagcccggcagcacctcgttaccgcgggtggtggaggtcaggttgccgtcggtgccctggccacggcggatgacgaagctgtcgccggcggacaggaccgtctgccccttcggtgtgacgatgctgccggcgttgtccacctcgctgccgagcagcaggacgtagccgccgcccctggtcgagccggacggcgctgccgtacgcaactgtgcgccctgctccacgcgcacggcgccggccgcgtcggtgaaggtcggacggctgccggcgttgtcgtagtagaggccgcgctgacggaactgttcgtccgagatgttcgccgccgccaccgtcaggttgcgcacgtccacctggctgctgccggaaaacaccacgccgttgcggttgaccagcatcaccgtgccgtcggccttgatctgcccctggatctggctgggccgcgcgctggggtcgttgacccggttgagcagcgcccagtcggcgtgctgctggaagtccacggtggtgttgcggccgacgttgaaggtctcccagttgagcaccgccttgtcggcggtctgctcgatgctcaccgtggtcttgccggcggcctgggtctgcaccggtcccttggcgttctgccaggcctgctcgaacggcagcgaggcgtcgaccttgaggccgccctcgccgagcccgtccggaacatcctgcgggagattcagcgccgcctggcgtccggcggcctgggcggcctgctgggcggcaatggcggcgacggtgttgttcaggttggccatcgaacgctgcaactgctggttgacccgctgctgctgcgccagcggcggcggcgcccccggcaactgcgctcccggtcgcggcgccccggcagcgccgccctgagccgcgcccttggcggcgaaccaggcggcgctgaacggctgcccggcggcctgggcgccccctgcgaccagcagcagggcgatggcctgggccagcggcttcaggcgcggcgcgtaaagcgcgcgggaggaacgggcggacgacggcgaacgggacggcatggcgaaggggtccttgagcatgaagtcggtcgggcgcccgcaacgacgcccgttactggtagacggcctggcggagggtgggccgaagacttgtcatggaaagttcatggagcggagcgaggagcctgggcgaacggaaacacgacggcagccggatttcagccaccgtcatga

SEQ ID NO: 338796 - DNA, 1476 bp, Pseudomonas aeruginosa
ttgctcgccgtattcgacgtagggcagcgtgccaatggcgatacggctggcgcctattgcattcagatcgtccgcaaccaacgacacgccagcgaaatcggagtcgggcagcccaccttcaggcagaatctcgatgcccgcctcggcatccacgatgaggctgccgccatatccgctttcttccggcgtgaagtcgaccttcccctcgaagctcagggcgttttcccgaagctcctcatccgcgcgcaatcccaggtagagggatctggcatccactggcaacatcgctctggggatgttcttgcgcgcggcatcggcgcgaatgaaatccgcatagctcatttcgttgtactgcgagtagcggcgcagcgtatcggcggaagacaggatgacctgacggctcagactgtcgcggatggacgtgccggcaatcgacaactgcccggacgtcgcccaggagccattgcgcaacccctgcgtcgccatgggcgcgccttgccccgccagaccgttgatctcgacgcggaaagcgcccggcaacagggcataggtcgaaggcagcaaggtgtaggtaccggcggccaggccgggaacgccatccccgatggtgacctgttgcccgaccaacggctggatggcgcccgcctcgccgcccaatggcgcactaacggcctggtgtccaggcacgatggcatacaccgggttgctggacagctccggcagacggaacccatcattgtcctgctgcaccaggggatgaaaacgcgcatcggtcgaaccccctctgccggagatgaatccagcccccgcgagttcgccgccgccggacaggtccagccgcgcgccctgttgcacatcgacctcgctggcataaaggccgactcccgcaaccagtgtcccagcagcgagagcgcccccggcaccggtcagttgaatggggacctggttgaccagatagttgatcccatcggtcgtgcctccatagggcatgaccagctcagcgccgctaaccgaggtcaggctacccggcaacaaccttaccgtgcccggggcacgatccagattgctgccgaactggatgagccccagcggcgcacgcaccacgccaccctgctcgatattcgatgccatgaacgccagactgccgaataccgacagcggagtgtccggcaaggactcgccgctacgttcgatagccaaatgccgttcggcatcgaagacagcctgccccccctcatccagtccatacccggcatagagggtcgaactcgctcccgtcaccggatagagttgggccgcagtcagttgcagatcgccgtgggttatcaagcgccccgacggatcgccattctctggatagtcgccagcgaaacgcaggtcgccctcgctgcgcagcgttaccttctcgaaacctggtcgctgatagcggacagcctctgcgttgaccccattgatcaccccgtcgctaccgaatga

SEQ ID NO: 338797 - DNA, 627 bp, Pseudomonas aeruginosa
atgcgcatccagcagcgcgttgccacccaggctcaggccgcggccgccggccaggcggatctcgccgacctgcgcgccgctggcgtccaccgttccgctcacgccgagctggccattgtcgagggacacctcgatgcgatgcgccttcaggccgtcgccgatctgcaggtcgccttgcttgagctggaagcgccgcgcgccgaagacctcgccctggttcaggcgctggttcaaggcggtgaactgctcgctcaggctgccgccatcgcccaggcgctgggcgcggatctccagctcgccaccgaggaacggcacgcgggtgccgccggcatcgtagtcgccgctggcgccacccagtatgcggccctgcaggtccaccaccccggcgtcctcggccaacgccacggcgctcagggtaccgccgcggttgttgcgcgccgacaggtcgatcagcgaaccggcggcctggcggatgtcgccggcgcgactgctcagcagcaggtcgccaccccagctgtatttatccacatcgttgaaactggccttgcgtccggccaggtcaatgcgcgcgccatcgcccagctccaggtcgtcttcggcgctcaggctcagcttgccgctgggtag

SEQ ID NO: 338798 - DNA, 144 bp, Pseudomonas aeruginosa
atgcgccgcggcggggtgtacaccacggtggtctgggaaccgcgaccggcgttgatgtcgccttccgccgaccaggccaatatactgccgccgaaggtggtcatgatgcggctctggccgagcaggatgctgtcccgcgagtag

SEQ ID NO: 338799 - DNA, 1788 bp, Pseudomonas aeruginosa
atggccggccagttcgccgcccagctgcaggcggccgtcacctgccgccgagccggtattggccgacagcgtcaggtcgccgcccttgccgcccacctgtttgccatcggcgagcagcgcggccccggacgacacgtcgatccggctgccatcgcccagcgacaggtcgccgctgctacgcagggaaatccgcccgccgtcgagatgagctcgatcggcatccacgccgccctgcgcctggttgctccagaagccacgcgcatccagcgtcacgccatcgcccagggtcagggcggcacgctggccggcggcgggggtgagataggtatcgatccgctcgccacgggctacctccacctgctccagcacgttgcccaggcgcaaactgccggcgcgcgccgtgaggtcggcgttcacctcgacctcgggcgcgtacaggacgatctcgccgccatcgctgacctgcagggcattgtccaccgcgatccgctcacgggcggccacgcgcagcgcccccaactcgaaacccgacagccgttcgctgtcgagcaggaggacgccccgctgttcgtcggccagcgcggtatccaggtccaggttcgccgccagcggctcgccgccatcggccaggcgcacctgctgcagggtcggcgcaaggttgtacagcacgttgccgctggcactttcgtagcgcggggtatagctgcccacgatcagctcggcgccgcgcgccactgcgttctgcgcctgctggtagccatccgcgcccggctgcggcgcgcgcacctggcgctcgccctggaataccttgccgagcaggtcgccctcgagcaccgccgaagcggtgccgaccaccaggcggccagcatcgcggccgaccatgtagccgctctcgtaacggctctgcggggcgatcagcggattgtagaaatagcgcgtctgcccccagcgcgggctgctgtcctcatagccgcggtagatgccctcgtagagcaggtcgccgggggcgcgggagatttcgtagagacgtccgtcgctgcccttgagccaggtctgccggatcaggccgccctgcacatcgagggacccgccggagaggttgaccgtcgagccgggctggctcaccagctcgccgccggtgaaggtcagggtgccgccctgggccatccactcgccggccgaatggttgcgcgtgccaaggtagccacccagttccagcaggccgccggcggtataccagcgatcggtggcgtagccgttggtgccggccggaaccaggaccagttcgcgggcatcgacccagacatcattgctggccagtccgccgccgtcgcggttgaccggcgcgtcgcgctgctcgttgccctggacattgatctggatgttgttgctttccatcgccaccttcaccccgacggcgccggcgacgtccacctgcgcgccgtcgcgcagcaggctccggcccgccgcgctgaccgccacctggccgccgctggccagggtcagcgagccgccctggaaatccacgctaccgccgctgacgatctcgacccgcgactgctcgctgcgatcggcgacccggctgaggttgtcgaaacgaccgatcacgttgttggtcggcgtggtgccatccagcgcctgctgggcggcatcgcgctggctgtcgagggcgccggcgccgctggcatcgaccagcaccgcggtggtgctgccctcgcccaggaccacgctgcccctggcgtcgctggccgagttgagcaggtggatggtgccgcgcacgtcggttga

SEQ ID NO: 338800 - DNA, 882 bp, Pseudomonas aeruginosa
ttgcgccagggacagctccagatcgccggcgaaactcagcaggccgccgctgaacagggtcaggtcaccgaacccgccatcctgtacctggctcgccgccaggcggccatggccataggcatagtctcgcccttccccggcggcttcgcgctgctggccgacgatcagctcgcgcgggcgcaatacttggtcggacgccaggctggtcaggtagttcggcgtggccagcgccagcgtcaggctgccggcggcggcaccttccccgccggcgaaggcgcgcaggtcaccatccaggtacaagccgttggccgacgccagggagatgctgccgccggcgctgctgacccgggtctggccgactccgggcacgtccagaagcgcctgggtgccggaggcatccaacaggcttcccgggcgcaggtcgatgaacagttcggcggcatcggccttgccgctggcatgttcgaccgtgccgccgatgacgatgctgccaccatcggccacctggccgtagcgccgcccctggaagtccagcgcggtcgcagcgcgtgcggcgacatcgagcacaccctgctcgccaacgcggatggcgcgctggtggccgacgctctcgacctgatcgcgcaccggatcgggcaacgccacgctgcccagttcgatcgagccgccccaggcgttcaggcgaccatcgacgttcaactggccgacgctgcgcagctcgatgcgctggccgggatcaacctccagcaggctgccacgaccgacgtcgaggtcgctgtcggccacctgcccggcaccactctggcggctgccggcctgcaggaacaggctggcgccgggacgctggcgcagttcgccgtcggccggccgctcctcgtatag

SEQ ID NO: 338801 - DNA, 1116 bp, Pseudomonas aeruginosa
ttgcgcgccatcggtgatgtcgaaggtgacgtaattgccgccttgcccgtagagcactgctggcgtcgagccgatcaccatgcgcgccgcaccgaaggcgttgagatcgtcggcccgcagcgtcacgccctggaacccctcgctggcctgcgcgccggcgccgacgatctcgatccgctggttgttgcccaataccaccagactaccgccatagccgcctctggcggcctggaacagcccggtgccgtcgaacgccagcgcatcggcaccgccaccggcgagcaggtcaaggcgcaggctgcgcgcatccaccggcagcatcggccgcgggatgccacggcgagcagcatcggccatggcgaagtcgctgtaactcgtttcgttgtactgcgaatggcgccgcagcacatccgccggggtcagcagcacctggcggaacagttcgtcgcgcaccccggtgccggcgagggacaactgcccggccagcgaccaggagccgctgcgcatgagctgggtgggcgctgcccgtcccagcccggcctggccgttgagttcgacccggtacgcgccgggcagcagggcgtaggtcgacggcaacagggtgtagcttcccgccgacaggccgggcacgccgctaccgatgctgatctgctggccgaccagcgggtcgacggcgccgccttcggcggccaccggcgcgatgcgctgaaccccgggcacaatggcgtagatcggattgtcggccagtcccggcaggtcgaagcggccctcctcgtcgaaacgcaccagcgggttgtagcgcgcatcggtggagccaccgcggccggaaacgaaaccggcgccgagcagttcgccgccaccggaaagatccagcgtcgctccggacgccacccgtacggagcggccatccaggtcgaccccggtatccattatccccctctcgttgaagctaccgccgacgccggtcaaggcgatttcctccccggcatagcgccagacctggccgtctaccgtgccgccgtagggcaaggtcaggccggcgccgctgaccgaggtcaggctgccagacaacaactcgaccttgtcggcgttctggccgatttccagatagcctaa

SEQ ID NO: 338802 - DNA, 2268 bp, Pseudomonas aeruginosa
atggcccgacaggtccaggtcgccctgcaccaccaggtcgccatcggccgtggcgctgacgatctccagcccggggcgcaggtggaaagcttccgcataggtggcattgttcaatccagccagcttgccgtcgagcagggcgctagtggccaacgccgcctgcatgaacagttcgctctgctggtgcttgccatccaggtaggcctgggtgatctcctggtacggccggccgttgctcgccggcagcgcggcgaccggcgcgtcgtcgtagcgctgcacggcgctgagggtgatggcgcgggcaccgaggatctgcagcggcgcaccggcgtcgatggcgatatcgcccgccgtcgcaccgcccagacgcggcgcgtacaggtcgagggtgccgcgggcgacgccgtcgttctgcccgggcgcgcttcccgctgccgcctcggtgccgtggcgcaggtcgatacgggcaccggcgccgaggctgagcagcccgtctccggcgttcagctcgatcagcgcgcggttaggcgaatcgatgatcttgccgtagctgtccacccgcagccgccgcccatgggcatcgagcagcgcctcgccaccgatgctcaggccctgcttggcggccaggcggatactgccgacctgctcgccgctggcgtcgagcacgccgttcacgctcagatggccaccatccagcgacacctcgatcgtcgaggccctgacgtcgttgccgatgttcaggtcaccctgcttgatctggaaactgcgcgcaccgaacatctgaccggcattcagtcgctggttgagagcggcgaaccggctgtctggcgtaccgtcctcgcccagccgctgggcacggatctcgacgctgcccgcggcgtacggcaccagggtgccgccagcgtcatattcgccgctgctcgccgccaggatctgcccttgcaggtcgaccacgccggccgcgctgtccagcgccaccgccgtcaggctaccggcctggttgttgctcgccgacaggtcgatgcgcgaagcgccggcctggcggatattgccgccgtggctcagcaggttgacttcgccaccccagctgtagcgggtcacgtcgtcgaaacgcagcgcgcgcccggccaggtcgagctgggcgccggcgcccagttccagatcctcctgcgcggtcaggctcaacttgccgctgggcaggccgacgcgggtgtccagcaggaggctggcgccctccagggccagttcggcgcccagtgcgccgttggccagttcggccggggtggatgccgcgccgccgccccccgcgctgacccacaacgcaccgcccgccagcaggctgttgcgcgagccggcctcgccggtgagcaagggtgtgatcaggttgagatcgccgccactgtatgcgtagccgctaccagcccgatactcgccctggctctggtagaccgcgaggctacccttgtggttggcggtgatccgctcgctggccgccaggttgaccgtggcgaaacccagcgccaggcgctggtaactgtcgatggcgctgggctggctgaagggaccgtagccgaactccaggcgttcgctgcggatgtccagcgtgccctggccactgccggcgccgccggtgatgaccccggcggccggcgtctgcgcgccgttccagatcaggttggaggtgcggatcgaggcgacgctgtcgctgtcgccgtagccatagatcgccggggtgcccagcaccaggcgcgacaagcgggagcgaccgctgctcggatcgtaggaatcgaggctgacgtcgccgtagaagttgaacgcgtcgcgggcgttcagcaccagcgtctccaggggcggcgcgccctccgacgcatcaccctgcagcaggtggtcgagcacttgctggtcgagcgccaacccggtcggcagcacaccgcgctcggccagttcggccagcagcgcctgctcgccgacattgaagccgcctgccgccagggtcaggttgcgggtgccgtaacgcacgctgccgtcgagcacgaagcgcttgtcggtggccgcgaccagactgccctcggaatacagccgggtttcgccggccacaccatcggcagcgggaacgccaagcaggatgtcgccgggaccactgtccggcgttccggcttctggtggcaagacgttcagcacgccgttcgacagggcgagcatggaacgccctcccgacgcatacaggaagccatcccgtgcatcgtaggcagcagccccccgccctag

SEQ ID NO: 338803 - DNA, 1650 bp, Pseudomonas aeruginosa
ttggccatcggcgcctacccggccgctaccgcccaccgccagcaccagcccctggctgcgctgcgacgtttcctgcggaacgctggacgtgcgcgcctcgatgacgcccgcatcgcccgcgaccttcaggctcagatcgccaccgcccagggtgccgatgccggtgaagcccacctgctgcgtggcggcagccgctccatcgccgcccggctggcgcgcataggtaccgaaattgatccaccaggcggtgcggtcggccgtaccggcggtcgaaccgctgccctggcgccagagccagttgccgacggccgccgagtcgtagccggcgttgggtacggcgccggacaaccgacccagcacatcgccgcgcaggtcgccaccgaccgccagcgtcaggttgccgcccagggtcgggtaccaagtgctgtagaggctctgttcgccgccgtccacccattgctcgtaaccgcccagcgccggatcgcgcagaacgctgccgccgtccctggcacgcgccaggttgtagctggaatcgaccgcgctcgcggtaccggcggtgtagactccgaatggcgaatccatacgcaggttgccggcggcgaacaggtcgagatcgccagtgccggtacgcagcacgctgaagcgcgaagcgtagggttcggcttccagcgcatagtcgtcgctggacgcagcgcaccaggtcgggaaatcgtcacagatggtcgggtagcccaaagcctccgggtccagtgggtcgcccggcttgatgccggggtcgccccatcctgccaccccttcctcggtccacaccatgccgcccgaactcgcggcacaccaggtcgggaaatcgtcgcagatggtcgggtagcccaaagcctccgggtccagtggatcaccgggcttgaggctaggatcgccccagttatccaccccttcctgggtccataccagcccaccacccgccgccggtatgcgccgcatgccgtagtgcgtatcggcgaggcgcatctgcccgctggaacgcggatcggtcagccgcggatcggccgcctgcagatcggcgccagccaccaggcgcacgctccaggactgcgaaccggccgccagcatcggcgcgatggcccaattgtgcgaaaccgcaccggccgggcgtacgtccaccgacgcggcgccatcgggcaggcggatattgctgccagccggcaggaaggccccggcgcgcaaggccagtccaccggcgagacgcacaccgtcgacttcgccgctggccagcgtggcgcggccgggcagtggcacgccgcccggccaggtcatccccgtcacgggcgccgccagcggcagacggctgccggcgccgaggcgggtgccggcgggcaggtccagagcctcgccgagcaggctgccggccggccggagcaggttgccggtggcatccagcaacgctccctcgagcaccgtccccgccggcagttgcagcggctggctgagcaccgcctcgaccggcagcagggtaccggcggccagggtcatggccttgatcggcagttcgaagttgagcgtcttgccggccgggaagaagctgtcgtcgtccagccgcacgccagccgtcggcaccacccgatcgccgcccaggcgatcctggccggctag

SEQ ID NO: 338804 - DNA, 156 bp, Pseudomonas aeruginosa
atgatacagagtggcctggtaaggggagaacgcgaaatgcacgccagggaactgcgtgaaacgctggtcgccggcgcggaatcgacgccaggcggccccgccgatacagcctatttcgagtcgctgcgcagccgggtaagcaagccccaggactga

SEQ ID NO: 338805 - DNA, 603 bp, Pseudomonas aeruginosa
atggaaagttactcgaaagtcggtatgcaggaacttgaccagcgcctatcgaagatcgtcgaagccgcacgcaagaaacaggtatcggtttatcgatatggggcgccatgggtctggatagtgtcccaggaagattggcagggtgcgctcaaggaagtgtccagctatataccgcctggacattccctggcgttgctgaaaccgcaaatagaaagtctccttgtcgaagaggcgaaagtcctctcggcgcttgcccgcgaacatggcatgcagttggccccggagccgctgatccacgcgctgctgctgcaactgctgtacgcgattcccagcgagcagcagttgtatgagcaattgaactacaacctgctgtatcgctggttcgtcggcctggaaatgaagcagaagatctggaattttccggttttcgtcagcgatataaccgtcctgctgaacagcgcggaggcggtaaggataataggcaggattatcggggaagtgatttccggggatctcatgcagatgccggagttctccctgaacttcgccttattgcatacatggcaagcgcgccatggcggagcgcgacggctgaatatctag

SEQ ID NO: 338806 - DNA, 837 bp, Pseudomonas aeruginosa
atgaagcggattcccgctgctgcaatgctgtgcctgctcgccgtcctggcgggctgttcgaaggtgcctgccggcaacgtcggcgtgatcgtcaacctctacggctccgagaagggcgtggagacgcgcgaggtcggaactggtcgctactgggtaggcgtgaacgaggagctctacctgttccccaccttcacgcagactgaaacctggggcggcgaggaagcgatcagcttccagaccgttgagggtatgaaggttggcggcgccgtcggcatcacctactcggtatcccccgacaaggtgacgacgctgttccagaaataccgggcgggaatcgacgaaatcacgaacaagttcctgcggaacatggtgcgcgatgccttcaacgatgttgcctcgaagcttccagtcgagagcgtctatggcgccggtaaggcggacctgctgctggccgtcgagaagcgcgtgcgcgaccaggtggcgcccatcggcatcaacatcgagcgcatctactacgcatccgacctggtcctcccgccgcaggtcacgcagagcctgaacgcgaagatccaggccacccagatggccgagcagcgccgtaacgaggtcgcccaagccaaggcagaagccgacaaggaacgcgctcgggcccaaggggaggcggacgcgaagctgaccctggccaccgccgacgcgaaggcgatcgagatccgcgcccaggcgctgcgctcgaaccccgacgtcgtgaccctcaatgccgtcgagaagtgggacggaaagctgcccacctacatggccagcggctctccgcttcccttcatcggcatcagcaagtag

SEQ ID NO: 338807 - DNA, 255 bp, Pseudomonas aeruginosa
atggacaacaaacctctcatcaagcccgggaagctcttcctgatctgtatcgcgctgctggcctatgccgggttgtccgtcgccctggtgggcggcattgggccggccctggtcagcagtcgcgacgatgttctggtcttcgcgggattcgccatccccggcgtctggttgatcgcctcggtctgcctcggcatccacctcgccaacacccgccgcgaagaagcggccaccaccagcaaggagaaagaccaatga

SEQ ID NO: 338808 - DNA, 234 bp, Pseudomonas aeruginosa
atggcctgggacagaaacgatcctctcaacatcctggcgctgcagctcgacggtgaactgcgcgcagcggccgacttctgccatggctacaacgggccggcacagcgcgctttcgcccggcacatccagggcctgggcaagacgctcgacgagcttaccgtggcagacctgaaggcggcggccgcatttgcggacgcagaactgaacgacctgcagcagagagggctgatctga

SEQ ID NO: 338809 - DNA, 309 bp, Pseudomonas aeruginosa
atgaacctctcgacgctgctcagcaatctgtgctcccgggtcccgggcgaagacctgaccgataaacagattctctccatcaagtcggatctggggtcggctcggaatgctgctcagaacatggcgcttggtgtcgccgcagtcgggaatctgctggcgaacgttggcgctgaaggcgaagtaggccaggaaacctcagagcgtctcggctggtttctggaggagatcgggggggccatcttcatgttggtggagctcgagcaggtctgcacggatcgcatcaaccggcagaaggaggctcagcaatga

SEQ ID NO: 338810 - DNA, 672 bp, Pseudomonas aeruginosa
ttggcctccctttcatccgtagccgacatctccccacccgcagccgtcgccggacgaggcaatggcatagcgctgagtgcgctgctcgacgcacgtaggatctggaaaggccagtccgccgtaccggccggcgcttccctgcccaccgggcatgcgcgcctggacgcactgctgcccggcggcggttggccggagcatgccctgagcgaaatcctccatgcccgcgacggtgtcggcgaactgcaactactgatgccgaccctcgctcgcctgacccaggcgcaacgtcgtgtcgtcctggtcggcgccccctatgtaccttatccgcaggcctggctggccgccgcggtcgacctgcgccacttggtcctgttgcaggccagcggacgcgacgccttgtgggctgccgaacagtgcctgcgctcgggcagttgcgccgcagtgctgtgctggccgcagcaggccgacgaccgcgccctgcgccgcctccaggtcgccgccgaaagcggtcaggccctgggtttcgcctatcgccccctgcgcgaagcggtcaacccttcgccggcagcgctacgcctgtgcatcgaaacccgccccccacgcctgcgcatcctcaagtgccggggcggcctcgcgccggcgaccgccctgccggccagcgcctggcaatga

SEQ ID NO: 338811 - DNA, 1416 bp, Pseudomonas aeruginosa
atgctctgggcttgcattctcctgccgcaactggccatggacagcgcgctgcgtcaacggagcaatcccgacgcaccgctggcgctgctcggcggcccagcgcagcgccggcagttgcaggcggtcaacccagcggcacgcgcgctcggcctgaagcccggtcaatcgctgatcgccgcccaggccctgagccgggacttcgccacggcggaatacgacctcgccgccgtggagcgctggcaggccttcctcgccgcctgggcctacggtttcagctcgcaggtcagcctgcactatccgcgtgcgctgctgctggaagtgcagtccagccttgccctgttcggcccctggccacgcttcgaggcccgcttgcgcaaggaactcacggcgctgggcttccgccatcgcctgtgcctggcgccgaacccggtggcggcgagggtcctggcgaacagccacgacggcctggccatcgaggacgagacagcgctgcaacgccagttgtccgcccttccgctggaccgcctgggactctcgcgggagctggccgtcgccctcggacgcatgggactgcgccatctgcgccaggtcctcgagttgccgcgcgccgccctggcccgtcgcttcccggccgaactgctattgcacatcgaccgcctctgcggccgcagcccgctggcgctggagcactaccggccgccggacaccttcgacctgcgcatcgaactcaatttcgacgtggagtcgcaccaggccctgctcttccccctgcgacggctgagcgccgatctcgccgcctttctcgccggacgcgacagcggcgtgcagcgcttcaccctgcatctggagcatcacgggcgcgccgacagccaggtcacggtcggcctgctcagcgccgaacgcgaggcggccatgctcttcgaactgacccgcggccgtctcgaacagctgcaactgcccgcccccgtgcatgccgtgcgcctggaggcccgcgagctgcctcctttcacgccgcagcaccgcgaactgttcgacgagcgcccacagcagtatctcggctgggaacagttgcgggaacgcctgcgcgcgcggctgggcgacgaggcggtacagggcctgagcgccgtcgccgaacaccgtccggagcgaagctggcggccgcacagctgctacagggcgcaatcgccggcagcctgcggcctccgccccggctggctgctggcggagccacgccccctcggcgaggccttgcccaccgtgctggccggcccggagcggatcgagtcgggctggtgggatggcgaagacatccgccgcgactattacctggtggaaacccgcagcggacaacgtgcctgggtctatcgcgaggtcggcagcgaagggccgctgtggctgcatggctggttcgcatga

SEQ ID NO: 338812 - DNA, 3075 bp, Pseudomonas aeruginosa
atgagcgcctacgccgaactgcattgcctgtccaacttcagtttccagcgcggcgcctccagcgccgcggaactcttcgcccgtgcagcacgcctgggctatcgggccctggcgatcaccgacgaatgcagcctggccggtatcgtgcgggcctggcaggcggcgcgggagcatcaggtacaactgatcatcggcagcgaaatccgcctcgaacaggggcccaagctggtcctcctggcggaggacctggagggctaccagaacctctgtcgcctcatcacccgcggccggcgacaagccgacaagggccactaccggctgctgcgcgaagatctgcaacagccgctcgccggcctgttggcgatctggttgccgaacgaccatggggacgagcaggctgcctggctccgcgaacgcttcccccagcgcctttggctgggcgtcgagttgcatcgcggcgccgatgacgatgcccgcctggacaaactgctcgcgctcgcctcgcatctccggctaccgcccgtggcctgcggcgacgtccacatgcacgcccgcggcaggcgagccctgcaggactgcatgacagcgatccgcaaccatcttccggtcagcgaggccggcgcctatctcttccccaacggggaacgccacctgcgtaccctggaggccctgcaggggatctacccgcaagccctgctggcggaaaccctgaagatcgccgaacgctgccggttcgatctggaacagctgaaataccagtacccacgcgaattggtaccggccggacacgacccggcgtcatggctccgccatctcaccgaacagggcatcgccaggcgctggccgaacggcgcgagcgccaaggtccgcaagcagatcgggagagaactcgagctgatcgccgaactgggctatgaaagctatttcctcaccgtgcaggacatcgtcgccttcgcccggggccggaaaatcctttgccagggccgcggctcggcggccaactcggcagtgtgcttcgccctcggcatcaccgagttggacccggaccggaccaacctgctgttcgagcgcttcctttcccgcgagcgcaacgaaccaccggacatcgacgtggatttcgaacacgagcgccgcgaggaggtcatccagtacgttttcacacgctacggacgccagcgcgcggcgctgaccgcggtggtcagcacctaccacggcgccggcgcggtgcgcgacgtagccaaggccctgggtctgccgcccgagcaggtcgacgtcctggccaactgctgcggccgctggagcgaccaggcccccagcgccgaacgcctggaagaggccggcttcgatccgcagagtccgatcctgcgccgggtgctggccctgaccgacgagttgatcggttttccgcgccacctctcgcagcaccccggcggcttcgtcatctccgaacagccattggacaccctggtcccggtggagaatgccagcatggccgagcgcacggtgatccagtgggacaaggacgatctcgacgcggtcggcctgctcaaggtcgacgtcctcgccctgggcatgctcagcgccctgcgccgcagcttcgacctgatccacgcgctgcgcggcggcaagcggttgagcatcgccagtatcccgagcgaagacccggccacctacgaaatgatcagccgcgccgataccatcggtgtgttccagatcgaatcgcgcgcacagatggccatgctgccacgcctgcgcccgcagaagttctacgatctggtgatccaggtcgccatcgtccggccggggccgatccagggcgacatggtgcatccttacctgcgccggcgaaacggtgaagagccggtggcctatccatcggccgaactggagaaggtcttcgaacgtaccctgggcgtcccgttgttccaggaacaggtcatggaactggcgatcgtcgccgccgactacacgccgggcgaggcggacgaactgcgtcgttcgatggccgcctggaagcgtcatggcggcctggaacaccaccgcgagcggctgacccggggcatgctcgccaagagctacgaggccgacttcgcagcgcgcatcttcgagcagatcaaaggcttcggcagctacggtttccctgaatcccacgccgccagcttcgccctgctcacctacgccagcagttggctgaaacgtcacgagccggcggccttcgcctgcgccttgatcaacagttggccgatgggcttctacagccccgaccagttgctccaggacgcccgccgccacaccctgcagacacgcccggtggatgtccgccacagcggttgggattgcagcctggagccgttcggccaggcgcaaccggccatacgcctcggcctgcggatgatccgaggctttcgcgaggaggatgccaggcgtatcgagcaggtccgggaggccgagccgttcctcgacgtgcacgatctcggccgacgcgccaggctcgacgcccgggccctggagttgctggccgatgccggcgccctgcgcggtctcgccggacaccggcacaaggcgcgctgggccgtcgccagcgtcgagccgcaattgccactgttcgccgaagggaccgtcatcgaagaaaccacggtcagcctgccgctgccttcgcgcggcgaggaactgctgagcgattacgctctcctcggcaccaccctcggcccgcatccgctgaaactcttgcgtggacagctcaaggcccgccgctgccgcgactcccgcgaactggcgaaactgggacatgggcgaccgatacgggtcgccggcctggtggtcggccggcagcgcccacagaccgccagcggcatcaccttcatcaccctggaggacgagttcggcatggtcaacgtggtggtccggcacgacctcgccgaacggcagaggcggccattcctcgagtcccggctgctgcaggtggagggcatcctggagtcctccggcgaggtgcgccacgtcatcgcagggcgcctgcatgacctgacccctctactcaccggcctggacgtccgcagccgggatttccattga

SEQ ID NO: 338813 - DNA, 351 bp, Pseudomonas aeruginosa
atgcaacagaaaactcaacgcgcgcaagtcccctgcgccgttaccaccgaccaccaggtttgcttcgatcctctcaacggggatgagttcttgttctccattgttgccgaccggccggttgacgcggctctggccgccgccgaggacatcagcgaggcggttcacctgattcttttgagaatgacccgggcgatggacgatgccggcgagccgctactctctcaggaactcaatactctcgccctgctgggggccatgtctggcgcattgctcagagcttgccgggccggtgtcgcgacccaatccggaaatcctgaaagcgtgtcgcgacacgcaggcggtgcagcatga

SEQ ID NO: 338814 - DNA, 663 bp, Pseudomonas aeruginosa
atggctgatgccattagtgctgcgcaggatcaaaatatttatgtggcgcctggagcctcgctaaccacgctttacaaggggctgtataatatctgcacccctggcgcagtatttcccgaggctgagacgacagaggcttgggatattcctttaaggttgcatccggattttgctccaagtggagatgtaaatgctgttaaccaacagtatgtgacggctcttgctcaggaaacatccaatattttgctattggggttccagatgtctcaaaataaagatgtagtatgtggcgatctggttccgctcattcaaagtactagggctaatctggtttctgtgaaagctaaatatggggcaggactacttgggatgttgggtcaaacgacaaatattttgcctaatagtgtctcgataactcccggtacaggaggtggtgcaaccgatagctcaggcctcctagttggctatggtgtgaacttagggacccttacggctgcacagctttcagcaatgaatctgccacaaaatatcaagtcgctcatcactcccggagtaggtctgcacttaggtgctgtaaacttcagtgcagtcttcaaccagattcgcgatggaatgcgttatgtgacgggcatggctctaactctggcctaccatgctctctag

SEQ ID NO: 338815 - DNA, 654 bp, Pseudomonas aeruginosa
atgcagcagatcacggtagcgacggacgctcaacggcgtattcgccagcgcgagctggccatgctggacgagaaagaggctcaggagcgcgaggaagcgcggaagaacaaggggttcacacaggtgtattcgaggggttggaggcgcgtacgggagcttgctacgggcaattcaggcgctgccggtctatacgccctctttgccgagcacatcgacccgacttgtggcgcggtgatctgcgatcagcagtttttggccgatcacatgaaggtgactaccaggactatccggtcttggctcgcctacctggaagaaaaccgggcgcttgtccgcatccctgtcgctggccgagtttgcgcctacgcgctggaccctcacgaggtctggaagggctacgacaacgccaaggaatacgcggccttcgtgaccaaaaccttggtcaacaaggacggcgatatccgccgccggatcatgtcgatgttcagcccggaagagcggccaaacgacgaccgcgacccgaacacgctggacatgtttgaaggcactccccacaatgagcaacgaaacgaaggagaaaatctttatgaaaaaaacgttcgctcttgctgccatgatggcggcaatcgctccgaatcttgcttcagcggcggataa

SEQ ID NO: 338816 - DNA, 249 bp, Pseudomonas aeruginosa
atgatccagaccaagtacgcttgcgaaggcggaaagacgttggatgtcgtgtacgtcggagactatgccgtgatgctgcaaatggatgagcttgtcccgctgaaacgcgccaagagtgcatcaggagtacgctacatctctaccagcaaaaactactcctacgaactctgggggaagaacaacgacatgaacctttcaacccacgatggcggaaaaaagcaagtcgttctcagtaactgcaagccataa

SEQ ID NO: 338817 - DNA, 975 bp, Pseudomonas aeruginosa
atggcggcctacgcgatcatgcgatgcaagaagctgtcggggatgggcagcgtggcggcggcgttgcagcactgctaccgggagcgcgagacgcccaacgctgacgccgaacgcacgccggacaacgagcaccgggcggccacctcgaccgatgcggcgatggggcggctgcgcgagttgctgccggagaagcggcgcaaggacgcggtgctggcggtcgaatacgtgatgacggccagcccggaatggtgggccaaggccacgccccagcagcaggccgcgttcttcgaccaggcgcagggctggctggcggccaaatacggcgcggatcgcatcgtgacggccagcatccaccgcgacgaggccaccccgcacctgtcggccttcgtcgtgccgctgacgcaggacgggcggctgtcggccaaggagttcatcggtggccgcgacaagatgcgggccgaccagaccagctttgccgaggtggtgagggatctcgggctggaacgcggcatcgagggcagccgggccacccatcagcgcgtccagagctactacggcgccatcgagcgccagcccgggcacgccaccatcacgccgcaggccatcgagccgcgggtgctgcgtaaggggattttctcaaaggacgtggagacgccggaggccgtggccgcccgcgtgaccgctgccgtcagggaagggtatggcccgaccgtcgcagcggccgcaggagcgcgtcaggagcgcgagaaggcccggcaggcacaggagacagcccggagcctgcgtgaccgcctgaagcccgttctggacgctctggggccgcttaatcgcgatatgcaggccaaggcggcccagatcatcaaggccgtgggcgagaagctgctcgccgaacagcgcgaggcgacacgccagcggcaggcccaacggcttcgcagtcgcggccgggatcgcgacgacggcgggctgtctcgttga

SEQ ID NO: 338818 - DNA, 1551 bp, Pseudomonas aeruginosa
atgacagctcaagaccgctttgcagaccaatgggccaccgttgaccaagtggctgatgcgctcaagagactggaggaggatgctggcgccctgtacgagaccaccatcctcggccagctcaagaagatgcgcgccaaggaccccgctgcctttgcccggctgcgcgcccaggtcaaggacgccaaggtgctaagcatggccgagttcgatcgcttaaccgcctgcgtggacgacgacgccgggcccgctaacgccagcatcttcgaagaggtggagccgtggccggagccggtggatggtgcagacctgctcgatgacgtgacccatgccctggcccggcacgtgatcgcggacaaggaaacgctgcgggctgccgcgttgtgggctgccttcacctggctggtggacgtggtgcaggtggcgcccatcgccaacatcactgcgccggaaaagcgctgtggcaagtctatcttgctcaccgccctgggcaagttggccaaccgtcccttgcaggtgtcgaacattgcccccgctgcgctgtatcgctccatcgagctgtgggcaccgacactactgatagacgaggtagacgccttcctggccgcccacgaagacgcccgcggcatcctcaatgccggcttcacgcgagacagcgccatcgtcattcgctgcgtcggagacgatcacatgcccaccgcattcaacgtgtggggcgccaaggcgctgtgcggtatcggcaagatcgccgacaccctggccgaccgcagcgtgccattgcgtctgcggcgacgtaccgctggtgaaaacgtggagagcctgcgccactccgaccccgccttgtgggagtcgctgcgttcgcgcctggcccgcttcgcgctcgatagcgccgaggccatcggcaaggcaaggccggcccccatccctggcctgaacgaccgcgccaacgacgcttgggagcctctgctggccattgccgacctagccggcgaccactggccgaagtcggcccgcaacgctgccatcgccctgcacgggctggaaggtgaatctcctagcatcggtgccgagctgctggcagacgtaaaggcggtgttcgaggcgaagagcgccagcaaggtattcagtgccgatctgctcgaggcactggttgccgatgaggaggcgccctgggcgacctggaaccgaggcaagccgatgtcaccccggcaactgtcggccaagctggcggagttcggcatcaagtcgaaggacatccgcatcggctccaccaacaagaaagggtacgaccgtgccgacttctccgacgccttcggacgctacctttcccccgaaccctcccttccatccgcgacagcgcgacacgcctactcccacgcgacctccagagattttaaatccgcgacaccacccctctctgtcgcggataaaaaaacctcgcagcccagtaacgacgcaggctgtcacggtgtcgcggataaaacaccccctcccaggaaagaggtcgagaggccggaaccgatctgggacgagaacgatgcggaggcactgtga

SEQ ID NO: 338819 - DNA, 618 bp, Pseudomonas aeruginosa
atgccggcggcgaacatgcgacagatcgcactggcggcattgagtggcgctggagcgagttcggagccgggcaatcctggcggtgaacctgtttccggaccgggtaatgccggcgagcgcacctcacccagcaccacgccgggatcgggtgacggctcccttgccgagagcctcaatacgttggagcggtggcttgatcgagtggcaatcgaggacggctatgtcggcgtgccggtgatcgaggccgtcgaggtggtggtcaccgagatgaagcgccagcaacaaccagtcgatccggccttctgccgctgcaaccactggttcgccggggacagcgtcgaagcggccttcattcgccagcatggccagtgccaggactgcgtcgagatggaccagatgctggagcgggaagtgcaggccgagaacgccaagcgctacctgtggctgcgcaacacggctctctacgcatcggacctggcccgcgaggtcaaccgcatggacaagagcgtcgtcaacctgttcccgcgggacaaggacggcaacctcctggcagaggctgatctggacgaggccatcgatgctgccatggcgaagccgccggaaggcggtgacgcatga

SEQ ID NO: 338820 - DNA, 189 bp, Pseudomonas aeruginosa
gtgggcggtgctgctgccttggctgcgctgctggtcatgatcgccaactggcacggtgaccgcggcactctgggttttcacgactacggccggctgtggctgcaggacggcaatgcgaagggcgccgctgcggaaacgctgctgcgcgatctgtttggcctgaaaggcacgccgaagggggccgcatga

SEQ ID NO: 338821 - DNA, 192 bp, Pseudomonas aeruginosa
atgagaggctccgatattccaccaccaccagggtatcgccctaccccgctcgccaccctcggccagcagttggtccgcctgggccaggcgatgcagaaccccaacaccaagctcggcgagttgaccgaactggtccaggcctgcggcgtcgacctgcggatctgcgacacgaacaaggagagccggtcatga

SEQ ID NO: 338822 - DNA, 300 bp, Pseudomonas aeruginosa
atgatccgagacaagcagaaagcattcgtcatcctcgaagggcttcgcgcctacgagttctacaaacctgtcgatctccgcgggctcaagggtagctactcgaaggaggagttgctggggaaaatgccggacgacgagttcgagcactatctcaaactactcgagggagagggcttcattcgctccacggaagccgcaccagacggtaagcaggtgttccatttgacctggaaaggccacgacttggccaaggagcttgaggactattacgaaaatgaggatgaagacacagatggctaa

SEQ ID NO: 338823 - DNA, 300 bp, Pseudomonas aeruginosa; identical to SEQ ID NO: 328192

SEQ ID NO: 338824 - DNA, 300 bp, Pseudomonas aeruginosa; identical to SEQ ID NO: 338822

SEQ ID NO: 338825 - DNA, 180 bp, Pseudomonas aeruginosa
atggacaagttcgttgtccgtctgccggacggcctgagggccgaggtcgaagccgaggccaagcgggatgagcgcagcatgaacagcgtagtcatcatcgccctgcgcgagtacctgcatggccagcgccgaaagcatgcgctactcgacgccttgaccgctgccgccggagatcgctga

SEQ ID NO: 338826 - DNA, 336 bp, Pseudomonas aeruginosa
atgaagcaagcactcatcggcaccgtgatcagcctgctgctcagcgcgtgcctgtacttcggtcagtggtcgcttcaccggttcgcgttctatgtggcggcggccacgaacgttctctgctggctgctgatattcgccggcgggatcaaggggcaaggagcggcgaacctactcgcccgcccttggctctccatccctactggcgctctgcacgtggcggccctggccctcacggatcaccccgcactcgcggcctcaagcctgctggtgcaaatggcttgctacgccctcgcctaccaggcagtgcgcagcgccgagcaagggggtgacctatga

SEQ ID NO: 338827 - DNA, 357 bp, Pseudomonas aeruginosa
atgaccgcgcgccggctgacccgggccgagatgaaccacctgcgccgcctgatcggttgggttcgttgcgaggtaggagcagagccagaggaagtcgtcaccgctgccaaagaggctctcgaccacttccaatgcgtgacggaggacggcaagcagcggctgctcgagcactaccaaaagtcagtagccgtaccgaattacatccgcgctgcgctcaaggccctggagaaggtgtgcctggaagaaccggccgaggtggttgacggtaagttggttgcccacaggcggcacgaagcaccgcaacgcctggccgtagcgcgcaacgaagaggagatagggaatgggaagctcgattag

SEQ ID NO: 338828 - DNA, 357 bp, Pseudomonas aeruginosa
atgtcaccccggcaactgtcggccaagctggcagagttcggcatcaagtcaggcacggtgcgccaaggtttcgataccaagaaaggatactccctggaccagttccgggatgcattcgaccgataccttgccacaggctccccctcttcgagcgtcacaccgtcacaagtcagaaaccacggggcttccagtgattctcaaaccgtcacacctaccaccagtgtgacggataaaaagtccctgaaaactccgattgccgtgggttgtgacggtgtgacggataaaacaccccttcccaggaaagaggtcgagaggccggaaccgatctgggacgagaacgatgcggaggcactgtga

SEQ ID NO: 338829 - DNA, 1182 bp, Pseudomonas aeruginosa
atgataaacatcactccgttcatttctcaggacaacgcgccaggagatttgcaggacgctgtagttgagttggggcggctggatgcagcgcttcatgcaaatattcctgatccacttagacgacctatgactgtcctgcttagggcggttaattctttttacagtaaccgtattgaaggaaatcctacgcatccagccgacattattcatgctcaagaagaggcgaattctgaaaagctaagtgatgatttgctggagatcaaacggcatatagaggttcagaaaagcttgtcgttgaatcctgttgataagctggaaatatgtacttctgaatatcttcttcatgttcatcgtgagttttatgagggagttcctgagaagtttctagacgtcaagattgacgacgaaaggaagattaggattatccccggtgagtttagaacttgcggtgtaaaggtcggaaaacatgtgccgccttcagctgaagatctcggttcgtatatgcgctggttcgaaaactcatatagattggatcgactgtttgggattacaccgattttagctgctgccggggctcatcatagattgatgtggattcatccatttcttgatggaaatggtcggactggccgtatgtttactgatcaatacctgcgcgctgctgggcttggaggatatggtctttggtctataagccgtgggttcggtcgggatgtggaagcctattacgaggcgcttaaggccgcagatcaaccaaggactggagaactcgatggtagaggcgttctctcagaacgtggtctactgaagtttacaaggtattttatcgaaacagctatcgatcaggttaagtatttcagctctctgcttgaaccgaataagctaaatcagcgtatagactactactttgaaatgaggagtcggggggcgttaattaatagtagaggggtggctttagaacctttgaggatggaggcgagagatatctataaaaaattactctatcatggtgatcaacagcgaagcgatatccaagcaatgcttggagtcggagagagaacgacgcgtacaattttaagtcagatggcggatgaaagacttatttctaatgatccaaggaagccagtgtcgctgagcctttcaccaaactcgattgagctactttttcctcacctttggtag

SEQ ID NO: 338830 - DNA, 1179 bp, Pseudomonas aeruginosa
gtgaaacccgatggccgcgaaggcctgaccgccctcggtagctatccggtggtcgggctgggagacgcacgccgcaagcgcttcgagatcaagcagcagctcgccaacggcatagatcccatccactccaagcaacaagccaagactcaggccgtgatcaacggtcgcaccttcgaaagcgttgtgctcgactggcacgcgagcatggtacccaggtgggcgcccggccacgccaagactgtactcagccggttgaagactcacgtattccctttgctcggtgccagagcaatcgttgagttggacacccacgacctcatgcagccactggaggccgtgacgaagcgcggcaccatcgacgtggcgctcaggatcaagaactacctgcaaagcatcatgcgcgaagccaaacggctgcggctgatcacggcgaacccggctcatgacctcgatggctcgatcaagacaccacgggtaactcaccgacccgcactacccttatcgcggctgccagagctactggcatgcatcgaggactacagaggccgcccgctcacgcgccttacggtgatgctgtcgttgcatgtattcgtacgctccagcgaactgcgcttcgcccgttggaatgagttcgacctcaagcgcggaatctgggagatccccgacacccgcccggcgctggacggagtgcccttttccacaaggggtacgaagatggccggggacattcacgttgtacccttatcgccgcaagccgtggccttgctcgagcagatccacgcgatcaccggcaaattcgagctggtgttcgctggcgatgccaagccatggaaaccgatgtccgagaacacggtgaatgccgcgctcaggacgatgggctacgacaccaaggtggatatttgcggccacgggttccgagccatggcgtgcagtgcgccggtcgagtccgggctgtggtcagagacggccatcgaacggcagatgagccacaaggaacgcaacaacgtgcggaccgcttatacccacaaggccgagttcctcgaagagcgccggataatcatgacctggtggagccggtttctggaggcgaaccgcgaggaccatgtgacgccgcatgagtttgccaagcagacgggcgagaacgtcacgcggcttcgcagtgccaagaggaccgagtaa

SEQ ID NO: 338831 - DNA, 954 bp, Pseudomonas aeruginosa
gtgtttatacaaggcgataccgttgatgacctattaaagaagatattcaaaaaaattctggacgatggtacggaagtgcatcccacgaaaggcaaaactaaggagttatccggtgttttgctgaaactgacggatccgctaggtaggttaagccgcaccgagggtaaaggaactatcttcagctgcttaggtgagcttctatggtacttatcaggatctaacaaactagatcaaattcagtattatatacaaaactattgtaattactcggatgacggcaaaaccatatttggagcttatggtccaaaattatttggtgttgatggtcaaattccatcgatcatcctagccttacagcggcaaagctcaacccggaaagcagttgtccagttgttttctagctcagacatcaaagcgcagcacaaagatataccttgtacctgtacacttcaatttatggttagagacggaaaactcagtctttatacatccatgcgttcaaatgatgcattcaaaggtcttccccacgatatattcgcgttcacgatgcttcaagaattggtcgcgcgcagactcgagcttcccatgggagaatacggacactacgccacaagcctacatatatacatggaagacctcgctaagattcaaggtttccaaaatgaaggctggcaagaaaaggttagcatgccgccgatgcctaatggcgatcagacgagcaatgtcctacggctacttaagcatgaaagagaactgcgactgagcaatacaagaatctctggcgaacatacagatgtctattggagagacttatctcttctgcttgaagcgttcaatcttgtaaaacataaaaaaatcacagaacttaagaatatagagcaatctataacgaacttagaactacaaaggtttgtcacgaaaaaaatcatgttaatccagggaaatggagcataa

SEQ ID NO: 338832 - DNA, 861 bp, Pseudomonas aeruginosa
atggagcataagttgcctgaacacattgatttaaactcgctccctgagtctcagcttagcatattgcaaaaaatgacaagcctcatttcggatcaactactcgacaaatttgatgtaattaaatgggctgctccaattccgtattttggagacccttgcaagacaactattgccacagtcggtttaaatccgagcgaccgagaattcgtatcatctgagggcaaagagctcaccgaatccgcacgtaggttccacacgctaaattcttttcagttggctaactggaatgaattgagcctgcctcagctagaagctatacatacctcttgcacagagtatttttccagaaatccttatgatgcttggttcaagccgttagaccttctgctgaaagggactaatgattcattttatagctcattattccatgcctgccatttggatctcatcccgtatgcaacaagcgtgaaatgggcatttttgaaaccttggcaacgtgaatctttgctatctatatctgcaggcttcctcggtcaagttctaaaatactcgccaatcaaaatactagtattaaacggcaagactgtagttgaaaatttcgaaaaggctactgacgtcaccttcatcaaaaaaactaaagatgaatggagcttaccgagaaaaaatggaaatcatatcaaaggatatagctatgaaggtaaaatttcacgaataggaagtaatgagctaggaagagagatctacatattaggatataatcacaacatccaaagcagctacggtgtaacatctacggtacgaacttctattcaagaatggatcacgaaaaagactaaggagattctaattgccaaaccctag

SEQ ID NO: 338833 - DNA, 936 bp, Pseudomonas aeruginosa
ttgccaaaccctagattacctgtcaagcagtcattgagtaacaaactcgatcaggctttgaataatggtttacagcttcccggaatccgtgcagtagaaaacaaaactacgcttgtggatcagttggtagaaagtattcgtcgagtagactatgtaagtgcgattgcctcaaggaatatcagcgctaaccgcattaaccctgacagtaattactttgatccaatccgtgctgcagtcttaaatgtgcaggttggaaactttgaagaggcaagttggctagttttcttggcaacacattttgggaaagctagtcgaacgggttggctcttaaccaaagacgtgtacggagctctcggcgcagggttcaactggacatggccattggtcagcacccaacctttggacatgagccaatggattgccaataatcaggcagaattaaggagtggtggccggaaatttgggaatcaccgaaagtacgagactctcgatccatccaagtcaaactcgacgggggaagttattgagagctacgtgaattgggttatgcagcatggctcccatatgaacctatttactaacgcgttggctcaatctggtggagaccctagagctgcgtttggcattctctataaaaccatgggggctgtaaagcggttcggtcgaacaggaaagtttgattaccttaccatgatcgcgaaggtaggtatttcaacaatcgtcgcagactcgacctatatggcggaagcaactggccccctcagaggagcacgcctactttttggcggagcaacatcggcaaatatttctgcggcagagttggagaaaaaaattcagcagttggacgcagtactaggcgtcggcatgcaggttctcgaagacgctctgtgcaactggcaaaaatccccaggacattttgtaaaattcaggggttag

SEQ ID NO: 338834 - DNA, 1089 bp, Pseudomonas aeruginosa
atgatgaataactctatgtttcagccaacctggatttcacctcctggcgaaacaattttggacattatctctgatcttgatattagtccagaatgcctggcaagagacatagggtatgacttggtcgctgtaaatgccttgttggatggcaattatattataaatgagagtttggctcataaattagctggagctattggccctgatgctgatttctggattactcgagaacagcagtatcgtgaagatatatcacggataattagaaagacaagcaagacggaagataactggcttgaagagttacccataaaaagcatgcaggattttgggtggatttcagactcggaaagcaaatcaaaaaaggtgatcgactgccttgattatttcggtattcctgatattagtgcatggaaggatgtaagctcggaatttactaaaaacgtaaggtttaaaacaagcaagtcattcgataagaaagtaggtgcaactgctgcatgggttagatttggcgagctcagggctctaaaaatttcatgtgagccgtgggatgaaaataagcttctaaatagccttaatgaaattttagccctcacgcatatttcagagccttcgtcatttatccctaagcttcaagatattttaaaagcttgtggtgttgcattggttatctctcgagcccccgatgggtgtccggccagtggtttggctaaattcgtttcttcagataaagcgcttattatgctaagtttccgatatttgtcggatgatcatttttggttttcattgtttcatgaaattgggcatcttgtgctccatgggcagacatcgacttttgtggatggtgaagagttcgaatgcacgaaagaggaagaagaggctaatgagtttgcagctctcaaactcattcctatggaatttaggagaaatatgagagctcatgcttcaaactatagaagtataattaagtttgctaagtctataggtgttgctcctggtattgttgtggggcaaatgcagtatgaaggtatattgaaagtaaactatatgaataagttgaaggtccgatattcgtggtcctcaatttga

SEQ ID NO: 338835 - DNA, 219 bp, Pseudomonas aeruginosa
atggaacgcttgcttgagagtatctatctcaatgcccggcccgcgatggagttgaggctctgcctcacccgttctggccggaagagagtgatgaaggtagtcagcggggaagagattgaactcgagcctggcgaggtgcaggacctcttggaggtccaaaagagggatgttggaatccttgccgacttcttagccaagagcctctttgagcgtatatag

SEQ ID NO: 338836 - DNA, 1182 bp, Pseudomonas aeruginosa; identical to SEQ ID NO: 327047

SEQ ID NO: 338837 - DNA, 690 bp, Pseudomonas aeruginosa
atgttcctcgacggcttcggcccgcagatactcgccggcaccctggtgaccctgaaactggcgctgggctccctgctcggcgccgtgctcatcggcctcctcggcgccagcgccaagctcgccgccaaccgcccgctgcgcgccctggccagcggctatacgacgctgatccgcagcgtccccgacctggtcatcatgctgttgctgttcttcagcctgcagatcctcctcaaccgcgtcaccgacgccctcggcatcgcccaggtcgacatcgacccgttcgccgccggctgcgtcaccctggcgttcatctatggcgcctacttcacggaaaccttccgcggcgccttccaggcggtaccggccggccaggtcgaagccgcgcaagcctacggcatggggcgctggcgagtgttccgccgggtactcctgccgcagatgctgcgctacgccctgccgggcatcggcaacaactggcaggtgctggtcaagtccaccgcgctggtctcgatcatcggtctcggcgacctggtcaaggccacccaggacgccggcaagggcaccctgcagttcttccacttcaccctggtctgcgggctgatctacctggccatcaccgcaatctccaacgccgcgctgctgtggctggagcggcgcagctcgctgggcgtcaggaggccgctgccatga

SEQ ID NO: 338838 - DNA, 2667 bp, Pseudomonas aeruginosa
atgcgtggatcggtatggggaaaatgggacattcacttacacagcccacttacaaacctgaacaatcaatttaaagcttcaacaattgatgattacgcaagaaaaatagcggaaagtgagctatcgctagtcggtgtgactaattattttttcttcaaagaaaatgagcttgagctcgttaggaacgctctgaggcaattagactgcaaaaccgaagttcttggcaacttggaattcagaataagccaacccaacaaggagggagagtggataaacatccatgttatattttcagaacacgtaacaacaaaagaaataaatgcattgctttccaaatttgtaataaccaatacgactgacagcggaaagagcatatggtgctcagaggaatctttcagagaacatgatgtaaaaatatccgaagtagtggtagacactaaatcactgctcaaccaccttgaaggaagcttgcgtcttggccaagatttcttagtagcaatatgcccgtgtggttacggtggtttccaacctgagagaaatgagggccgttcagtcgcaatcgcgaaagaaatcgacaaggtaggccaaattgtcttaggtagagatagagatagaaacttcttcctgagagaagaaagatatgacggcgcaactgcaaaaccggtctttgtttgttcggatgcacacaacattgaatctgtggggactaaatatacatgggtcaaagccagcccgagtttccaggggttaaagcagacagtttttgaaccaagtgacagagtacaacagactgacaacttcactgaaaaaacattcgtaaagccgtactttagtagaatatccgtctcaggaaagatatttaaaggcgaagaactccgatttcaagagcagagcatcccactaaatccaaatttagttgccatcatcggagggcgaggcacaggaaaaagcgtattcctagactcaatgctgtcgagactaaccaaccaagccagcactgaaagagttcgtcaaatatccgtagagaatttatcaataaccctaaatcaaggcggtgctttcggaaaagaaatagagttcgatgatctaacaagtgacgcctactcctacctacatgtatcacaaggagacattcataatttcagcaaaaaccctaactcacttagccatgaaatcaaaagaatgctcggcatccgagaggaagagtttgatagtgtaaccactcaagagctatcagaaaatcttggtgcctatagagattttatagacttttggcttacaactgaccaaaacgggcagcctataaatacgccagaatatcaaaaaacaatcatagacaggaatacgcaactaataagcaccttgaccagcgaccaaaacaaatcattaatagcaaggtaccaagaaaacacgagccagataaactcgaaagcaaactttataaccacgtcaaatgaactaaaagcactcatagagcgcacactaaaacaaatcaacgagcgaatctccgactacaatagccttgctgacgctaacattaaaatcattcagatagatgcaggaaacgccttactcggactagctgaaaatattgaatcggcgaaccaagcttccgaaaggcttaagagttcaaacgacgaaataaaggctgagtttgctaaacaaggaataaaccaagacatctcatctctactttcaaaagtaaacgaatatcaatactcgatagaccaagccaagcaaaagctaactgaaataaatgaccgcactgagcgataccacacgctgattaaaaagcgcgctgaactttcagcgacttacgatatatacgtcgagcagaataggatgtctattgactcagcctttggtgcgctgcaacagaccaacccagagtggagtgaggagcaaaataaaatcgttcaagacatacttaaaagcataaatatatcgggagaaatattgtttgatgacgaaagattttactcaggcttagaacagtgcatcaataaaggaaaatttagatcctctgcagaaaagaccactagacaaaaacttgaagaaactttcaatgtttcagatagacattcattattcaaattgctaaccggccaaaaaatcatcttgctaaatggagagccaagtagcatagaagatttcttctggaaggatgaatatttcaaccaaggaggacgatatgagctaatgaactatctgtttagcccaagatcaattaagaattacctctatgttaatgcggaatttacctacaaaggtagaccagtaaacaaactttcagtcgggcagcggggaacattttatgtttgcctgaaattagcaacggatccattcggcagcccctttgttttcgatcaacccgaggatgacttagacaatgaatttattgtttcagaactcgtcccactcttcaaatcgataaaaaaatatcgacaagttataattgtcactcataacgcaaacttggtagttaactcagacgcagagcaaattttagtcgcaaataacgatggcgagctaatatcatactcttgtggcgctctcgaagatggagacgtcaagaatggcgatggaataaaagcgatggtatgtcgtattctggagggcggccacactgcgttcgagaatcgagaaaagaaatatggaataatataa

SEQ ID NO: 338839 - DNA, 1146 bp, Pseudomonas aeruginosa
atgagcaagaagacgcttccggcggcgggggacacccccgccgccctgccagccggctacgccggcatccacagcggcattgtggaagtcctcgatgctgcccgccatgcggcggcacgcagcgtcaatgcgctgatgaccgccagctattgggagattggccgtcggatcgtggaagccgagcagcggggcaagcggcgcgccgggtacggcgaacagttgatcgaacggctgtcggccgacctgaccgcgcagttcgggcgcgggttcagccgcccgaacttgcagcagatgcggtcgttcttcctgacttggccaattcgccagacagtgtctagcgaatcttccccggcgccggtgcctgtggcgcgtccttggcgcctcgatgaactggcccaggtcttcacgctgccgtggtcggcctacgtccggctgctgtcggtcaaggacggacatgcccgccagttctacgaggccgaagccctgcgcggcggctggagcgtgcgccagctcgatcgccagatcaacagccagttctacgaacgcacggcgctgtcgaagaacaaggcggcgatgctggtcaagggagccgtaccgaaggccgaggatgccgtcacccctgacgacgcgatcaaagacccgtatgtgctggaattcctcgacctcaaggatgagtattcggagtctgaccttgagcaagccctaatccagcggctggaggatttcctgctcgaactgggcgatggtttcgccttcgtcgggcggcagcgtcgattgcgcatcgaccagacctggtatcgggtcgatctgctgttcttccatcgtcggttgcgctgcctggtcatcatcgacttgaagctcggtgcactgacccatgccgacgtgggccagatgcacttgtattgcaactacgcgaaggagcactggacgttcgccgacgagaacccgcccgtgggcctgatcttgtgtgcggacaagggccacgccctggcgcggtacgcgctggagggcttgcccagcaaagtaatggcagcgaattaccggatggtgctgccggatgccgaagtgctgcaaaaggaactggagaacacgcggcggctgatcgaatctcgcggaacgatcgtccccaagaagcgcaagcgataa

SEQ ID NO: 338840 - DNA, 2976 bp, Pseudomonas aeruginosa
atgatcggtcgtggatctgaatggcgtcgttgggaaccacatatccatgcgccgggcaccgttctcaacaatcaatttggtggtggctctgcttgggacacttatctcgaaagccttgaggccgcgacgccgaagatcgaggcgcttgcggtaacggactactatctcacggacacctacgaagaggtcctgtcgcacaaagcggcgggccgtttgcccaatgtgcagctcatcttcccaaacgttgaactgcgcctagatgtcgccgccaagactggctttgtcaatttgcaccttctcgtcagccccgaagactcaaatcatgtcgctgagctgcatcgcattcttcaacggctccagtttcaggcgcacggcgacaccttcaactgcacccgagccgacctgatctcactcggcaagaaggcggacacgagcatcaccgatgatcgcgcggcccttgcgcatggcgcaactcagttcaaagtcaatttcgaccaactccgccgtgtcgtgcgcgaaagcgagtgggcgaaagcgaacatcctcatcgccgtggcgggcgccgccggcgacggcacgtctggactgcgtcaggcgtccgatacgacgatgcgcgaagaaatcgagaagttcgcgcacgtcatcttctcaagcagtccagcgcaacgggagttttggtccggacgtcggagcctgacactcgatcaactccgcgagcgatttggcggatgcaagccgtgcctgcatggcagcgacgctcacgaccagaagacggtcggtcggcccgtcgacgatcgcttttcgtggctaaagggtggcctcgaattcgatgccctgcgccaagcctgcatcgaccccgaaggccgcgcccatgtcggcacggagccaccacgcactgcgcttccgtcacaagtgatctcgcatgtaacgatcaccgatggggactgggcgactactcctgagatcccgctaaacccgggccttgtcgccattatcggcgcgcgaggctccggcaagactgctcttgccgacatgattgcagcaggctgcgatgcgataacgcccgtggcatggcgcgcgaacgagaacgccagcccctcgttcttggtccgtgctcgcaagctactaggcgacgcatccgccaccctaatctggggcggcggcgcgacggtcacgcgctttctcgacggtcgcgacgcgaacagccatctatccttcccgcgcgcccgctatctctcgcagcaatttgtcgaggagctgtgctctgcgaatggagtgtcggacggccttatcgctgaaatcgagcgagtgatattcgaggctcattcgcaggacgaccgggacggcgccatcgatttcgccgagttgcgcgactatcgcaccgcccgcttccagcaggcgcgcgagcgagaggccgatgcgatcgcggatgtttccgatcgcatcgccacggaattcgagaaagaggcatcgatcgccggtctcacggcccaggtcacgcagaagaccggacagatcaagagctacaaccaggatctagccaagctggtagtcaaaggcaccgaagctcaagccaagcggcacacgcaactagggcaagcagtccagacgatccgcggcacaattcaggcttacggcaatcagcgccggacctttcttgctctgcaggatgaagtcgccagcacccgcgcgaccaaggccccggaactgttgcgtcaagccaaggagcgccatcagcaaagtggcctaaccctacagcaatgggacgagttcctgctcatctacaagggcgacgtagacaacagcctgaccggctacgtggcttgggccgacaagcagatcgcgaccctcaccggcccgtccgttccgccgggcgacccgaacacgccgcttttccccgacacggccgatctgacgacgcttaccctgaatacgcttcaggccgagatgaccagacttgaagcgctggtcagcgccgacaatctcgtgcgaaagcagtattctgccctttcgcaacgcatcgccaaggaaaacactgccctacagacacttcaggcgcgcctgaccgacgctcagggcgcctctgcccgccgcaaggatttgcaaaccgagcgcgatgcgacctacggccggatattccaagcgatcatcaatgaacagacggcgcttgccgatctctatgcgcccttgatggcgcgccttacggcatcaaccggcacattgcgcaagctcggcttctccgtccggcgcgtcgtcgatgttggtgcctgggcggccgtggcggaggaggaccttctcgacagacgtaaggccgggccgttccaggggcgtggagccttgacgtccctggcagaatccgctctccggcctgcgtgggaaaccggatcagcggccgacgtgcaagcggctatgacaagcttcatctcgctctatatgcgggacttgattggccatgcgccctatgcgcaaagtcagcaggcggagttccgaagctggctgaagcaattcgcgcattggctcttcgacactgaccatatctcagtccgctacgaaatcgtctacgacggcatagatatccgaaagctctcgcccggcacgcgaggcatcgtgttgcttctgctctatcttgcgttagacgacgctgacgacaggccgctcatcatcgatcagccagaagagaatcttgatccgaagtccgtgttcgacgagctggttgcgctatttatcgccgccaaggcaaagcgccaagtgatcatggtcacgcacaatgcaaacctggtcatcaatactgacgcagatcagatcatcgtcgccgatgccggccctcatcctgccggcgggctgccccctatcaagtacatggctggcggtctcgaaaacgcggtcatccgcacagccgtttgcgacatcttggaaggtggcgaggaagcttttcgcgaacgtgcacgccgattgcgggtcaggctggatcgctga

SEQ ID NO: 338841 - DNA, 507 bp, Pseudomonas aeruginosa
atgtcgcaactgtccctctctctcgatacgtcgctgatggtgcgcgatggccgcgggcgctatcggccggcggacgccgaccagattctggaagccgcgcgccaggtcatcgaacagaagatgcagcgcggcgaggcgttcacttcgccggcggcggtcaagaactacctgcgcgccaagctggccggcttcgagcacgaagtcttcgcggtgctgttcatggacacgcgccatcggctgatcgactacgtggagatgttccacggcacgatcgattcggccgaggtgcatccgcgcgaggtggtcaagcaggcgctgcggctcaacgcggcggcggtcatcgtcagccacaaccatccgagcgggaacccggagccgagcggcgccgaccgggtactgacccagcagctcaagcaggcgttggcgctggtggacgttcgcatgctggatcacgtcatcgtcgcaggtgccggtgctacgtcgtttgcagagcgcggtctgctctga

SEQ ID NO: 338842 - DNA, 1119 bp, Pseudomonas aeruginosa
atgaagctaaacaaggcttggtgggagcatctggcgccgaagtcgatgattgcacggcggcgcgaggttgagcagttgcttgaagacttcgtgcggtcctccgactacgggcgggaatgggcgcgggtagctgcgaatccccacggcgtgtttaggctcaagccaggccaagtaatacccgtggtgcgcatgattttcatgggcgaccgtccgggcttcatatctccgttccggaagctcatggatgggcacagaacggtggaccgcaagccagagtacgatctcggcgccctggttgaaggcgagttagctatccagcctacgatttcggtggaaatcgttactgaccccgcatacttgactgctgccatgcgcggagctacgcagattgacgaaagcgccatcagaagccctagcctcgtattttcggtgcccgcgcacttcctgctatcgcccaagcactaccccgaacgcgcatacgtcctctaccagcacatcttcggcgctggtgggtcgtaccccgacgacgggtccttttatgtgggtgtgtccacccgtagctggcaaaagcgctggtccgagcaccgtcgtgcgattgagacgggcagtccattgcttttccatcgccgatttcgagaagagcaagagggtgggcgtctcacgtacgtgcaccacaaggtgatggccatcaccgacgatctggagcagctctacgaggcggaggagttcttggtagaagggcattgggatgacgaacgccggctcaacatggtgccgggcggaaagagcggcctgcgctacctgcgcgaaaacggattgctttcgaaaggcgtcgttcctctgcccgatgagcgcgacaagattctgcacaagtggctgaatgaccatccccgcttgggattaccggcgccatgggtcgccgaaaagtggaaggacaacgactgggcgatagcgcagatttgcgggcgggacgggcgcttatccgtggtccaagtcaaggcaatacgcgagctcgccaaagaccacacacccgaggaaatttacgtgcgcatcggggcgaaagacgtggaccaagtgaaacgagtcttggatggaaaaacctacgcacgaatagcctga

SEQ ID NO: 338843 - DNA, 1041 bp, Pseudomonas aeruginosa
ttgaaactgcacctgttaatagatacatgcgtttggctggatttggccaaagactatcggcagttgccgcttcttgatgcgctggtcgccatgaaagaggctggcgagcttgaaatagtgctcccagaaatcgtggtagaggaattcaaccgcaacaaggagcgagtcatctcggaaagcaaacgcagcctttcaagccatttcaggctagtgcgcgaagcgatgctaaagttcgcgccccaagatggacgcgatgccgcgattcaaagattgaatgaagttgatcatcgaattgccgttgggggcgaggcggtgaacgatgcggtcgagatcatcgaaaaaatgttctcatcagcgactcatatcgcactgaccgatactattaaagcacgggccgcagatcgagccatcgcaaagattgcgccgtttcatcgtcaacgcaatgggatagatgatgcaatcctcatcgagacctacattgatgtgattgcggccaagtccagcacagacgacgtgtacggctttgtgacccataacactcacgacttcagcgatcgcagcggtgacacacgtttgccgcaccccgacctagctgcactgttcgataacagcggttcccgctatgcgacgaaccttggcccactattgggtgaattcgccgaagacctgctggacgaagtaaagtttgagcgagaatttggtcaagagccacgcaaactatccgaactgctagaggccgaacacaggcttttcaagcaggtctggtacaaccggcattggaatctgcgcactgccatagaacgcagcaagcacaggctcgtcagccgtgaggagtgggagcagatgccctctaaggaacggaatgatgtgaccatcgataccgtctgggaaggagctcttgcatcagccaagcgaaccgaggatgaacttggcccggacgaaattggcccgtgggatgattttgagtggggaatgataaatggcaagctgtctgccatccggtggatgttaggcgacgattgggacatgctcgacacgtaa

SEQ ID NO: 338844 - DNA, 825 bp, Pseudomonas aeruginosa
atgacgacatcccgttctagcagagggtccgagcagccgaccgagaagaacgatcacatgtcccgcccagtgccggaatggttcacgatcgccgaagacgccacgccgaaggtgatggagcgcgtcggtagcgccgtcaccgctaatgcaatgatgccacaggtgaaatcggctccaatgctggcgcactggttcgtactggataccctgttgctggcaaatcaggccaatcgcgacggaatgcacgccaatgcccttgcgttgacgcggcaatgcgtagaggccatcagcatcatcgagttggggatatgcaggcatcccgatgccgaagcaacgctgcttaagtgggatgccgatgaactgacacccggcaagctgcgggcatggctgcaagcgaatgtttggcacggttatggggtgggcctttggagcgagccttggtccaccttcatgcgtgagttcgctggcgcggttcagccctatgctcactatggtcgcgctcttgcgcaatggcagctacgtcttcttcgcttccacgacgcaggccaacccgacgccgactcgcatgccatcattgagatgcgcccgcgcgcctacgatgcgcaaaaggccactcgcatcaccctgtttcacgccctgctttcctacgtactcgggcgaacttgggcggcggcaaaccccgccgatgcggaattcgccgccctgatcgcacgacttggcttggcattgggcaagtcgcgctatctcgatggacgtcaaaccgactggggccagcagttctgggcgatggtctgggagcgaggcggcggaacgatcctcgaatag

SEQ ID NO: 338845 - DNA, 987 bp, Pseudomonas aeruginosa
atgaaatggaaaagcaggaaccttagagaactcgcccacattgtttgcggcgacactgacaattttcgttatcgctccagcagttacatcactgaatttttccaggattgcgacctagattacgtccatgacggttcaacccgatgggcatgggttgcaagcaggctggaagaagtgttgtcactaccacatcccagcccatcggttccgccagacgccttcatccgaatcatccgtgccaccctcgataaaggcgacgcgcaagacggtgaccccgagcgaagcaaggcactttccgcgttgaacatcgtactagcgcgcgaaggttgggaggcgttctacgatgagcatggcatcgggcagcttcgccacattgccacgaacaccgttgcgcagatggcaaacccgcatcgccctctgactccagcggaagtcgagcgtcgggagcaactcactgcctatttgaacaagtgctccgaagatgaattgatcgaggaagtgctactgccactgtttcgtcagctcggatttcaccgcatcacggcagcaggtcacaaagacaaggcgttggagtatggcaaggacgtgtggatgaaatacaccctgccgacccttcatgttctttactttggcatccaagcgaagaggggaaagctggactcatcaggcgtcgggaaggatggttccgccaatgtcgccgagatacacaaccaggcaaacatgatgctcgggcacgagatattcgacccagagctgaaccgtcgcgtgctggtcgatcatgcttttatcgtcgccggtggcgaaataacgaaacaggcaaggaactggcttggaaacaagcttgacgctgctaaacgttcgcagattttgttcatggatagggatgacatcctcaacctgttcatcgttacgaatctaccgctgccgaagggagcactacctcccgagagaactgtggatcaattcgatgacgacatcccgttctag

SEQ ID NO: 338846 - DNA, 291 bp, Pseudomonas aeruginosa
gtggcggcgaggtactcattggcgcaggcgttgaagactgtcaggaaagcgcgtggcttgagccaggaagcgttctccgacgtgtccagccgcacctatatgagtacgctggagcgcgatctgaaaagcccgaccatcagcaagctggccgagctgtgcgaagtgatggaggtgcatccgctcacgttgctgacgctggcctatgccggcaacagcacgcgcaaggccgagcagcttctggcgcaggtgcggcaggagctgaaagagattggtcaagatggctctgagtaa

SEQ ID NO: 338847 - DNA, 348 bp, Pseudomonas aeruginosa
atgaacccgctcatcaccgacgagcaacgcgcgcggctgctcgccaacggcgcggcgcgcgccattggccagtgcatcgacccgctcccggtggcgcgcctgttcacccccgacgcgcatgtgacctggctgctggtgtcgctcgatcctgcggatggcgacacctgttggggactgatcgacctcggcatcgggatgcccgacctgggcacggtgcagctatcggcactggcatccatcgtcgggccgcacaaacagccggtgatgcgggatcgttacttccaggcggcgcgcccgctgtcggagtacgtcaggctggcgcaggccaacggctcgatcacggactga

SEQ ID NO: 338848 - DNA, 285 bp, Pseudomonas aeruginosa
atgcgacccgctcccctgcggcctgccgccgctgtatcgaccgctgccgcacagccgcagcgttatctcaccaacgacgaagccgccgagtacctgcgcctgtcgccgcgcacgctggaaaagcagcgcgtgatcggcggcggcccgaagttccgcaagttcggccggcgcgtgatgtacgccgtcgccgacctcgacgcctgggcagacgcgcgcagcttcgatgccacgtccgacccggagtacgccgagcgccatgcgggtgactaccgtgaccgccgctga

SEQ ID NO: 338849 - DNA, 1983 bp, Pseudomonas aeruginosa
atgaccgaccgccgcgacgacgatttccgggtgcgccccagcgccccgaagaaccggggcaagaaccagggccagagcttcgtttccaaggtgctcaagcaggccggcaaagccagcagcggcaagtcggccgtgcgccgtcctggggcggccggcaccggccagcgccccggctcgcgcctggggcgcggccacacagcagcgcgcttcgccggggcgaagctgacgcccatgtcgcggcgcgtgaccatcaagacgctgctggtcaatcaacgcaatgccagcccgcagtcgctcgccaaacacctgcgctacatcgagcgcgacggcgcgggccgcgatggcgaaccgggccgcgcctacgggccacaggccgacgaagccgacctggacaccttcaaggaacgctgcgccgacgaccggcaccatttccgcttcatcgtctcgcccgaggacggggccgagctggacgacctgcgcacctacacccggcatctggtgaaccgcatggaagccgacctgggcacgcggctggattgggtggcggtggatcactggaacaccgacaacccgcatacccacctgatcgtgcgcggacgcgacgacaccggcaaagacctcatcatcgcgggcgactacatcgccgacggtttccgctatcgcgccgccgagctggcgaccgaatggctggggccgcgcaccgaactggagatccagcagaccttgcggcgcgaggtagaacaggagcgttggacaagcctcgaccgcacgctgcaacgcgaggccagcgactatggccgggtgcatgtcgaacggctcaacgaaccccggctgcaacgccagcgcctgctgctgatcggccgcctgcaacgcttgcagcgcctgggcctggccgacgagacgcagcccggaacctgggccatccataccgacgctgagaagaccttgcgcgccctgggcgagcgcggtgacatcatccgcaccatgcagcgggccatgcgcggcgagccgcgcgaactggcggtgttcgagccgggcgaggatggccgaaccatcctcgggcgcgtggctgcgaaggggctggccgacgagctgcacgaccgaggttatctggtcatcgacggcgtggacggcaaggcccactatgtcgcgctcaatgcccgcgatgaactggcgaactatccggccggggccgtggtcgaggtgaagggatcggccgacgtgcgcgcggccgacaggaacatcgccgcgctggcgagtgatggcctgtaccgcaccgaccaccacctggccatcgaacagggccgggccacgcccagacgcgacccgcaggaagtcgtcgccgcccacgttcggcggctggaagccctgcgccgggcgggcatcgtggagcgcgtggccgaagggctatggaaggtgccggacgacctggccgagcgtggccgccagtacgatgcgcagcgcctgggcggcgtcgctgtggaactgaaatcgcacctgcccatcgagcggcaggcccgcgtgatcggcgcgacctggcttgaccagcaattgatcggaggcggcctggggctgggcgacctgggctttggtggcgacgccaagcaggcgatgcaacagcgcgccgacttcctcgaagaacaggggctggcgcagcggctcggccagcgcgtgatcctcgcccgcaatctgctgggcacgctgcgcaaccgggaactggtgcaggccgcgaaggacattgccggggaaaccggcctggagcatcgcccggtggctgacgggcagcgcgtggccggcatctaccggcgctccgtcatgctcgccagcgggcgctacgcgatgctggacgacggcatgggattcagcttggtgccgtggcggccggtgatcgaacagcggctggggcagcagctcgccgcgacggtacacggcggtggtatgtcgtgggagatcgggcggcaacgtgggccaactgttggttga

SEQ ID NO: 338850 - DNA, 726 bp, Pseudomonas aeruginosa
atgatcgcgctgttatttctcttctttctcgcccttggtgctggtgtgctcagcggcgtcgtcggcaccggctcgtcgctcatcatgttgcccgtcctcgtcacgctgtacgggccacggatcgctgtacctgttatggcgattgcgtccttgttcgggaacatcgggcgggtgattgcctggtggcacgagatccgttggcggccggtgtttgcctattcgttggcgggagttcctgcggctgtgctcggggcgcacacgctgctgacgatctctcctgccactgtggacgtgttcctggcagctttcttccttgcgatgatcccgctgcgccgcctcatcagacgatcgaacctccatctgaacctctggcacatgagttttgccggggcgattgtcgggttcctgaccggattcgtgctgtccaccgggccgctcagcgtgccggtattcaccgggtacggaatgagtggcggtgcatttctgggatcggaggccgcaagcgctatcctgctctatgccggcaagcttggtacgtttggtgtgtcaggcgtacttacgcagcccgtcatcgcacgtggacttgccatcggcatcgcattgctcgtcggttcgatgattgcgaaacgtctcgtccagcgactccagacgcacacattcgagcttcttatcgatgcggttctcgtcgctggggcggcaggaatgatcctctccctcaacggatga

SEQ ID NO: 338851 - DNA, 897 bp, Pseudomonas aeruginosa
atgaatcctgaaatcaaccctggcgtcgctgtcgtcggtcccggtgccattggcaccacgatcgcggcggcgctacacgaggtcggccgcacgccgttgctgtgtggacgtagcccccgcgatcacctgaccctccaagatggcgaccgctttatcaccgtacctggccctgttcggacgaatccgacacaaatcgctcgcacggctgatcttgtctttttggccgtcaaggcaacacaaatcgaagcggcagcagaatggcttgcggcgttggtcaggccggaaacggtggtgtgcgttttgcagaacgggatcgaacagttggatagggttcgcccgtactcgccacacgggcaaatcgttcctgccgtcgtgtggttccctgcgcaggcgcaatccgacggctcggtacgcttgcgtggtgacgcgcgcctcagcctgccggacacgtcagcttcccgcgtagtcgccgcatcgctacaaggcacacggtgtgccgtagatttggccgcgaactttagctcgctggcttggcgcaagctgatgcaaaacgcggtggctggagtcatggcactcacgcaccgccgctcaggcatgttcggtcgcgctgatatcgccagacttacgctggcttatttgcaggaatgcctggccgtggcacgtgccgagggcgctgaactcggcgacgaagtgccgcaagagatcctcgacaagttccgggcggcgcccacagacatgagcacctccatcctcacagatcgagaagctggccgaccgctcgaatgggatatccgcaacggcgtcattgcgcgtcgcggccaggttcacggcattccgaccccgatcagcgacatcctggtgccgcttcttgcggctgcgagcgacggcccaggttga

SEQ ID NO: 338852 - DNA, 885 bp, Pseudomonas aeruginosa
atgaaaaatgaaattggtaacagcgtttcagaggctgagcaacggttgcagcaatggatcggcagcattcaagcccgaagcggcgacctcgccgcaagcgaggcgaaagttgtcgatctcctcctcaccgatcctttgtttgtcggagcaagcactaccgcccaggttgccgcccgtgccggcgtttctccgccgacggtgattcgcgctgcgcgtgcgctcgggttcggcgggtttaccgagctgaagatcgagatcgcgcgtgctcgcggcacagcccgattcttcgcgcctcctgaagcactcgccgcggatgcgacgtcggcctcagtgcttgaaacatccattcgtgctggtaccgatgcactgaccgcgcttagtggggccatcgaactctctgcgcttgataaggccgtcggcttgatccagcgcgcgcgccaggtgtttgcgttcggtgctggaccttcctcgacggttgccgccgatacggtcttccgtctgcgtacgatcggcgtgatgaccgtgggcatcacggatcatttgtcggccatgattgcggcacggctcctgggcgcagaagacgtcgtcatcgcggtcagctcgaccggccgcacgtcttcaacgctagccgtcgcggatgcggcgtcctcggctggcgcctcgctgatcgccgtcaccaatcagtacgacacgcccctggcgaccctcgccgacgtcgcgcttgtcgtcggcggcgtaccactaccggcacagatggccgctgcgggaagtcgattggctcagctcgtcgttatcgatgcgttggtcgcatccctggcgctgcacgatcaagagcggacccgcttggcggagcgggcgggcatcgatcttcccgacatttcctga

SEQ ID NO: 338853 - DNA, 861 bp, Pseudomonas aeruginosa
atgcagcccggcaccatcgcaatggttctcgccgcagcggtagcccatgcggtgtggaacctggcctcgaagtacaagcggggagacactttactgttcgtctgggcttatagctgtgcttcgacgctgctgtgggtcccgatcggtctcgttcttatggttcaggaccaaggggcgatcaattggcggctcggggtgggggcggccgtttcggcggcattgcacattgcgtattccctgaccttgcaggctggctacgatcgtgccgaactcggggtggtttatccgatcgcccgtggcacagggccggtgctgacgatgctgtttgcgattcttattttgggggagtggctctccgtcgtcgcgcttttaggcgcgcttctcgtcgtctcaggcatcctcatcgttaccggcaacccttttggaagcggaagccgccgcccgctccaggggatgttttggggaggtgctacgggggccaccatcgcaagctataccgtctgggacagctacgcagtcacgtcgctgcatttggcgcccgtgagctactacgctgccacactgcttctgcaaaccctgatcctgactccaagcgcactgcgccggtggcatcacattcacacagttatccgtgctgatgccgtgcctattcttatagtggccgtattctctccactggcctacatcctcgtgctaaccgccatgctgaccgcaccgctcgcgctcgtcgcccctctgcgtgagtcgtctatcatcatcggttccctcttcgcgtatctgctctttcgtgaggaccatctcgcgcgccgcatcgtgggtgccgtggtcgtgctgatcggaatcgcggcgatcagcctgtga

SEQ ID NO: 338854 - DNA, 933 bp, Pseudomonas aeruginosa
atgtcgcgccccgatctcaatctcctgcttgcgctggacgcgctgctcgacgaaggcagcgtcatcggcgccgcgcgccgcatgcacttgagcgcacccgcgatgagccgcaccttgagccgtatccgggaggctttgggcgatccggtattcgtccaggtcggtcgcaagctcgtacccacgcctagagcaatggcgctgcgcgagcaggtgcggctggcggtcgaacaggcctcgcaggtgttcgcctccgatgcagagatcgacctgaaatcgctggatcggcgtttcaacgtgcgtgctaccgacgagttcgtgagcatccatcttggccatctccttgatgcgatggcgcgggagatgccgcgggcgatgctgcgcttttcgccggaggaagatgacgtggacgaggaggcgctgcgtagcggccgcatcgacctattcataagcgcatcgcgcaagctggggccggagattcgcgtgcagtcgctgttcaccaccacgttcgtgggcgtcgcgcgcgccaaccatccgattttcgacgacgagatcacgcccgagcgcctcacgcgctgggagcacatcaacgtgtcgcggcgcggcaaggccgtcgggccggtcgatgctgcgctggaggcgcaggggctgcgccgacacgtcgccctggtactgcccaatccgtacacggcactgtttgcattgcaagattcggatctgctattgccgttgccccggcatctggccagtactgcgctgtccgcgggcttgcatattcgcgtgttcgacctgccgacaccgctggaaacggtgctactgacccaggcctggcatccgcgcctggagggcgacccggcccatcaatggctgcggcagaccatccatacgctctgcaacgagagccaggcgcaagcggcaaagcgcgccaagccctag

SEQ ID NO: 338855 - DNA, 2067 bp, Pseudomonas aeruginosa
ttggcgcgtggcctgctttgtctcgatctgactacgccacgcgcgacctatgtgatgcggtcgatcctggctgcctgcctagctttggtggtcgcctatttgctcgatctgcacgcgccctacgcggcggcttccagcgtgctgctggtcatcaaccccgtccagggcggcgtaatcggcaagggagtgtggcgagtgctgggtacgctggtcggcatgctggcggccttcgtgctgatgagcgccttcggccagatgccctggctgttcctgctcggtttcggcctgtggctgggggtgtgcgtggtgggcatgaccctgctgcgtcatttccgagcctatggtgccacgctggcaggctataccgtgggcctggcggcctacggcgccatgcagcatccggaacgcaccttcgaccaagtaatggggcgcggagcatccgtgatgatcggcgtggtctgcctagcgctggtctcggccctgttcagcagccgcagcgtgcacagccgcctggcggcgttgctcgaccgccttgcggtcgccacggcgggcgtgcttgcgacgcatcaccaggccattcaaggtagcgacggaccagatgccaagcccctcgatgccggacggcgctcgctcatcaccgaggtctatggcgtggacgatctgctggctctgggcaaggccgaatccgccgacctagcccatcgtgccggcacggtgcggcacgcaatggtgtcgcttttttccgctcttgtgggcggtgcgccgcccctgcacgggcaaagcgccagcctagctgtactgagagtgttgcaaccggactgggaaaaggcatggcgggaggtcggccggtcgctggggcaggaatctggcacggccggaagagcacgagctatccggctattgaccgacctgcgcgcccgactggtggacgtgctcaccgccacctcgttcgacgacgcctccgagcaagccacactgatgatcgcgggcgatcgcttgatcgagcaactcgacgattacctacaagcccttgaaggcatcgaacgtttccaccaacccaggccgacgccggctcacgtgtccgtgccgttccatcgtgacaccacggcagccctccagaacggcgtgcgcgcactgttgaccgtgctgatgggcggcgccttctggatcgccaccggttggacggaaggcaacatgatgctggcggggttggcggcagcctccgcgctgctgtccaccgcgcccaatcccgcgctgggtgcggtcgagttcattaagggtacggtggcagccgtggcgatggccttcctgtgcaccttcatcgtgctgccgcacgtctcgggcctgccgttgttgctggtgatcctgagtctgttctggctgccaggtgtgtatgccaccacgatgccgcgttatgccttggcgggcgtggcctatctggtggcgttcacgacgctggcggcggcggacaacccgatgcgctacgactttgcgctgttcctcaatggggccgtggcctggatcctggccacgtgtttcacactgttgggcttcaggatcgtgctgccgcgcaacggggggcgtgacgtcatgcgcttgcgcctgcgaatccgcgattcggcgctgagcaccttacgcggggagccgacggatgcgccggcttggcaatggcgccagcagcaccgcatcgcgcaactcggcgccttgctcaaagcgcagccgcaggcgatggatcgtgccattgctcaggcactgaccagtctgcacctgggccgagaggtgctacgccttcgccgctggctgcgccaagcctctccagacgccgaatggccgcatgcggtggagcgctcgctgcgctacatgcgtcaacgggccggtgatcccgtgagtgccgctcgtcatgcccgccgtgcggcgacgtctctggcgcgtttgccggtgcgatccagcgccgcgatggatgaaatgaggcgcgtgacggccgttctgttcgacatcgccgcgctgctggagcgtcatgcgaacggcgttccgtccccctctggaggccaagcccatgctcagtga

SEQ ID NO: 338856 - DNA, 876 bp, Pseudomonas aeruginosa
gtggtggtggttgccgccggctttctggtcagtgcgctgtggcgcgcctacgtcgtcgctccctggacccgcgatggccgtgtcagcgcgcagattgtgcgcatcgcccccgaagtgtcaggcaccgtcgccgaggtttcggtcgcggacgaccaatacgtcaaacgcggagaagtgctctatcgcatcgacaatgccagcttcgcgctggcattggcccaggccgaggcgcagctggcggcggccgaggtgtccttgcgccagaagactgaggaggcgcgccgccgccggggtatggaaagcctggtgcctgccgaggacatccagcgagcgaatcaggccgtagccatcgcccaggccgaacttcgcggtgcacgggtcaccgtggagagggcgaagctggatctggcgcgtaccgaactgcgtgcgccaaccgatggctacatcacgcgcctgcgcctgaacaagggcgactacgccgtggcgggccagccgaacctggccctgatcgacgcccatagcttctggattaccggctatttcgaggaaaccaaactgcgcggcatcaagcccggcgcggcggcgcaaatccgcctgatgggcttcgaccaagtgttgccaggacgggtggccagcatcgggcgcggcatcaccgacagcaaccagcaggccgacgcgcagggcctgccgagcgtggagcccagcttcagttgggtccggctggcgcagcgcattcccgtgcgcgtcgagttcgagcatgtcccgcaggaggtcgtgctggccgccggcatgaccggcagcatcgaggtcacgccttcagcaggcacgccagtgccgcagggccggctgatttcgctgctacaccgctggatgtga

SEQ ID NO: 338857 - DNA, 1485 bp, Pseudomonas aeruginosa
atgcctgcacccatcccctgcacacagccgcgccttcggcaggcaatgctggcctcactgttggccgtcctggccggctgcaccaccgtgggcccggactaccgcacgccgacgctggatgtgcccgcgcactggatcgacgccaacgtcgccatgtccgacggcgaccacgatggcctgcgcacctggtggcgcgccttccaagatccgttgctcgaccgcctggtcgatcagaccctgacgcataaccaggacctagatatcgccttggcgcgcctgcgccaggcacgcgccgaacgtgtgcagatcgcatcagccgccttgcccgaagtctcggtcggcgccactggccagacggtgcgcagtagcaaggcactcagcgcgcagcccggcggacgggcacgaacctggcacctgggattcgatgccagttgggaactggacttgttcggaggcacgcgccgcgcggtcgaagccgctgaagccggcatccaggcgctcgccgaagaccatcgcgcgctgcaagtgagcttggtagccgaactggtatccgattacgccggactgcgcgccgcgcaactgcgtctggccatcgcgcaagatagtatccgcacgctggctgaagccgaacgcctggccgaacaggcacaccgcagcggcctgggcacgctggccgacgttacccaggcccgcgctgagcgcgaaacggccgaggcgcaaccgcctttgctggaagcagacatcgcccgtttcagccatgccatcggcgtgctggcgggcggctttcccggggattggcacgccgacctcgccacgtccgcaccggcattgcccatgccggccgacttgccgctgtcactcccttcggaagttattcgccaacgccccgacctgcgtgcggacgaacgacgcctggccgccgccaccgcgcagatcggcgtagccgaggccgcacgctttcccacgttccgcattcccctgggaatcggcaccaccgccagcgtcatccacgacctgttctcgggcgccagcctggcgtggtcggcggcgatgcaaggcagccagtccctctacgatgccggccgcgcgagggcaggcgtgacagcggcgcaggccaacgccgacgccgtgcggcgcgtctacgagcgggacgtgaggtcggccctgcgcgacgtggaagacgccttgactgcatggaccagcgaacgccagcggcaagccgcgttacagaaagcagtggtcgacagccaacaagctttggaacagaccacccaactctacgcgcggggattgagcgcctacttgccggtgctggtggcgcagcgcagcctgaaccaggcacgcgatgcgcttgccctcagccaactggcgcagttgcaaggcggcattgccttgtacaaggcgctgggcgcgggagggacggacagggcattgctctttcaatccgacgaaggccccgccgcacaaacagcggcgacgcattga

SEQ ID NO: 338858 - DNA, 939 bp, Pseudomonas aeruginosa
atgtacgtaatgtcgaagcatgagcaggtttcggatgccgacgtgatctcatgcgtggccgatctggtcttgcgcggtgcggatctctctattctcgaccctggtcatcagcttgttcgaggggatgccgtgcttcgcgcgaaagtgctggagcaccgctatcgcgaggtcttcatccaggacgcgcttgaaaccggccactgtttcatgggtatgaacgggcagatgctctttagaacgtcagcaacgccgcaatccttcgtcggaattgctttggaggcctacgtcgttcggtgcttcaacgacaacatgcggattgctgggcggatggcgttgcaatggtgctctttccgcaccaggcgtccaacggaagctttcgtggacaaattcgtcgcgatcggcactgggctagtcaaaacgcgtcaggcgttcccgttcttttacgcacctcaaagcggcgtggacgtcctctttctgacgcgaactacaacttcagcttgtgccagcgttacacacgaaccgcttaccatcaagggcacggacgtcgccgcaggaattcagctcaaggctatccaaggcaacgagagagctgagatcatccagccgctgctgcagcaaaactatttgaaggtgatgactctgctccgtcggcccgacggccggcattctgcggatgtgtgccatgagatcatcggcaacctcgctcgaagtggcgaaatcaccagcatgcagcgaatggatcttgaaaataggatctgtcgtccagagcaaatagggctcgaccagcgagagattgattggtactacgaatatgcgatcgcgtgcgtcgaaggtcgagccatgttggacagttcggcaatcgacgcaatcgctatggaggtcaagcaacagaagtacggtggggccgccattcttcttcccggaagcgaactccgctag

SEQ ID NO: 338859 - DNA, 492 bp, Pseudomonas aeruginosa
ttgcagatcctagacgctacgtgggcgcagctccagacaacggctgcgctagaatccgaactgttctctacccctgtagagcacttcctggtccgcgcattcctttccgatggcatcgatgaagtgatggcccacctcatcgtggtcgaagccgcctttggcacagagagcgattacaaagccaagcagcgtttgccaactgacacccaccagcaaagagctactccgcgggtcgcagcacggctaagtgctgccatcgggaggccagaagcggcgaaggaatacctggacttgcacgacatgcgctgcacctacgttcatgggcgtcctgaaggccgcatcatctccaccaagcaacgcgtcttggctcgccgcctcgcccgcgaagcggcaaatgccctggtcggcctggcgcaagacgtgcggcagcctcgcgaggaaatcctgctcgacttgctcaatcgtggcgtgacgaacctccccaaacgctag

SEQ ID NO: 338860 - DNA, 2562 bp, Pseudomonas aeruginosa
atgaaaaattacgcccgaggtactgttgacacatacgatgatcggggagggtacggtttcattattcccgatgcccccagcgaaggtgaggagaagctccttgtccacagacgctcgctgcggtccccttcactcgtccttagacatggtgatcgcgtcgtctaccagaaagagagtgtcccgcgtggaacactggctactgatgttcatccggaagctccggatgatactgatattccagctgaaggaatcatcgcgacgattgacgctcaacacttgcgagggacgatcctgagttcatctggagctgaggtttcatttagtttcgccgaactttccgacgacaacttacctcccacgcgcggcgaacgagtcacgttcaccttggtgaaaaacgaactaggaaatcaggccagaaatatatctgtcgatgattttacccaggctccatcgagcgagtcaggtctcgaacaaattgatacgagagctgcggcagatatactggcgcaggcaattcttgcgagagacagtcgagagttttctgatgcggaggtcctctatgagcgaggactcaagcaagttccttccgtccagctagttactagctatgcagcgatgcagaagaatagaaatcgtcgcgcagaggcaatgcgcatctatcagaagggcattaagctttttccaaataactccaaattacgcgaggacgctgggaatcttgcattctccattggtgatagcaaccaagcgctgcgttattttgaggaagggcttcgtttgtctcggcaaaatgaaaccgcgaacgctggaaattttctactatccatggctcgtgtctatgtaaaaagagggacgcatccagaccttaaaaaagcgcttgagaactatcaagctgccgaagtggtattggccaaaagtaaagccggaaagcaagcactgccaaggtccgatttgctttctatgcaaactgtgagtgttaggattcagcatcaccgaggaaatctagcttttgaattcattcagaaagctgggtttaaagtgcttcgagcgcagcttttcgatcaggctaccgttggtgctgacttcgtcgttgaggtggatagacctgagcttcttgagagttacggcatagccggtggcctgctgattagatgctttttcaagtctgacatcactcgtacagatcttgaaggtatcgatcaagtttcaaaaatcgaaggtgagtctgggttggtcgatgagcaactagcaatcatcatcgtctcatctctccccgaaccgctgcaaagtacgctatttcgacgaatagaggatcgaacacggtcgttgccagcgatcgtgccattaacacaagcggagctagagacaagccatgatgcgatgtcgacccttcggactgcgctcgatcaatggctgtatcgacgcgatctcttcgctctgaactcaccggtgtctggacgtaggttctttggtcgagagaagccgctggccgaaatacgggatgcaatatcagccggcactgctgcgggtatatttggattacgaaaagtaggcaaaacatcaatattaaaggaaattgagcgccgctgtacagaggctggggatatagccttatatgttgatctgctccgcgtgccagcagatataaccaattcacgctggatttattggaagctggggacggaactatatcgctcgaccgtgagatccggcctgaaaaatgttaggtggcgcataggtgaagcgttcccagattacctagacgttccggtggatttccctattgccacagcgttcgattcagacctgacccaggttttgaaggctgtagcgcaaagtacctcaagcccaaagccaaagattgtcctaatgctggacgagattgaacggctacttccaaatagcttaggcaaggaaggctttagcggcttcttcgatttgttcagctacattcgcggcgtatcacaggagtcagtgaacttcgtacctattgttactggtgcaaatgctgcaatagctgaaatctcccagttcgaaggaaaagacaaccctgtattcaattttttcaaggagatttatctccctttgctgcagccaaaagaactgaaaacaatggttcaggtgttgggccgtggcatgggtatcaatataccagctgaaacatgtgacctaatcttccagctcaccggcgggcatcctttcttctcaaggcaattatgcagtttcttagcggagcaaaacccgcaaagaccactccatgttcgtcctgaaatgatcgaaaaccttacggagcgttatctggaagtcgcaggaaaagacttccaggaagttctagatcgtttctcgcgcgactatcctgacgagctcgaagcatgtattgccattgtagaggctggaggcgcactcccaattaaagaattcgtaagcagcggtggaagtcgcgtaaatcttcgacacttactaggatatcagattgtgcggttggtggacgatagcgcaacagtatcgatagagctactaagtcgatggttaaaacaagggcggagcgcggtgcatgggtaa

SEQ ID NO: 338861 - DNA, 1542 bp, Pseudomonas aeruginosa
atgggtaagagtttaaactcccatcaatcagtactatgttttggtcgtgatcagcttgtagtcgaagtgacgaaggctgccaagagaaacggagctgtcttgttatttggcggtcgtcagtccggcaagacaacattgctccgaaagctaaccgaagtcctcgctatgaatcgaggggatgtcaccactctttctagccttgacattcctgtatttgttgatctgatgcgtttgcctgtagatgctacgccggaaacttttttttcgctccttacttctatcgcagtaacgcaatgtgcgcggcaaattgatggatttgatttttcacgtgagcccgaagcgaacgccaagcgagacccgctgtcccagtttgtacttgaccttgaagacctaaaccgatgctgtggggaggtagaagtacatctcatatttctcttggatgaagcaaagcgcattttgagcgatagatttccgagaggatttcaggataacctttttgccttgctatatggcgaagctgagctacggccggtaggattgtcaattgtatttgccggcgcgcagcacttatataagctctctgaggacgatacctctccaatcggaagccgagcagctcctattgtcatcagaaacctgttggagtctgacgtcatggagtattgtcaacatgccatggaagtcgacgagcctaggcaagaaacatattcaggctacatttactctatggcgggcgggcatgctgggttgacagccaagctaattgatgagctatcagggaagttgattgacgctcaaaatatcgacacgattcatgaagttattctgactcaaaatagaggattgttagataactggattggatcgctcacaccagaagccatctgcattgcgaataatttaataaaagtaaaagatcttagcctgggtgacattgcgcaatgcctttcaaaatctaatctcaaccaattttcggcatctcgagtcgcagatgagctttgctttactggtgtttcgcggattgtagataagcgtttgtcgccagccaatcatatattttggtcttacttctcttcgtcggccgtagcacggagcaatgaggaatctacgcacgcgacctggcgactgatcgaggagaccgaactgactttaagaaacgtcgtatttcaagcatacgtaaccgcatttggccaagacgccttggcaaaaatgaaaaaggttttgggtgatgcaacttgggaaaaaatactagccattcaagagaagagtgcaaagcagtacaaactcagtcggcagccagataaccgtgatcttatgtcgtgcatgtatattggcgacctgcaagcactcatcattagtaacattgcatgggcaaatttcaagccattcttccgcgataaaagggagcttgaggaccttattaaggctattgctccagtgcgtaatgatcgtgctcatttttcggttgttccggagaaagagctcgaacgctgccgtattgcatgcgatgatcttattgtcttgtttgagcaaactgtctag

SEQ ID NO: 338862 - DNA, 4092 bp, Pseudomonas aeruginosa
atgactaacatctctcctgagcatcctgggccctatatccgtcgagaagtgcttcctcctgagatgacagtcaagaaggcagcagaagttcttggtgtcggcaggccggcgctatccaatcttctgaatggaaaagcagcgctctctgcagaaatggcgctccgcatcgaaaaggcattcggcgccagctcgaaagagcttcaagcgcttcagactcagtatgaccaaggtgtgatgcgctcgtccgaaaaggcaatcgctgtcagagcctatgtgcccgatttcctttccatcactgcatcacagattgatgcatgggccgatcgtatagacacgcgatcggtgctggctgtcctgattcgtcgcttagtaactagtacgacttcaagtctcttgagcatcaactttcctgcatatgacagctcgcagcgccatggctgggatggagagaccgacagcagcattgcatcaccgtgggtgccgaaaggcacttctggctgggagttcggctgtaacaagaatccggcatcaaaagcggaagaagattacaaagctcgcaccgagagcattccggcaagcgagcagcgaaagatgacatttgtcttcgtcactcccaggaactggcctggtggaaaggcgtgggccaaaggcaaggtggcgagtggcaagtggaaggatgttcgggtaatagatgcgggagatttggaacagtggttggagcagtctgtctccgcgcaggcatggctggcggagcagcttggtttaactgtagatggcatacaaagtatggaagctacatggcagtcttgggcggcggttactacgccaaacctaagccctcgcctcttcgacaagtacctccagcagtcgctgccgaatttaagtgagtggctcaactctaatccagatcgaccgtttttgatcacagcaaactcgatagaagaggggctggctttcgttgcatgtgtattcaccgagcttccgacggggattccgtatgatcgaacccaggctttggtactgcgcacctctgaagcattcgcgcgcgcgaccagagcttcttcccagttcgtggtagttatcgccgatagtgatgtagagcttgcttgtgcgggtatccattcgaagcagcatacgatcattgtcagaacgaagagcgcgtcagtaggccaaccagatgttgctttggacctcgttgatgatgagagtttcaaggctgcaatccttgaaatggggttcgacgccggcaaggtcgaccagttagcccgggaatctgctcaatcacccgtggttcttcgacgtcgtttggctgaaattccgcagataaagacccctccatgggcacatttagctaaggcgcggcaactaatcccgatcgctttagcaggagtctggagcgctgacagtgatgctgaccgtgtgatcatgtcggcattgaccggagatagaaagacatacgccgagatagaagctgatctgattgagttgctcaacaccgagcaagcaccagtgtggtcaattgggcgccaccgaggtgttgtgtcgaaggttgatgctttgtttgcaattcatgctttcatcagtgccgaggacttagatcacttcttcttcactgctgagtacgtgttgagtgaagatgatccttcattggaccttcctgagggtgagcgatggactgccggcctgtatggtaagactcgatcccactccggtgtactgcgcgaaggtgtgtgtgaaacactggtcatacttgcagtgcatggcaacaccttcttcaaaaatcgactgggcatcaacgtagaggccaaagttcatcagttgatccgcagcctgctcacgccgtatagagctagaacgtgggaagcgcactcacatgacttgcctcgctatgcagaggccgctccagatacgttcctcgacatcctagagactgatctagaaaacccagagccgcaggttttgaagctgctcaggcctgttgagggtgggcccttgggcggtgggtgcccccgttcaggtcttctatgggcattggagcgcgttgcctggcatcccgatcgaatgacacgcgttgccttgctccttgcgcaactatcgcagttaccaattaccgacaattggagcaataagccagaaaactctctggaggctttgtttcgctcttggatgccgcagacttcagcaccgctcgaactgcggttgacagccctaggcctgatcgtgcttcgcttccctgatgtagggtggcgtctatgtatgagccagctagaccggacatctactctagggtttcacagtgataagccacaatggcgtaaggatgcgattggctttggggagccggtctctaggggggagatggccgggacagaacgccgtgcgttggatttagcaatccaatgggtggcgcatacagaaaagacactgggggatctggtcagaatcctcgaaagtctatcggaagaggatcagctatccatctggctgaaaattgaagagtggattgagacttctccgaacgatgttgctaaagctcgcctcagagagactatcaggcgctatgcgttcactcggctgggccgtaaaagaaaactttctgccctggtactcaataagtcgcgagagctctcggcgcgcctagagcccgctgatgttgtggttagacatcagtggttgtttgccaaacattgggtcgaggagtcgtatgaagacctggagaaggaagatttcgacttccgcaaacgggacgagcggataaccaggcaacggcttgatgctatgcaggaggtttgggatgcgaggggcttggatggaatcattgagctaagcgagggcggcgaggctagcttcgtcgtcggcatgctacttcctcgcgaagctgtaacggagcaaaagagcttaccagtagtggagagaatgctctcgtgcatgctctctagtcagtcccggaagtgtggatttttactatcggggttcttgcacggactggaacctggcttgtgccaatcggtattggcagctctgtgtgtgcgttgggcattcggttcagacgatgagcgcgagctactgatgggggcgctaactaacgcaccatttaggtctggcacttggacgttggttgcggaatgccctgggcctgtgcgttttgcgtattggtcatctgttactccagagtgggggcggcgcagtctgaatgaaactagtgaaatgatcgactgcctactgcgagtgcgccgccctcgggcagcgattaacgcagtacatctggactggaaggtggttactactgatcggctacttcggcttctcagagatgcgatctctaatagcgttgagcccactgatcaatttcaattgaatgggcatgatctctcgggggcaatgatagagctttcctcccgggaaggggtgtcgcctgatgagctcgcgaaactggagttcttttatctccgcgcacttgatcattcagagtacggcattcctaatctcgagcgacaaatagctgcatcaccaatgtttttcgctcaaatggtggctttcttatatcgccgttccgacgatggggtggatccttctgagtggggtacgaatggcgagaactcacaggatcttgcgacgcaggcctatcacctcctaggtcgggtaaggcgtattccggggagcgatgacaatgggaaaattgatggcgacgctcttttagcttggattcgggaggcccaaggcatccttcaggtgaacgcccgagcagacatcggagatcatgtagtcggagagcttcttgccaagtcgccggccgaccctgacggcctctggccatgtggtgcggtgaggcaagtgctcgaagtgcttgcgtctaaggcgattgctaaaggggtggtcttaggagtgcggaaagggagaggtgttcactggcgtggcgacggtggagatcaagagcgtggtctggcctccaagtatcgcaattgggcttatcaggttcggtcatcccatccgtttgttgctcgactcctagaaagcatcgccgaacaatacgactatgaggcagagtcggaggacacagatgcccaggtccggcggcggcttagacgctga

SEQ ID NO: 338863 - DNA, 1257 bp, Pseudomonas aeruginosa
atggaagtgaggccgggctataagcagacggaggttgggataattccggatgagtggaatgcactacctctcggcgaagtcctgatcaagggacgactaggtgggaactatgcaaatcaagacatggaggctgagctaccgctgatgaagatgggcaatcttgcccgtggatgcttcgacctttctaaggttcagttcattgagccgggagtggcgccggagccgatccaccaactcgtttgcggcgacgtgctgttcaacacgagaaatactttggatttagttggcaaggttgccatttggcgtgatgagcttccggttgcctactacaactccaatctcatgcgacttgagttcgatccggaaaaaatttgctcgaacgagtacgcaaactacgcgctgaataccgaaggcacgatgtctcgtctccgcgggcttgccaccggcactactagtgttgctgccatttacactcgggatctattgaagttaaaaatacctgttccgccactatccgagcaacatgctattgcgacggcgttgagtgatatcgatgcgctgctggttgcgctagggcggcttatcgccaagaagcgcgacctcaagcaggccgctatgctgaaactcctcaccggccagactcggcttcctggtttccaggatgagtgggcgattattcgactgggaagtttaggcacccttataaaaggcgctggcgttaagaaggatgaggcattcagtggtgatttgccatgtatacgctatggggaaatttatactcatcaccatgatattgttcgtgctttttattcgcaaatttctacgtcagtcgcagctctggcaacctctctgaaaacgggtgatattctttttgctgggtctggagagacaaagaaagagattggaaaggctgtggcatttatccatgagtgtgaagccttcgcgggtggcgatattgtgattcttcgccctgttgcctctgatgccaagtttcttggctattacctgaatagcgcggaagtccagaggcagaaggcaagccttggccaaggcgatgctgtagtccacatcagcgctaatgcgcttgcttcaattgaactggcaatgccatctcttcctgagcaaaccgccatcgccaccgtgctgtccgatatggacgccgagctggccgcgctggagcaacgcttggccaaaacccgcaccctcaagcaaggcatgatgcaagaactgctcaccggaaggacgcgcctggtatga

SEQ ID NO: 338864 - DNA, 1410 bp, Pseudomonas aeruginosa
atgaccgacctgagcatggacgccaatcaacgaccgcagacgaccaaactccccagcaccatcatcagcgtgtatgacctgctcgcggatcaggcgttggagattcctcaataccagcgcccgtacaaatggacaggcaaacatatcaaccaattgttcgccgatatcgccatccataaggacaagtccgcgtaccgcctgggcaccatcgtgtttcaccgcgagggcgagaagaagaacattgtcgatggccagcagcgtaccatcagcctgttgctggcggcccgcgcgctgattcagcgctgcaaggcgcaagcgctggagagtgatgacctgcaggaacgcttgatcgcgcttgagccgttaatggtcgacccccggtttaccagcgagatttcgcagaagaacatccacagcaattaccttgaggtggcgcgcatcgtcagccgtgcggactttaccgaagcgcatatcgacttcttcctgcacaagtgccaggtggtggcggtggagctggcggatgtgtcggaggccttccagttcttcgactcgcagaacgcacggggccgcgacctggagccgcatgatctgctcaaggcctaccacctgcgcgagttcagcccgcgtgacgagcatttgaaggtcgccacggtggcgcgctgggaaagcaccaagacccaagagctggccacgctgtttgcgcagtacctgtaccgcatccgcaattggtcgaaaggggcgtcggcgcgttatttcagcaaggacgacagcgacctgttcaagggcgtgaatctcgatacggtcgccagctacccctatgtggagcagttgcgcatcgcccaccattttgtcgaccactacaacggccaatacgagcgccagatcgattcgcgaaagatggcttttcccttccatctggatcaaatcatcatcaacggtcggcgcttcttcgagctgatcagccactaccagaacgaggtggcgcgcatcagcaccaagccctggaatgggcacgagcggggcggggagtcagcgctcgatggcttcgcaccaaggatcatgaaggtgctcgacaactacccggcgaaaacccgcaccggcgatcgctacgtgcgggcgatgttcgattgtctgttgatctactacatcgacaagttcggccacgcggagctgtcgcgggccatcgagaaaatctttatctgggcctacagcctgcgtttgcagatgcaggtggtgcagcttgcgagcatggataactacgtgctggcgaacaatctgttcaggctgatcaaggacgccactcgcccggcggacgttatcaatcaaccgctgaaagcactcaccagcaacagttcgaccaagaccgaggcaatcgaggcgctattcagggagatgaaataccgtgagtga

SEQ ID NO: 338865 - DNA, 1974 bp, Pseudomonas aeruginosa
gtgagtgaggccatcacccagctttccatccagcagctactcggcggccgtgatgattacgtcatcccgatgtatcagcgcaattacgcctgggaggagggtgagatcacccaattgatccaggacgtaatcgactacctgcctaagccagataagcccgcgcgcaattactacatcggcagcttggtggtgtatgagcgcgcggacggcaaaacgcccgtcttcgagaccatcgatggtcagcagcggctgacaacgttgtcgttgctgacctcctacctgaagaacagcgaggctgttgacctcgattggtatgcaaacctgagcatccacttcgatagccgcgagcactcgcgggcgacctttgcggccatcttcgaggggcgtttcaaggatgaccctgccgaggtgctggctgaaaagcagatcaataccggcatcctcaatggctatcggctgatccataaggtgttgccgcacaagctcaaagagaacggtgtttcaccccagcagttcgcggatttcctgtttcattacgtgcagatcatgcgcgtgaaagtgccggcggatactgacctgaaccattacttcgagatcatgaacaaccgcggtgagcagctagagaaacacgaggtgctcaaggcgcggatgatggagacgttgcaggagtgcccgcacagccagaactgcctgcacaccgtctgggaagcctgcgcgaacatggagcgttacgtgcagatgggctttacgcctggccagcgcagcagcgtttttggtgagaaggattggggccggttggtgcccgaaaacttcgctgggctgactgctgcattgcagcgtacgcatgaggtgggcttcaaggcgggggctgagttgtccctcacggacatcatcggcaggccgccggtcattgcggaaaaaaccgataacggtgaagaagcgcccgagcgcttcaatacggtgatcaacttccccaactttttgctgcatgtgctgcgtgtcgatacgcaggcggatattcctctggatgacaaacgcctgctcgatctctttgaaacccatgttctgaagcaaccagacccggctgcggcagtgaagcgctttatcttcagcctgctgagctgcaagtacctgtatgaccagtatgtgatcaagcgcgagttcatccagggcgaggatggttggagccttaaacgcttcaaatggaatgacggcggcaaagcgggtggcgtggggcgtggcagttatgtgaataccttcggcgaggaagagggcagcgagggcatcaatcggcgtatcttgatgctgctgtcggcgttgcatgtgtccacgcccacgctggtatacaaacattggctcaatgccgcgctgcattacctgtttcacgccgagcagatcgaggctcaggcctatctgcagcagatggagtcagtcgccaaggcctttgtgtttgaccgctttctggctgccgaagcgggcttggaatactttgagatcatctacgggaaccaaggcgtctgccagacctggcgcgaagacgttaccgccgagacgctgatgccgcgcctgcgcttcggcaatatcgaaaacaacctggtgttcaacttcctggattacctgctgtggcttgagcacggtaagagtgagctggtgaaatcttacgaatttaccttccgcagttcggtggagcattactatccgcagaagccactgccaggcatcgagccactggccgaggatgacctccactcgttcggtaatctttgtctgatcagccacgagaagaactcacgcttgagcaatttcacgcctgagcaaaaaaaggcgttctacctgaagaacaccctcgacagcgtgaagcagcacttgatgatgcagcccgagacttgggatgttccggcgatacgtgagcatcaccagcaaatgatcgacgtgctgctcaatagcctcgccagccaatacgagaccgagtga

SEQ ID NO: 338866 - DNA, 129 bp, Pseudomonas aeruginosa
atgatcgtcgtgtcttcggggatcggcgcgctgagcgtcagccgagcaaactggcgcatcgaggtgatctcgtacagcgcttcttccatcgccggatcgctcagcgaaaaccagttctgtagcaagtga

SEQ ID NO: 338867 - DNA, 855 bp, Pseudomonas aeruginosa
atgaacccatctgccaccataaaaatttttctaccactgggagatcctaagcgcgtccgtacggcagagatatccaattggtcgggaaaagctatcgcagccccacgctctgatttagaccgacttttaaatcgccgcgaacttctgcagccgggtgtgtatctcttgctcggagaagaccccgattccggcaagcaggttgcatatataggtgaagctgaggtcgttctagatcgcattaagcagcatcggagcaaagagtactggaactccgccatcgttttcgttagcaaggatgaaaacctcaccaaagcccacattcgctaccttgaagggcgaatcattgagcttgccagtcaagttggccgctacagcctaattaacgcaaacaacagtggatcgcgcctgccagagtcagatcaacacgatatggaggtctaccttgagcgcatcggacagctattgcccgttcttggctcggaactactcactccggtaaagccggtcgccgagctactccagcctacagaagtacttgtatccaagattaagagtgcggaggcacgcggaatgcgatcacccaatggctttgtcgttttagccggttcaacagccattctgcaggaacgacaaagcggaaaaacacatggcgcctggatactcaagttgcggcaacaactgatcgagaatggaacgcttcagccgcagaatggactgttaatcttcactaaagacgtcgagttctcaagtccaagcgcagccgcaggagtgatccgaggtggaacggcgcctggaccgatatcctggaagaaccaagccggtcgcacactaaaagagattgaaggtgacgcctaa

SEQ ID NO: 338868 - DNA, 303 bp, Pseudomonas aeruginosa
gtggagatcggcaccggcgcggtgatcggcgcgcaatcgctggtcaatcgcgacgtgccgccctacgcggtggtggcgggctcgccggcgcgggtgctccgctatcgcttcgcgccggagctgatcgagcgactgctggcgagtcgctggtgggagttgccgctggacgtgcttggcgaattgccgctggacgatccgcaggcctgcgtcgaggcgctggagcgtcggccgccgcaggcgtgccaggaggcgcggcgcttgcgcatccggcacaagccgttcgccatcgaatggctgtcctga

SEQ ID NO: 338869 - DNA, 1977 bp, Pseudomonas aeruginosa
atgcaccatcgtaccgacacagaggaaagtgccgtgttcaaaccattagctgtcgctgtaggcctgggatgtgccgcgctgtcgttgggcgccaacgcctaccaatacggggaatacgccggggagaccctggagcgcctgatcaccgactacccgggccgctatcgcggcaccgccagcttcgccggcgccagcgaactgatgcagtcgcgcctgggcttcggctaccagaccagtcgccaggacttcacctgggccggcaaccgcagttcgcagaacgtcatcgcctcggcgcccggtagcagcgggaagttcctggtactcggcgcgcactacgacacctactacggtcgcccgaccctgcagggcctggacgataacgcctcgggcgcggcggtgctcaccgagatcgcccgcaacctcggcggcatcgccctggagaacggcctcgaggtggtcggtttcggcgccgaggaggaaggcctgcgcggttcgcgtgcctacgtcgagtccctcgacgccagccagcgcgccaacctgctgggaatgatcaacctcgacagcctggtcaccggcgacaagatgtacgcccatgccggctccaacagcgtgtccagcccggccctcggcgcctaccgcgaacagatcctgcgcatcgcccgcgagctggacatcccgttgttcaccaaccccggcctgaacgccgaatacccggcgggtaccggctgctgcagcgacggcgaaagcttcaacgggatggacatcccggtgttgttcatcgaggcgaccaactgggaactgggcgacctggacggctacgagcagaccgacaacccggcgattcccggcggctcaacctggcacgacccggccgaggacaacaaggaagtactgaccaacgccctcggccaggagcgcatcgagcaacgcatgcgcgacttttcccgcctgctgacgcgcctggtgctggagctgaccaacgccgacctgctggcctccaccgcctccggcggcgccctggcgcggcagatggaagaccagttgcagcgccagcaccaggcactgacccgcctgcacgaccgccgctggctgaccctgctcggcagcaaccggccggtaggcagcttcgacggcgaggtgggcgcggagggcgaggtctcgccggacagcggtttcgacatgcctggcaatccggagtccaggcgcgccggcgtgtatctgctcggcgactaccgctacagcgaggccctgacccttggcggcagcctggccttccagcgcagccgcgacaagctggaccatggtgggcgcatcgagggcgacacctggcagctcggcctgttcggcctgtacaacgacggcggtccggaatggctggccggcgagctgaacctcgggcatacccgctacgacagcaagcgttcggtctacctccaggccgccggcgggccggtgttgctcgaccagcgtctgtcgggcgacacctcggcctggtcctggggcgcccggctggaaggcggctatgacttcagcttcggcgaactgcggagcgggccgctggccggcctcgaccacatgcactaccgcatcgacgacttccgcgaggacgaggccctgcgtaccgcactcggctacgagaagcaggactacgactcgctggaggcgagtctcggctggcgcctgcgcggcgagctggcgttgggcgcgaggatgcgcctgcaaccctacgccagcctgcgctgggtccgcgagctggcggacggacgcctggacgacatggacctgaccagccgcggcgacgggcgtgtccgggtcgccgacatgggcggcgtggacaaggatttcggccgcgcccagcttggcgcgcaactggcgatcaccgagcagctcggggtcttcgccgaagccaacagccgcttcgcccacagcgaaggcaaccaggcgggctattcgctcggggtgaactggcagttctga

SEQ ID NO: 338870 - DNA, 237 bp, Pseudomonas aeruginosa
atggcgacggtcaatccctggcgtcggttcatcgggctcttaccgggcggcgcgcgcacggtgggggaggtgatcgacgtcgacgagggcgccggcacctgccgcgtccgcctgcgaaacaacgtcgtgatcgcggctcggggcacggcggtgtcggccgggcagatggcgttcatcagcgatggcatggtgaccgggccggctccgcagctcccgcagttcgatatcgaggtttga

SEQ ID NO: 338871 - DNA, 765 bp, Pseudomonas aeruginosa
atgcgccggtccaaaagaaccaacacactggttatcgtctctaaccatgtagagtcagtatatgacgatcgttggataaacgacgtgctgcattacactggaatgggtcaggttggccctcaaacacttgaattcaaccagaacaggacgctgagcgagtcacctaccaacggcgtagcggtccacctgttcgaggttttcatcaagcgcgtttacacctatatcggtgaggttgttctggccggagacccctatcaagaacagcaactagatgcagaaggaaacgatcgtccggtatgggtattcccactgcagttgaagacgggctgtttgccggaaataccagatacaacgttgaaagcgcttgaccaagttaaagagaagcaagctcgctgcctaagcgacgacgaagtggagaaactggcaaagcagcaggagcaaagaaaagtaagcacacgcaacgtcagcgcaactcaataccaacgctctccatgggtggccgagaacgcacggcgtcgagccaaaggctattgcgagctatgtggagaaccggcaccgtttaagcggaaggacggtagcccttatctggaaacacaccatatcgagtggttagctaatggcggagaggacacggtggagaatactgtagcgctatgtccgaattgccatcggaaaatgcatgtagtgaacgacgagtctgaccgtatttttcttagaatgaaagtacgacttgtactagagcacttgggaaaggaggtacaatga

SEQ ID NO: 338872 - DNA, 720 bp, Pseudomonas aeruginosa
atgagagttttagatttctcagcaaggggacttttcgtatttttaatcttttgtatcctgatggtttccggcttctatatgttcaattttcacgggagtgaattgtctaataacccagagcaatgggggcagctaggagactattttggcgggattatgaaccccatacttgggtttacaacagtatatattttgatcgcaacgataggaattcaaagtaagcagctaaaagcgtcgcaggaagagttagttttgactagagaagagttgaagcgagctgcagaagctgcaacgaggcaagcgagtcattttgagcgtgaagcaaagttaaatgagtatttggttctcatcgataaattagtggttagaattaataaaaacttcaacgaaaatagactagatcgcgaacgttccctacatggctttgtcagtagccaccttgatacggtagattcctcttatgttaaaagtgtacttgtgtattggaacgctcaaaatgcaaccgccactagaagaatcgtgtggtgggtggaaagtgatctgaaacgtttggcggagcttataaagaagtatgaaatagtttcgagtggggaaaaggagaaggggcatatatcccctataccaagtttttatcggaaggaatttggggaaatggtgagtgttttatttttttatggaatgctggactctgacgtgaaaattttttttgcgcctgactga

SEQ ID NO: 338873 - DNA, 1770 bp, Pseudomonas aeruginosa
atgaacctcataagtttaaagatttatccaaatggcccttcaggctgggggtcgccactactcaaatttggccgtgacataacgcagctatatggtcctaatggttgcggcaagactcccgtcgtgcaatctattccatattgcttaggatttcctagtatatttaggaacgacatctacgataagtgtaaacatgttgagcttactgtttcatctagaaaaggaattctaatacttcgtcgcgtatacagcagggattttgacatacaggttacagagccctctggggttatacagcgtttttttaacgagcttgattattctcgttatatttttgagtggctagatctaacggcacacaacttggtcactactggaaatcagttaggttccccctacctttcctcttttttgcctctctactacctagatcaagacattgggtacgcggaaatttattgcccgccgagtcgattcatcaaagaccaattctcagaaatgatgagaatggtctttgacctccctgtcaaaaactcatttgatataaaaaaggataaatttagagccaaggaacgcttagactacctagataaagaaacacaaacattagccagaatggttgagtcggctcaaaaaagcacttcgggaatacataaatcaagacccgagctagaggctgaaattgaacagttcgaaattcaagttcagaaccttcaaagctttggtgcaagccgtgatgaatccatcgatgcgattgatcgccttatatctggtcgtagaagtgtaattctcgaaatatcagacgaaatccgccaactccaaatacgcaatgaaggaattggtaggatggtccatgaaattaatactgagattgagacccttaaccttaacgaagaggctcgtagggttttcttatctttccaagagatttgtggctccgaaatttgtcaactattttccgcgagctcagagtcttataccaagaatttgctttatcttcgtgaccaaatcaaggatcttgagcgcaacgccagccttgatgaactgagaattgatgaactacagcagcaacgcaccgctcaagagatcgttgtccagcaacttgtggatgaacgcaaaatttcaagtgctagtagtgaaatctctgctctagttagctctataactaaactcaagacagaaatttttgagttacagatgcagcttgacgaacttaaaaaagtcgaggccctcaaggaaaagcatttcaactctctaattgagagagacaaggcttatacgctacatcaatcattctctagcgatagatcttcatcgccagaactaatcaaaatcagagcagacatccgccaacgttttatagagtggctcgatacgctacacacatacaacgttagcagagatataacctttaaagatgattttactccattacttggcattgaaagcattgctcagatcaagggcagcactaaaatacgtactgtattggcctatcatgcagccgtctttcaggttttcgctgagcgtaaagtctctggatttagatttctaatactagatacgccaaagcagcatgacattaacaatgatgatcttggtagatatctagatgctcttaaagagctttgcggcaagcacggcatacaagtggtattttccacaactgaataccattactcgggggatgaaaatgactctgaatggctgcctacttatcctggtgctgatcagagcatgttcttgcacttaggtggcgttcaggactga

SEQ ID NO: 338874 - DNA, 1170 bp, Pseudomonas aeruginosa
atgcttgagaataaaagcccaagggaacagagtggcagggactctttcagcagatatcgcgcacaagttcgttcggcagcggtagcaactctctcaattcttgaaggacttgatatcgatagagtttactgtgacttgcatgatgattttgtcatcagaaagaaagatgaaagtggttttacttatatattttaccaagtaaagaccaagggcaagcaaaaccacaactggactatcaacgagctatttggcataaagaccaaactcaaagaccagtctaagcaatgttcaaagtctataaaaagcagtttcattggaaagcttctactgcacacggttgtctttgaccaatactgtaattccgtcgtatttcagagtaatattcataatagcgatgaagttattgagttactggaagatatagagtcaggtgcttttgctaacaagtttacaaaggttcttcttgaacgcttcaatgagtgttttaacgaaaatccaagtgagtataccttggagcaagtcaaagaacgactgtccaaactaaaacttcagtcagacgtctcctatctaaaagaaaacgataattccttcgacctggttgtaaaagaaaaaatttatcaattcagcgagatcgaacttgagcgcgccgaatttagagaaatcctactcagactacttgacctggttgagcgcaagtccagtgggacaataaagacttggagtgcagagagtatcgagaagtttgcagggatttctattgatgacctgctatcagtattgagcatatctagagatgcttacttggccttgcttgcgggaggagaccctaacgccattaagtctgcctctatgatacaaagatctttgcgtaacaacggcgcagacatatctgtcgtgatgtactgctcaaggtgcaaaatagattgggatttatggtttagaaaggcgcgacacgttatagctgaatttgatcttttatttatctctgaccgcattgcttctatactccggagtgcggtgactcctcagggagttctaatagttagaaatttaagacagcctatcaaaaagttgttgggcgaactcgagaaaaagaagctaaagttcgacctaaatgaggatctaattttaggcggaatattctctacacttgtcagaggcaagtcatga

SEQ ID NO: 338875 - DNA, 915 bp, Pseudomonas aeruginosa
atgccctcgtcccagggcggacggggtaacgctcaggccagccccggcgagcacgttgttgagcaggttgatggacgccttgttgttggtcagcaccgccaggttctggtcgcagccatcggccaccacgtccggctgggagaagaaggtgccacagttgtcgaccaccgtctggtcccactcgatctggtagaagccttcggcggacaggttgtcggtgaggttctgcgacaggtagaacatgttcaccgggatcaggccttccttgatctccgagccgggccggcggaaggcggtgacgtcgatcgggttgatggcgctgatgccgttctggatgaaggtgctctcgccccagttcaccacctgcttgcccaggcgcacgctgcccggcaggtcgccgatggcatagttgtggtagatgaaggcgtcgagcagttcggctccggaggacttggccagggtcttgcggccgctgtcgtcgatgtccttgaactcgcggtgctcgtccttcagctcgaagtcgtaccagtacttgccgcgcaggaacacaccggtatcgccgtacttcagttcgaggtcatggatgcccttgaagaccttcgagaacgtttccccacgcttgaagttcaagtggctgtcgtcggaggtctgggaaagtcccttgccgccgttgttcacaccgatcaggttcttgttcggcttggcggtcgaccaactggccccgaccgacaacgccgaatcgaaggaaccttcgatttccccgatgttgaaggtcaccccaaaggccggagccgccagcgaggaagccaggctgacggccaacggcaaccgggcccgacgcgagaacggattacgggttgtcatcgacgctactccatgtgtgttttttgttatgagtgcgtggactatagctag

SEQ ID NO: 338876 - DNA, 186 bp, Pseudomonas aeruginosa; identical to SEQ ID NO: 327586

SEQ ID NO: 338877 - DNA, 1008 bp, Pseudomonas aeruginosa
atgaacatcgcgccactcaaggtctctctgctctccctcgccctgctcctctcccccgttgccagcctccccgcccatgcggcctgcaccgccaacctggccctgcaacccgccagcagcctgcccgcgctcggcgggcgcctggtctaccacagctatatggagtacggggacggctcctcgaacctctacctgcacgatttcaagagcaagagcacccgccagctcaaccagcccggctggaacatcgaggacccgatgaatgcgcatttctccccggacggccgctacctgaccttcatgggccgccagaatggcgcctggcacgtgttcgcctgggccatcggcggtacccaggcgccgagcaacctgaccgcggccatcggcggtcgcaacgaggatccgaagttctccttcgacggccgccaggtcgtgctcaagcacgagggcgacatccgcctcgccaccctggtcttcaatggcgatggcagcgtcggcgtgagcgcctggaaagccgtgaccggcgacggctggagcaccgaggagtcgatgccgttcctcacaccctcaggcaagtacgtggtctacgcgacaggagccggcgacagcctgcgggtggtgcgcaggaacctggagaacggccaggtcagcgccctcgccaccccggccgcggggggccgcgactattacccggtggtacgcgactacaccgcctacttcctctcgcgtacccagccggccggcaacgaccagttggccatggtcgtacccaacagcccgcccggcaccccggcgatcctgccgctcaaccactgccagggcgacaattccgacgccgcgccggtgaacgaggactacctgatcttctccagcacttcgttcgacccgacctacagcctgctcctcggcgacatcgccgcggcgcgggtctggcgtctcgacccggcgcagatcaacctgcccgacggtcggcagaagctcggcgccagctataccgcggcacgctga

SEQ ID NO: 338878 - DNA, 885 bp, Pseudomonas aeruginosa; identical to SEQ ID NO: 318086

SEQ ID NO: 338879 - DNA, 225 bp, Pseudomonas aeruginosa
atgaagaacaagattgaggatctgcgaaatcacctctttgccaccatcgaagggctgcttgacgaagacaagcccctggatatcgaacgcgcgaaagcggtggctcatgtgggttcggtgatcatcgagtccgccaaggtggaagtgaaagcgctggagatcatcggctccccggacggcagcggaagcacgtttctgcagatcggccgggaggactcgaagtga

SEQ ID NO: 338880 - DNA, 708 bp, Pseudomonas aeruginosa
atgactcgctctgctctctcgaccatcgcctacgaggccctggtgcgtgcccgccgcaaattcagcaaccgagaggagcgctgcatccgcgaaacctggaccgccgaacaggaactggtgctgctgcgcctgtatccggatatgccgaacgaggtcctggcagccaggttgaacaaaacgctccagcagatctgctccaaagcgtatcggctcgggctgaaaaaaagccccgagttctccaagaagatccggcaggactggggcagcgcaactcggttcaagaagggaaacaccccatggaactgcggcatgaaggggctgcccgcgcgaggacgcgcaccagaaacgcagttcaagaaggggcaaaagtcccacacatggctcccagtcggcagcacgcgggtcagcgctgatggctacctgcaacgaaagatctcggataccggctatcccccccgggactggaagggcatccacatcctgctctgggaagaacacttcggccccatcccagccggccattgcgtctgcttcaaggacaacaacaagcagaacgtcgtcatcgacaacctggagctcatcacccgggccgaacgcatgcgccgcaactccatccatcgctatccacctgagctgaagagcgcaatccgcgtcatcagcaagctcaagcgcaccattcaggaggtcgagcatgaagaacaagattga

SEQ ID NO: 338881 - DNA, 702 bp, Pseudomonas aeruginosa
atggacaagcaaaaagtcctctccaaggtcgagaagctgatggccctggcgaatgccaagggggccacgccgaacgaggcggaaaccgcattgcgccaggccgcgatcctgaagcgccagttcgacctcagcgatgcggagatctcggcccacacggtggaaaccgcgtgtgttcccactcgaaccaggcgctctcctgccccatggctgcatgaactggccgggatctgcgccagttccttcggctgcgactacctggcggcatacgcgatgccagcgggctggacgttcaagttcatgggccgaggaatcggccctgagctggccgctcacgcctactctacgctccaccaccaactggtggcggcgcgctcggctcatgtcgcccaacagaagcgctgcaagctgtcgaccaagcgccgtcgcagcaagctcttcgtcgaaggctggcttctcgcagtgcgttcgctggtacgtgactttgccggcaagccggacgagtcgactcaagcagccatcaaggcctacctcgaactacaccatccggcgttgaagtacctggagccggcggcgcttacgaaggcccttgcctatgaccagacctcgctgcaagcaggctgggagcacggcaaaaacactcgcctgcactgcggcgtcagccggcgagttcagggggcgctcgagcagggaggttcccgatga

SEQ ID NO: 338882 - DNA, 738 bp, Pseudomonas aeruginosa
atggcgaagactcctatcacccaagcccgcgacgtcgacgcggaacttgtgctggaactgaacaagttcggcagcgccgccgaccttcggagccagcaggccaaattgaccggcgctacgcgagaaatacgcaagctgactggtggcggtatcgacctgttcgggaagctgggttgctacttgagcttcgaacaaaagcagctcctacaagacgcagcgcgcttgctcgactcggtgaacaagcagatcgagcatgcgaaggaaaagcgtgatcgctacgagaaaaaagccaagaagcggcgcgagctacgtgagcgcctggccaagcaactggtcgcctcgaactacccgcttccgggaaatacgctcgaagaccggctggaaatcctgcagatcgcgttgatctacaaccgggccagggtgttcgatcccctgtactccacgcaccagctccactcaaaactcaaacgctggctggagcgtcccaagcagctcatcggatggcgcagtgaagccgagtatttcgctagtcaggtggggagcctgcgatgtgacttcattagtcatctgactaacgaaatagcgtacgacgatggcagtgaagtcgaggagcgcctgcgcgtcatcaagcagacggtcgctgactgcaccgctcagatcgctctgaccagcgaggagcaggaaacccttcggctctggaaagacgctctgcaatcggctccggagggcctcatatga

SEQ ID NO: 338883 - DNA, 1203 bp, Pseudomonas aeruginosa
atggattcccgtttgctcagcggtatcggcgcaggccccgacagcggctcctataccgatctcaaccgcctcaaccagctcaaggtcggcaaggaccgcgacggcgaggcgaacatccgcaaggtcgcccaggaattcgaatcgctgttcctcaacgagatgctcaaatccatgcgttcggccaacgaagcgctgggcgacggcaatttcatgaacagccagaccaccaagcagtaccaggacatgtacgaccagcaactgtcggtgagcctgtcgaagaatgccggcggcatcggcctggccgacgtgctggtgcgccagttgtcgaagatgaagcaaggctccaggggcaacggcgaaaacccgttcgcccgggtcgccgagaacggcgccggtcgctggccgagcaaccccagcgcgcaggccggcaaggccctgccgatgccggaagccggccgcgacgactcgaagctgctcaaccagaggcgcctggcgctgccgggcaagctggccgagcgcatgctcgccggcatcgttccctccgcctcgccggccgccagccagatgcagagcctgggccaggacagctacctgccggcgcagagctacccggcggcgagccgccgcggtttctccaccgatggcgtcgacagccagggcagccggcgcatcgcccagccgccgctggccaagggcaagtcgatgttcgcctcggccgacgagttcatcgccaccatgctgccgatggcccagaaggccgccgagcggatcggcgtcgatgcccgctacctggtggcccaggccgcgctggagaccggctggggcaaatcgatcatccgccagcaggatggcggcagcagccacaacctgttcggcatcaagaccggcagccgctgggatggtgcctcggcgcgcgctctcaccaccgaatacgaaggcggcaaggcggtcaaggaagtcgcggcgttccgctcctactcgtcgttcgagcagagcttccacgactacgtcagcttcctccagggcaacgaccgctaccagaacgccctggacagcgccgccaaccccgagcgcttcatgcaggaactgcagcgcgccggctacgccaccgatccgcagtacgcccgcaaggtggcgcagatcgccagacagatgcagacctaccaggccgtcgccgccgccggcacgccgcctctgggttga

SEQ ID NO: 338884 - DNA, 1239 bp, Pseudomonas aeruginosa
atgaaagtctccgaagtcttcacccccggcaaattccctgagttcacctacatcgaggaccatttagtcaagcatgcccagatgttgcacgacagtctcgacgcctcaatgaccgtcaccctctctggaccttcgaagtctggtaaaacggtcttcattgagaagaacatcggtaaggaccggctagtgccggtctctggtgcgggggttaactctcccaatgagctatggggccgggttttcgcagtagtggggacccctttgcccgccaaggtcaccgagacttcaggttttcaaggaagtgctggtgggaaagtagccagtgggattccggggttcgtccaagcagaggccaatactagtggcaattggaacagcagcaccgcaacgcaagcagatgctgcgattgactacctgtcgcttttgatcaaggaactggccggcaccggcttggtggttttcatagatgactttcactatgtgaagcccgaggccggagaagagatttcgaagcagataaaagacgctgccgccaagggggtcctcttcgttctagcagcggtcccatatcacgcagacgacgcagtcagggcaaacgccgatcttcgcggtcgagccaccaagctggacttcaattactggaagaaacccgagctgctcaaaatcgcaacgattggattcgaagcactgaacatctcaatgcccctaagcttcattgaagcactagccgacgaggcggccggctccccccaactgatgcaggcactctgtctgaacagttgccttgagatgggcattcgcgagcgggcagccgaaactgccacgcctactactaacttatccttgattaagcaggtttgcactcgaaccgcgcagacggccgattacacttcgattgtcaatttaatgaaagatggacccaagacccgcgggacagaacgcaactcctatttgctgaagacagaagaggtctgcgacgtctaccccttgatcgtgaaagccatcgcattggcaccaccggaactcaccatccgttatgccaaccttcaacagaggattacaagtctatgtgccaaagacacacccagcgggtcaagcgtgacgggggcttgcggacatatgtgttcaatcgccaatgcgtcagagggacgaaatatcttagagtgggacgccacccacgacgtcctcgacattcttgatccgtaccttctgttcttcattcgctggggcgacacctaa

SEQ ID NO: 338885 - DNA, 366 bp, Pseudomonas aeruginosa
atgaacgcgcacaccaacaaaggttttgcctcccggatcggttttggtctgggtacgcttgtgcgtttctgcctgcatgatcgtcggcctgtagtgcgctgggtcaaacgagcctgcctggtcgtggtgctgttcgttatctttgctcagaactttacctggctggccagcaccttcatgaccttcttgtcgtttgggctgatggggttggttttggtaaagggtgacctttcactgctttctcaggtcacccatgcgaatagtagtagttttgatgatgacgggattgagagtcgggctcctttccgtggtgagtacgaacaccctgattattatctttactataaatctgacgagagccaatga

SEQ ID NO: 338886 - DNA, 591 bp, Pseudomonas aeruginosa
atgatggagcgccttgatataggccgtactccgctgcgggaagccctgcagcgcctggcgcaggaagacttggtgctggctgtgccgcaacgtggctatttcgtgtcgtccacgtcggctagcgatttcttccagctcaacgagttccgcgagcattccgaggtgctagcttgccggaatgccgctgtgcgcatcaccgacgcgcagttggctgtgctcaaggacattctcgacgaggcgcgtgccggtgtggccgcgcgcatcatggagaccgactggcacttgggtatcgatgagcgcgtacacaagctgatcgccgaggccagcggcaaccgctacctggtgcaggcgctgaaccgtctgtatgcgctgtcggtgcgcagcctgtatgtggcgcgggtgccggtgacgctaatctacgacgagctggagaacttcgacgccatctacgccgcgctcgccgcccacgatccggaagccgccgagcaggcgatccgccgccacctcgatgtgccggccgtgcagtcggtgccagccggcaaacgtggcccgttgtcctcgggcaacccgcaagcggccgaccagtcatga

SEQ ID NO: 338887 - DNA, 858 bp, Pseudomonas aeruginosa
atgaatccgcgcagccaccgcctggtcacgctggccatgctcacgccgtcgctggtgatgagtgtgctgctgctggccttgcccttcctgatcatcgtggcctacagcttcgccccgcgcgatgcctacggcggcgtggtcagcggcttcagcctggacagctaccgcatgctgttccagccgatgtacctgccgatcttcttcaattcgctgaagatcgccctgttctccactctggtctgcctgctggtgggctatcccatcgcctactacctggcgttccgggcgcagcgctacgcgaccctgctgctggcgctgctgctgatcccgttctgggtcgacttcatgatccgcgtgtcgagctggatggtgctgatgggccgcaacggactgatcaacgaaacgctgcaggcgctgggcctgatcgattcgccactgcgcctgctgggtacctatggcgcggtgatggtggggatgctctacgccttcctgccagccaccgtgctgccgatctactcggcgctcagccccatcgaccggcgcctcatggaagccgccgccgacctcggcgcggggccggtggaaaccttctggcgcaccactttcccgctgtcgctgcctggcgtgatggccgccgtgctgttcgttttcgtaccggccatgggggtctatgcgattcccgtcctgctcggcggcggcaagagcatcatcatcggcaatctgatcgtccagctgttcctggagttccgcaacatccccctgggggcggcggtctcggtggtgctgcttggcttctcgttcgtcatcacgctgttgtacatgcgcctgctcaaccgcatcgaggaggctcgctcatga

SEQ ID NO: 338888 - DNA, 804 bp, Pseudomonas aeruginosa
atgagtacccgcctgagcgacgccggcagccgcctggccggcctctacgtgccgctggtgacgctgctcggctatatcttcctgttcgcaccgctggtggtgctggtgatctactcgttcaacagcgatcgctcgacggtgaacttcgagggcctgtcgctggcctggtacgccgaggcgttcaacgaccgcggcctgcgcaatggcctggtggtcagcgccatcgtcgcgctggcctcggcgctgctcagtgcggccatcggcaccagtgctgcactggcagtggtgaagcgcgacttccgtggcaagaacctgttctccacgctgatcatcgcgccgctgatcctgccggagatcgtgctcgccgtcggcctgctggtgtccaccgtcgccgccggcatcagcctgggctacctgacgctgatcgccggccacctgctgatctcggtgccgttcaccttcctgatcgtgcgggcctcggccagcgctctcaacccgcgcctggacgaagccgccgcggacctgggcgccaccggtgcgcagaccttcctgcgggtaaccctgccgctgctgttgccggcgatcctctcggggatgctgctgtcggcggtggtgtcgttcgacaacttcgtcatgtcgaccttcgtttccggtgtgggcaccacgcctttgccgctgcagatctactcgatgctcaagtcagggctgactccgaagataaatgcgctcggcaccgtactgatcgcactgaacgtccttgtcgtggccgtcgtgctgcgccgtttcatgaaaactatacgttga

SEQ ID NO: 338889 - DNA, 1035 bp, Pseudomonas aeruginosa
atgtcgcgtattacaacaaaactgatgctgtccgccgccattctggccggtagcgcgcaactccaggccgcccagaacctgcacatctacgcctggtccagcgagctgccgcaagagattctcgacgacttcagcaagaggaccggaatcgacgtcagcctggacaccttcgacagcaacgagacgctgatcgccaaactgtcggccggcgcgtcgggttacgacctgattgagccctcgcagtacgcggtgcagatcctggccaaaaaggggctggtggaagagctggaccataagcgcctgccggggctggtcaacctgtccgagacgttccgccaggtcagttacgacgtgggcaacaggtacagtgttccctatgtctggggcacgaccgggctggcctacaacgacgagtgcgtgaagactccgatcaccagttggaaggccctgtgggatccggcctattccgggcgcatttacatgctcgacaacatgctctcggcttacatcgccgccatgcaggtgaacggctttcgctccggcagcgccgacaaggccgaggtggagaaggccaccgcctcgctgatcgagcagaagaaaatcctcggtggctacaacagcaccaacttcgccgacctggttgcttccggcgaagcctgcgtggtgcaggcctacaactccaacatcagccagatcaccgcgcagaatccgcacgtgcactacgtgatccccgacgagggcggctcgatgtggatcgacagcttggcgattccgaagaacgctgccaaccgcgaagccgcctacgccttcatcgactacctgctgcagccggaagtggccgccaaggccgcgaccctgagcaaggccgctaccacggtcggttccgccaaggcactgctgccaccggaagtggccggaaatgccgcgatctaccccgacgaggagcgcctgaagaaggctgacttcattctcgacctgggcaaggcgacccagctctaccaggacggctggacccgcgtgaagaccgcgcagtga

SEQ ID NO: 338890 - DNA, 1101 bp, Pseudomonas aeruginosa
gtgagtattctcacccaggcccgccccccctttgccatcgaattgcagaacgtctgcaagaccttcataagcgatggccagggcgaaccggaatatgccgtgaattcggtgaacctgcagatccgcgagggtgagttcttcaccttcctcggcccctcgggctgcggcaagaccaccacgctacggatgatcggcggtttcgagctgcccagcagcgggaccatcctgctcgaagggcaggacgtctcgaacctgccggcgcaccgccgcaacatcaacacggtgttccagagctacgcgctgttcccacacctctcggtgctggacaacgtggccttcgggctggcagtcaagcgcgtcccgcgcggcgagcgccgcgaacgtgcgatgaaggcgctggagctggtgcgcatgggccacgccgccgaccgtcggccgtcggcgctttccggcggacagcagcagcgcatcgccctggcccgtgcgctggtcaacgagccggcggtgctgctgctggatgaacccttcggcgcactggacatgaagctgcgccgcgagatgcagttggaggtcaaggagatgcagcggcgcctgggcatcacattcatcttcgtcacccacgaccaggaagaggcgctgaccatgtccgaccgcatcgccgtgatgagcggcggctatgtgcagcaggtcgacaacccggaaggcatctacgagcgcccctgcaatcgcttcaccgcgggcttcatcggcgagatgaacatgctccaggcgcagcacgtggaaggccgcctgcacgctggcggcgcccatatccctcataccggcgacgtcgacgcaagccagccgctgaccctggccatgcgtccggaagccctgcaattgggcggctccagcaagagcgaccacgtggtcttcgacggcaccttgggcgaggccatctacatcggctccgaccgccgctacgccgtgcacctgcccggcggcgaacacctactggtgcgggttcccaacccggccagcgctcagccgctgcacctgcgcaacggcgacccggtacaggtcagctgcccgctggcggcgctgcactttctccaacactga

SEQ ID NO: 338891 - DNA, 696 bp, Pseudomonas aeruginosa
atgtcgatacgttcctaccgaatcaacccgatgcctgcccaactggccccgaacctgatggcgcgcttcgcccaggtggaagccgccaccgtcggccactacctgcacgaccgcttcatgcgaaacgacctgcgcccactgctggccggcccgcgcgtggctggcaccgccgtgaccgtgtcgatcgccggtgccgactccacgctgctgtaccacgctatggatcaggtgcgtcccggtgatgtgctggtgatcgaccgtggtcaggatgaacgccacgccgcgtggggtggcttcatggccgctgtggcgaacgtgcgcgggctggccgcggtgatcgtcgacggcatggtcaccgaccccgccgcgatcatcgaagccggcgtgccgacctgggcccgtggcgtttcgccgatcaccaccaagctgttcaacttcggtggcggcttcaacattccggtgagctgcggcggcgtcagcgtcagccccggtgacgcggtactggctgatgactgcgggattctcgtggtgcccgccgaccaggtctccggcatcgccgacgtggccctggccgaccaggctgacgaaggcacctgggtcaaacgcatccaggccggagcgcgtctgcaggacctggtagacatccaggcgatgatcgccgaacgcaatcgtctagacgaggtgaaccatggctga

SEQ ID NO: 338892 - DNA, 720 bp, Pseudomonas aeruginosa
atggctgaggcactgcagaaactggccttctggctgtccactccgcaccaggcgatgctcgagatcgcccaggagataggctatcgccatgtggtgctggacatcgagcacggtctgttcgacctcgaagccctcgaccgtaccgtggccctggcgcgcgcactgggcctgactgtgcacggcaaggtgctcggcccgcagaccatccctatccagcaggcgctggatatcggctgccacagcgtgatcatcccgcacatcggcgagctggaacatgcgcgcgacgtgacccgtgctgccaagtacccgccgctgggcatccgcagtttttccggcactcgccctgccggttacggcggggcagggcaggcgtacttcgatggcgagaacgagaagacccggtgctatccgatgatcgaatcggcagttgccctgcaggacatcgaagcgatcctcgcgttgccgaccgtcgacggtgtgttcgtcggtcccagcgacctgtcgctggatcgcggacgcggcgcgtacagcttcaacgatgccgaccgcgccgacctgcagcgtatcgccgccgcctgcgtgcaggtcggcaagccctggatcatgccggcctggactgacgccgagcgcgcctatgccgaggaactgggggccgagcttctgatcgtgatcgacgagtacggctccctgaaatggggccttagcgaagccgcctattaa

SEQ ID NO: 338893 - DNA, 1584 bp, Pseudomonas aeruginosa
atgcatctgctgcgcgcctacgacatcgacacggtgttcgggatgcccggcgtgcacaccctggaagcctaccgcgggatgaacgcggcaggcatccgccacatcggcgtgcgccacgagcagggcgccgggttcatggccgacggttatgcgcgggtatccggcaagcctggcgtgtgcctggtgattagcggaccgggcgtgaccaacgcagccacgcccattggccaggcctactcggacagcgtgccggtgctgatgatcaccagtgtcggtgccaccaccgacgccggtatgggccgtggccgcctgcacgaggttaccgaccagtcgcgcatcaccgaaccgctgacggccttctcggcgatcgccaacgacccgacccaggtgcgcgagtacgttgcccgcgcctttgcgctgttcgagagtgagcggccgcgcccggtgcacctgtccattccgctggacgtgttcaaacaggtcgactccgctccggtgacgcgccgccgtgtccgccagcgtctggccgccgatgctggggccgtggccgacgccgtggcactgctgaaggccgggcgccgcccgctgatcatcgccggcggcggcagcctcggggctgccgatgcactgcgccaactggccgagaccctaggcgccgccgtagtaccgaccatcgccggtaagggcgtgctgcccgacagtcacccgcgcatcctggaagccaccatcgaccgcgaggccacccaggcgctgatcgccggcgccgacgtggtgctctgcgtgggcaccgaactggccgagccggaccactggctgcagggcaaccttcccatgggggggccgatgatccgcatcgacatcgacccggaaaccctggtgcgtgactacgacgctgctgtcgccatccaggccgattcggccctggcggtgcaggccatcctcgacgcgctgctcgccgatggtttccgtggcgacggcattggcgaagatgagatcgccaccgtgcgcgccgccgagcgagcggccctgcgccccattgagcagcagcatctggaagtgctggcggcgctgcgcgacgccatgcccgaggacggcgtggtgttcgccgacatgacccaactggcgtacaccggctatgccttttacccctgcgagcgcccgcgccaatggttcttcccggcgggctacggcaccctcggttatgcgctgccggcggccatcggcggcaagatcgccgcgccgcatttgccggtgatggtgatggtgggtgacggcggcttccagtttaccctgcaggaactgggcactgcggtggagaaccgcctaccgatggcggtgatactgtggaacaacgacagcctggcgcagattcgtgacggcatgatctcccgcgacatccccaccatcggcgtcaaccagcacaacccggatttcctcggcatcgcccgcgcctacggctgccataccgccagcccggacagcctcgaagcgctgatcgccgccgtgcgcgcggcgcacacggctgacggcccgaccgtgatcgaagtgcgtgaaagcgcgcccttcctgagtgtgcggtcatga

SEQ ID NO: 338894 - DNA, 1170 bp, Pseudomonas aeruginosa
atgagcggggcagacgaggttcgcctggataattggcgcacggtgccctacagccaccacgccttccgtcacgtcgacgagttggtgaactgcgctcgcatgctccccggcgctgtgcccctggctctgccggaagagccggcggcgctggacctgcaggtggttcgcttcgaccaccacgggcgctcttggagcgttgacgaagcgctgcgcgagggggacaccgacggcttcatggtcctgcaccatggccgcgtgctcggcagctattacggccatggccagactgcagactgtcggcacatcgtgttttcggtgagcaagtcgatcacgggtgcgctggccggcgtgctggtagagcaggggctgcttgatccagagaaagcggtatcgacctatctgccgttgccggctggttctgcctacgccgactgcacagtgcgccacgtgctggacatgtgcgttgcgatccgcttcgtcgaggactatctcgacccgctcggtgatgttgcgcgctatcgcgtggccatggcctggaatccgccaggcctggtcggcggtaacgtgggcttgatcaaattcgtcactagcttgccccgtggcgagggtgagcatggccagcgcttccactatgtgtcacccaacagcgacctgctcgggcgactgcttgaagtagctggtggcgcacctgtggccgaactgatcgagcgtcacctttggcagccaatgggcgcgcaggacatggcgcagatcaccctcgacaagcagggagcagcgcgcaccgcgggcggtatctgctgcacccttggtgatatggcgcgcttcggcgagctgatgcgcaacgatggtcgccaaggcgagcggcaggtgatcccggcttcgtgggtgcaggacatccgtagcggcggcgatccacaggcctgggcgcgcggcgagatgacggagttgtttccccaggcacgttaccgcaaccagtggtactcgctgactggggtggacgacggcgtgttctgcgccattggcatccacggccagtggatctggatcgacccaacgcgcggcgtcgtcatcgccaagcagtcgtcccaagcgatccccgccgatgatgacctcgatgccctgaacatcgcccttttccgagctctgagtcgggaggtggccaagtgttga

SEQ ID NO: 338895 - DNA, 1449 bp, Pseudomonas aeruginosa
gtgttgactccgtatctacctgcagctagccggcggctgagcttttatatcggtggtcgctggctggctgcgtcgaatcacctgcggcagatggttatcgacccgtccaccgaacaacccctgggcgagattgccctggggaatgaggaggacgtcgagcaggctgtgcaggccgcccggcgggccctaccgatctggtcggcgagcagccgagaagagcgcctaggactgctacagcggattctcaaggtgtaccagcgccgcgccccggagctggctgccgtgctcagccgggaaatgggggcgccgctgggcatggccctacacaaccaggtcaccagcggtgccgctcatatcgaggtgatgctcgacgtactggccgactactgcttcattcgccgtcgcggcgctactgagatcgtgcgcgaagccgttggtgtggtcggcatgatcacaccgtggaactggccgctgaaccagattctctgcaaggtggtgccggcactggctgccggctgcagcatggtgctcaagcccagtgaagtcgcgccgttcaatgcgctgctgctcgccgaggtgctggacgaggctggcgtgccggctggcgtgttcaacctggtgaacggcaccggcccgacggtcggcgaggcgctggccaggcacccggacatcgcgatgatctctatcaccggctcgactcgcgcgggggtactcgtggcgcaggccgcgtcggcgtcggtgaagcgcgtgcaccaggaactgggcggcaagtcggcgaatatcctggtcgacggtgttgacctgcagcaggccgttgcccagggggtacgcgagtgctttgacaacagcggccagtcgtgtaatgccccctcgcgcatgttggtgccacgtcagcatttcgatgcggcgctggagattgctcgcgaggccgcgctggccttgcgtgtcggcccggcagatgtggaaggcgtcgacctcggtccggtggtcaaccaggcgcagttcgcgcgtatccaagagctgatcgagtccgcgctggaagagggcgtcgagctggtctgcggcggaacagggcggcccgatgatctagccgaaggctacttcgtgcgcccgacggtgttcgcctgccgcgagggcaatccgcgtatcgctcgcgaagaagtcttcggcccggtgctcaccctgcagccctacgaccatctggacgaggccgtgacactggctaacgatagtccctacggtctggccgcctatgtgcaatgcgccgatcctgtgctggcccggcaactggctgcgcggctgcacgccggcaacgtttatctcaactatccgcaatgggacccctatgcgcccttcggcggtgtcggccagtccggcaatggtcgcgagtacggcgagtatgggctggatgatttcaccgaaatcaaggggatcgtcggcgttacctga

SEQ ID NO: 338896 - DNA, 1239 bp, Pseudomonas aeruginosa
atggacactctgaagcattgcaaacgtgctgttctcttcggcctcccgctcctcagcagcctggccctcggaagccaggctgacagccagggcttcgtcgaggacagccacctagacctgttcgccaggaccctgtacttcaatcgtgactggcataaccgggatgccaacagcagctacagcgctgacttcggccaggccatcaccacccagttccactccggattcacccagggcacggtgggctttggtattgacgcgctgaccctgaccggcatcaaattcgacagcggtcgcgggcacaatgcttcggcgtcctatcccaaggacagcgacggccgcaccgaggactcgttctccaagggcggcgccgcagtgaaggtgcgggtgagcaacaccgtcatcaagtacggcacgcagttcctcagcctgccggtgctggccaccgaccccggccggctgctgccggaaaccgcgcgtggcctgctgatcaccagcaacgagatcgagggcctggagctgaacgccgcgcacatcaccgcgctcagttcgcagttcaagtccggcgaggacagcaagaacctcaagcaggccgatgcggtgggcggcagttaccagttcaccgacaacttcagcggttcgttgtacttctccgacatcgaggacaacttcaagaaaaagtacgccaacctcaacttggtacagcccatcgtcgaaggccagaagctaacctatgacttcaacatctaccgcagcaagagccagggtcaggagctcagcggctacgtcgacaacaccatctggagcctgacggcggcctacgtcctgggttcgcaccagttcctgctcggctaccagcgcaacagtggcgataccggctacgtgtacggcgccgacggcggcgcggtctacgacttcggcaactcggtgcaatactctgacttcaatgcgaagaacgagacctcctggcaggtgcgctacgacttggacttcgccggctacggtattcccggccttactttcatgattcgctatattcgtggcgacaatattgataacggtatgaccagcaacggcaaggagtgggaacgcaacgagtcgctgcgctacgtgatccagagcggtgcggccaagggcttggccttccaggttcggcatgcgaagaacgtctcttcggcgctggacagcgatctcgatgaaactcgtctgatcatggattacccgctaagcatcttctga

SEQ ID NO: 338897 - DNA, 2886 bp, Pseudomonas aeruginosa
atgccaaaaccagcgaggctgatcacggctatcagcttttcactgctcacgctgctcctggttattaactgcgcccaagcagaagtcctttcgctcgcaggccgcatggcgaccaactcgcgtccctggttaagggatgccgacaatcgtttgctggaacgaaaggcccctctcagggtgggggtcgcagctctcgactacccccctttgtccatttcttatgcggatcgtttccaagggatcactgctgattacctagcgctgattttcagggaaacgccacaggttcatgtcttcaattcccggttggcagccttgtccgcgttgaagcgcggcgaaatcgatcttctcgggacaggtagcgaggccgaggcacaggaaaatggattgttgaccagcgaaccctaccttcccgacagccccgtgctcgtaacttccgatggcaaggcattcgatgtgcagagacccggcacggtcctcggcgtgatcagcggttatctccctgagcagaagatcctggctgcctatcccaacagcagcctccgcttgttcaactctccccaacgcgccctggaggccttgaccctgggcgatctcgatgcggtgatcggcgacgccgtctcgtcacactatctgatccacaccaattacctgctgaacctgcggatcgagaagttcgcgcctatcgatagctccggcttccgcttcctcctgaggcgcgacagcgcagaccttaaggaaatcatcgaccgcgcacttccgcccatagctgcgcgctacggcgaagaaatgctcaacagctggagcgccggccatcgcctgcacttcaaggagcccgacgtcacgctgacgccagcagagcaacgatggctcgatgctcacccacaagtgccggtggtgattaattattccctaggtgcgctcggccaactcggccccgatcacgagctgagcggcattggccgcgactatttggatctgatcagtgaacgaagcggtttgcacttcacctacataggtgccgagaactcagtcgactcatggaaactgctgcgctcaggcaaggcactgctgagccctgccgtgccgccggtggatcagttcgaccttggtttcgatgtgctaccgccctacttgcgtagttccattgtgttgatgagcgtaggggacaaggacaaggttatccgcagactgagtgatttaaacgggaaggtcttggccactggggaaggttacttcctcaacgagctgattcggcgggactaccctgacatccgactccgcctttaccccaacttcgtggaagctatgcgcagtgtcgacctcagccagagcgacgcatatatcagcagcgactatacggggcgctatctctcggcccaatatttctccaatcgcgtcaaggtctccgggatcctcgaggacctcccggttgcgatcggtatcgggatggccaagaatcagccggagctcaaaagtatcctggagaaagcccagctagcaatcaccccagaagacgtggcaaagatcgtgcaaggctgggaaccacgctttgctagaggagaagccaatttctggagagattaccggacccggatactacaggtcgggggcctccttatggtactggtcggcatctcgttgatctgggcgttctatctcatgcgtcagatacggaagacacgccaggcggaggaacaggccgccacggcgaaccaggcaaaaagcgtgttcctctcgacaatgagccacgagatccggacacccctgaacgcggtcatcggtttgcaggagatagccttgcttaaggcaaagcgaggggtggccgatcccggatcgctatcggtggcgcaggaggcggcgcagtcgctgctccttctgctcggcaacgtgctggatctttcccgcatcgaatctggaaagatagactcgtcgccggagccggtcgtcctgaaggacttgatagaaggtatcgtcccgttggtgagagggttggccacacagaagaagctcacactggagctgagcctggatggtgacatcgacctgtgggtcctgatggaccctctgcatttcaagcaggtcctgttcaatctgctgagcaatgcgatcaagtttaccgagcatggaggcgtgaaagtggatgcctcggcgctccggcagggcgaacgcctgcttctgcatctggatatcatcgatacggggatgggcatctcgccctccgaccagaagaaactgttcaaaccattcacccaggtggggccgtcttcctctcaacatacagggggcagcggattgggcctgaatataagtcgaaagctggtgcacctgattggcggccaaatatcgctgagtagcgtaccgggcgagggctcgcgcttctccgtcaatctgaacctacccctctgccaccctcccgaggagcagacaggctctattcccgatatggcagtgacggcacagcaggaaacgtccactctctccgtcctggttgcggaggatcatcctttcaatcgactcactctgagcatgcaactcgagagtctggggcatcgagtgacgacggccgaagatggcagggaagctctggagcgctggcgtgacaatgagttcgataccttgatcaccgacgtgatgatgccgcggatgaatggcttcgaactgatgaagttggtccgtgaggaagaactccgcagcgggcgccgtcgctgccagattatcgcgttgacggcgagcgccgagtcagaagcgatgcagcgatgtctggcgtctggtgcggaccaggttctgtttaaaccgaccaccctcgacgcactgaagccggcgttgaacgcgggtagccaatcaacgtcctccgctaccgtagacgacggccaggcaacgtga

SEQ ID NO: 338898 - DNA, 825 bp, Pseudomonas aeruginosa
ttgaaattctataaacgcatgagtcggaccgagctcgatgccgcctacaacaacactgcagccgtgccagactttcccggcgttctggcggatttccaaacgcgcagttcaagaatgtatgcctctcgtccagttcgccaaaaccttccctatggcgaaagcctacgtcagtgtttcgactggattccctgcggcaagcccgatgcaccgtgcctagtgttcattcacggcggctattggcagaactgccagaaagaggatttcgcgttcattgccgaagggccgctgcatggcggcttcaatgtcgtgctggcggagtacaccctggccccgcatgcctcgatgacccatatcgtggcggagataggatgcctactcgatcacctcgccgaggatcctgaccaactgggcgttgccagccgtcctctgattcttagcggccactcggcgggtgggcacctgactttgatgtaccgcaaccatccgctggtgacagcggccctggccatcagttcgctggtggacctccagccgatcagcctgtcatggctgaatgacaaactgcgcctttcccctcaggagatcgaggcattcagccccttgcgtcacctcggcaaaggagctccgacggtgctggcggtgggcgcagacgaactaccagaactcatccgccactccgatgagtatgctgcggctagtaccgcggaaggcgagtcggtttcgctgcttcatgtgcctggttgcacgcatttttccgtactggacgaattggcaagggctgacgggcgcctgctccaggcattgtccgtgattacccagtgttga

SEQ ID NO: 338899 - DNA, 1005 bp, Pseudomonas aeruginosa
atgattggtcctaagattttggtagtggtgcttttgctagcttttttgccaaaaagctatgctctgatatgtactagcactggcggtggagttcaggattctacaactgttgaaacaacggttgctatttctaatagcatgccaaaaggaactgtgctttggaggcagaataagcaaacggcaaccacagattgttgggtggacataaatggcgcatctggtgagtatgtttatttctatgttaatcccaataaagttgacttggggcccgatctggaggttggggtgacctatcaggggcaagattacctgtactcgtctttgccagatgggagattaaataccaacatgtgggttaatggttgcggcccggttcctgatagatgtggcagagagaaagaaaggaaaaccttcgagttttcaatttttcttgcgaagaagtctccagcaggcggccccaaggaaggagagttgagctccataaaaaactatattgccttccagttcgatggagagtggggtgtccgtccagggatgagttacaatttcactgtaaaagggcttgatagtctgcgctatattccatgtagttcgaaactgacggtgattccgagtaccgtggactttggaaggatatctctaactagtcctgttcctcaagttaatcaggtagtgaagcaggttccttttaatattgttgagcagagaacttgtttgaacagtagcgccgtctatggtctcaatgcgtatcttactccaataaaagcgactctggctgacagtaataccactctagttcctaaggacaattcttcggtgggcataaatttactaagggcggaaactcaggttcccttggtgtttaataaggaagtcatccttacccatccaacagctgcgcaaatcagtactcatcgatttcttgccagtctcaagtggaggacggcgaagccgaagctaggaactttcaatgctggggcagctattgatatatattataagtag

SEQ ID NO: 338900 - DNA, 699 bp, Pseudomonas aeruginosa
atgaaacacgataacaaatttaagcgaaaacatcgcaataagcataaaattattttaactcgaattattcaaatcctatccagcctcggcgcattcagcttcttgattgcgacctcctatagcttttttatgaatgatattcggcttactttcgaaagaccatatggcaggtcatatattttttcgtttagtaatgatacccccgctgatatacgagtggagagattcagagttacctctcctaaccagccagtgatcgcgaaaaccacccgagatatttatgcagagtcacgtgacgggagcctagttatgccaggtggaaacgtcagcagggtacctatcacggagttccatgaattggatggagagaccataccctctcatgacatccataaatttagactacccccactaaacagtcgggactatctccgactggaggccgctatttttgagattgactataaaataacaccaaaaagcaaaacacttagcttcatagacaagactctcaaactcatagggctacgaaatgagagtgaaaccatccgatatttagttatcgataactattggatcccgacccgttctccatcgccctacgaagccatccgggttgcctgtcgcgataacgatatgctttctaaatatctgtgttcagagtcagctttccgtaatagatggctctccccaaactaa

SEQ ID NO: 338901 - DNA, 489 bp, Pseudomonas aeruginosa
atgagcaacaacacccaagcccaagaagccaagtatttcgacctgcacaccaccggtatcggctacctcaatcgcatccgcgaggtaccgatccgccgaggtgaaccattcctcgccgtaaccgtcgcagccctccatggcgcggcagacagcgtggaatactcctacatcgactgcaaagtggtcggcgcccaggctgaaaagcttgtccgccgttgcaaggaagcagtcgaggccaagaagaaggttctgatttccttccgtatcggcgatatctgggcggatcccttcatccaccagaaaggcgagaaacaaggcaagcccgacgcaagcctcaaaggccggctgctcttcatctcctggatcaaagtggatggcaccaccgtctacgatgcgaaggaagaagctgaaaaagcccagcaaggccaaggcgaacctcaaggtgagcccgcagcccccgctgagcacgctgaaccagccgctgcttga

SEQ ID NO: 338902 - DNA, 711 bp, Pseudomonas aeruginosa
gtgcgtgaccgtgacctgctggatcagcgcgtcctgctccaactgccggtacgtcgcgtcgattgcttgagctgtgggcgggtaacagagcgggttgactggctggagtctgcgtcgcgtttgacccagcgcctgcgcgtgtggcttgaaggcttgctgcaactgctccctatcagccacgtcagccgcctcaccggcctgcattggcacaccctcaagagactcgacaagcgccgcctggacgcctcagttggagcatttgagccaggcgaggtgcgtcggctggtgatggaagagtttgccctgcacaaggggcatcgatacgccacggtggtcatggatgccgagcggacgcgcgtgctgtggggcgggcacggcaacagccgagaagcgatccgaccgttcttcgaattgctcggcaagcactgtcagcagatcgaagcggtcgcgatggacatgaacacagcctttgacctggaggtgaagcggcattgcccacaggccgaggtggtatacgacctgttccatgtggtggcgcgctatggtcgcgaggtgatcgaccgaatccgggtcgatcaggccaacctcctgcgtcaggacaagccggcgcgcaaagtgatcaagcaaagccgttggctgctgctgcgcaatcgcgaaaacctgaaggacaggcaagctgtgcagttgcaggagttactcgacgccaactag

SEQ ID NO: 338903 - DNA, 303 bp, Pseudomonas aeruginosa
gtgctcaaggatgccctgaaggccatctggtacgcccccagcctgcaagagggttggcggcgctggcgtacctggctgcggcacgcccgggacagcggcttggcgccgctgcaacgctttgcccgcaacctgcgcaaatacgtccgcggcatcctcgccagtgcccgtttcgccttgcataccagcgttccggagggtgtgaacaaccgcatcaaggtgatcaaacgcatggcctatggcttccgggactcggactacttcttcctgaaaatcaaggccgccttccccgggaatgcgcgatga

SEQ ID NO: 338904 - DNA, 2394 bp, Pseudomonas aeruginosa
atggctgcaaagaaacctcagagcccaaagcgaaatgggcaggccgcgctggatagtgcctatatgaactcggacagtggtcctgcctctccccctgcacccacagcgaagcagcctgcgctcaaacaggctcgtgccgtgggagagttggtggacagcctgccggccaattcaaataaagccaaggaatatggcgctgacgctgcctgtcctccgccaggcctgactgcggaccctaacgacgaatcggcactggtcagcacgctgtcggagaagaacaaatccgacaagaccggcggcaaggccgccctgggcgtcaatgccgtggacggcgccttgccacgggtgcgcgcggatagcgcaggtcaggtcatgacgaccaaccagggagtgcctgtcgctgataaccagaattcactgaaagccggcctgcgcggcccggcgttgctcaaggatttcatcctcagggaaaagatcactcacttcgaccacgagcgcattcccgagcgcattgtgcacgctcgcggctctgccgcacacggctacttcgagtgctacgaggcgctgaccgacctcacctgcgcgtctctgttctccgaagctggcaaacgcacgcccgtgttcgtaaggttttccacagtggctggcgagcgcggctcgaaggatacagcccgcgacgtacgtggcttcgcggtcaagttctacacagaccgaggcaactgggatctagtgggcaataacattccggtcttcttcatccaagacgcgatgaagtttccggatctagtgcatgccgtcaagcccgagccccaccacggaatgccacaggcggcctcggcccacgacaccttctgggatttcatttccttgatgccggagagcatccacaccatcatgtgggccatgtccgaccgcggcattccacgtagctaccgcatgatgcagggctttggcgtacataccttccgcttcgtcaatgcgcagggcgtcgcgaaactggtcaagtttcattggaacccgagtttcggaacccactctcatgtctgggatgaagcagtcaagatctccggtgctgacccggactttcaccgtcgcgacctgtgggaagccatcgaggcaggcgagtaccccgaatgggagctcggcgtgcagatcttcgacgaggagcaggccgaacgcttcagcttcgatgttctcgattctacgaagctcattcccgaggaactggtgcccgtcacgccaatcggccgcatggtgctgaaccgcaaccccgacaacttcttcgctgaaaccgagcaggtcgcattctgtacggcgcacgtcgtgcccggcatcgacttcaccaacgaccctttgcttgccggacgaattcactcgtacgtggacacccagctctcccgactaggcggttcgaacttccatgaaattcctatcaatgcacccgtcgtccccgtgcataacaatcagcgtgacggcatgcatcgccagaccgtgcaccggggccgcgtagcctacgagcccaactccttggctggcggctgccctttccaagcgggcacagcggggtacatgcatttccccgaaccggtcaacgacgtcgagctcaggggaaaaccggagaaattcgctgagcactataaccaagcgacactgttcttcgagagccagactgaatgggaacaacgccacatcattgatgcgtttgcattcgaattgagcaaggtaacggttcctggcatacgccagcgaacagtggcgctgctgcgcaatgtctctgaggacttggcaaaagccgtcgccaccaaactgagcattgaccccttgcccgaatcattgccaaaagccagcagccaggaattcgaaccggaaatcacccgctctgaatttctttccttgacggcgcgtcccggggaagctggaattcgcacacgaaaggtggccatcatggtggcgccaggcgtcaacgccaaggaggtgaagcagatcgcacagggcctgatcgccaaaggtgctgtcgtcaggttggtcggtccgcgcatcggcctgttggcaacggcagaaggcgagcaaatcgatgctgatgcctcattctcgaatagtcctgccccgctttttgacgcaattgtggttcctgatggcgatgaggccatcaacgcgctccggcaagacggtcaagctctcgagtttgtgagggagccattccgacatggcaaacccatcatgacgatcaacggggggcggctagtgttggaagatgcaggtgtaccgctggatgaggaagacagcgggttggtcatcgcccagagcgcgacccagaatagcatcaacgcattcattgaggcgatggcccagcaccgccaccctgcgcgagaaacggaccctcctaaagtgtga

SEQ ID NO: 338905 - DNA, 459 bp, Pseudomonas aeruginosa
atggcagtgaacatctatgaagcgctgcaccaaagccacgaagtgcagcgttcgctctgtcgacggttggttagagccacccctgatggtggcaagcgagaagctatacttcgcgaattacgcattgagctggcagctcacgcggccgcagaagagaggtatctttatgcccccatcttgatgcatgacatgggtctgaactcttctagacacgccttggccgagcaccacgagatagatgagtgcatcaaggcgctcgcacgagccgactacgaaggagggagttggcatgccaaagccaagcaactatcccatgaagtacatcatcacctgaaggaagaagagacaaagttctttcaggtatctgggaaaatactgactgaggctcaaaaatcaaaactggcaagactatatctttctgactacgagcgcatgaagaaaaagctggctgagacgtag

SEQ ID NO: 338906 - DNA, 153 bp, Pseudomonas aeruginosa
atgcgtataggtcccgctcagaaagtctcacagagcaggacattttatttggactaccgcatcaaggtgatcaaatgcatggcctatggcttccgggactcggactacttcttcctgaaaatcaagtccgccttccccgggaatgcgcgatga

SEQ ID NO: 338907 - DNA, 2004 bp, Pseudomonas aeruginosa
atgaaccgtccacgcctggtcaatcgtacctccgcgacaccttcgacgcttctgcagcgggcgatcttcgacggctacgacttcggcttgaagatcccctacatcgcaggcagcaaccgcgcgctgctggagctgtccggcttcttcatcagcgcccgggagcatccgttgcaccgctactggcgggtccccaaaggcaagctgctgcctgaactggacactctgtacaaccgtctcgccgagctcgctggaagccttcactcccagtcctggcgggaattcagctccttggtcgaatccgcgcaggcctcgcttgaccgacaggccttcacctgggggatgctgctgcgcatcgcgcccctggccgagggaggcgtcctactgtcaggcgagttccatcctggtgtgttggcggtcgctcggcggatgcgcggggtattcctgcgcccatcgagttcctggcgcatcgacaccactcccgagctgctccgaagcaacctgattctggagcttggcctcgccgaggaacaattcgagattctggatactgtccaggagctgctcagcgacggcagcttcgcgccgtcgaccgcgctgcccagcatgagcatcggcggtcaacagcaggaaccggcagcgccatccctggaggacgagtcagcctctgacatatacctcgccgcagtgccggagatcgaacgcaccgagtacagctcggctgatatcgaggcggcgcttcaaggctactcactactggcccaccagcctgacggcatcgctcatctgctgcagaggaccagcgccttactggccgacgacatgggactgggcaagacccgccaggcggtcatcgccgcttcgatccgcgcggcgggcagaccaattctggtcatcaccctggccaccctgctgatcaattggcagcgggagatccaggaggtctatccctcggccaccgtgaccatccagcaggacaccccagaggcgcagtggatcctcatcaactacgagcagttgagccccttcgtcgccaacgcttcgcgcttcgccgtgatggtcatcgacgaggcgcagcggatgaaggaaccgacggcgcaatgcacgcggcacggtttcgacattgccgcccaagtgccgaaccgctacctgcttaccggcacgccggtgctcaaccgcgagaccgagctgcacaccctgctgcgcctctcaggccaccccatcggccaactgccgctgaaagagttctgcgaccgtttcgccggcaacccggagttccgccagagtctgcgggcggagctgggtgactggatgctgcgcaggcgtaaagatgtgctgcccagcctcaagggcaagcagcggcagttgctgaaggtggccctctccaccgaggaacgccagcaatacgacgtgctgcgcctcgaggaccgaccggtcttcgcgcgactcggcgcgctgcggcgttacctggaaacggtgaaggtgcgcgtggcgatggacctgttgagcgagctcgacgcagaggacaaggtaatcctgttctgcgagttcaagccgaccgtggctgcgctgaaggaactctgcgagcaggccgggctcggctgcgtcacgctggtgggtaatgactcgctcaccaagcggcagaaggcgatcgatcgcttccagcaggatcccgactgccgggtgttcatctgcactacggcggccgcagggacgggcagcaacctcactgcggcgaactacgtgtttttcctcggcctgccctggactcccggtcagcaggaacaagccgaagaccgcgcgtaccgaaacggccagctccgcatggtcgtggtgaagatcccactggtcgaggcaacgatcgacgagcagctgtggcaactgctcaacgcgaaacgccaggttgctcaggacctcatcgagcccgagcaggtcgacggcaaccgcgcgcaactggcggccagtcttatcgggagctgttcgagggagcacaactcaattaaataa

SEQ ID NO: 338908 - DNA, 1890 bp, Pseudomonas aeruginosa
ttgccaccactcgataacgcatccccttccgagcagttgccggattcatctctggccagttacagcgagcgtcagctcgccgttgcaaacacctgggcaacgcatttctccctcgctgggacagctcggacaaagttcatccgtcactacctgcgcagcacctctgcgaccaggtgctggtgcatcaccgtcgctgtggacaacggtattcgttacaccatcatgcgtgcagggccactactccaagtgttcgacggtcaactgatcggtgcgtgggagtgcaagcctgcccatcgtgtcccggcaagcacgccgtccccggcaggggcgttgaagctgttacagcgccttgagaagttcgacgacgcagttgctgtactcagctcatacaccaagcgagcgcacgacctagccactcagatggccagggacgacctcggacttccacatcgcctcgtgtatccgagccacagcaacaagcgctactacgcgccaaggcaccagttctacttgaagcagatcggagcggtcttgcgaaccttcagacaggtcctggaccaagacctgctgttcgccatccgctcggttcggtgcctctcgccccagctctacaactggctggctcaaggcaaccaggtgcgccgactgcaaatgctgaaggctcagccggtcttgacgccgctactggtggattgcgaggagggagtctggcctcacacgacgaccaaagacaacggcgagagcatccaccattaccttccttgccccttttccctgattgatagtgaacgaccgcaggccgccgccatgccatgcgatttgtacctcgatatgggccgtattcttgggcaggtcgcggacgaagggatttcggtcatcaactttttcgcctggctatttcaggcgccgcgggcctcgattcgatttcttagtcacgtcagtcccggccgtgcgggaggagctctcttccatcgcaaacgggaaggccgatattcgggatggcacgctctcctactggcagcatcgttaggtaaccggcggccgatcactcgcgctcaatggacagcattctatgccgcctataatgcgatcccctggcaaattcacaatgcaaagcccaactacaaccgtctcttcaacggctgcccgtcggattggcaggatccggcatggcttgcaatcactgcacggctgagcgacatcaaggagttctattccgccctcgcccaggggaactcacaggttgttcggcaggcgcgcagcgtcctgaaagcgtatctgggtcattgtacctaccgacaggctggcaacctggtggacgactaccatcaggtccagagggagctgcgtgctgcagtgcagagcagcctgcccgatctggtcgacaccgacgagtacaccacctgggagggaatgctgcctgtcggccttgtcgattgccctaatggcctgcagatcgtcgagctccgctgtcctgccgacctctatgccgaacatgtcgctctggcacattgcatcgatagctacgaccaggccgcctaccgaggagactgccgactgctctcagtacgtgaggctggtcgtccgctggcctctgccgaattggagctcaggcgtgagcatggcgagcctataggtaggccctggagtcccaagcacctttccacggtgcaacttcgcgaattcgataatgcccccgttccgacagactcgcctgccggccaggcataccgctggttcatggaacggattcgctctggagccatagagacgaacctgaactggcccgacatgaccgtccacatgacgcgcttcgccaatggtcgctggaaggcgggcctcgccgaagccacggcaaagtggctgctcactcggttggaagaccgatga

SEQ ID NO: 338909 - DNA, 738 bp, Pseudomonas aeruginosa
atgagaaagtctcggtcgggcgtcgtgttttttagtgttgcggcccgcaacactccaccaaggatccacttcggtgccgccgacgagctgagtggtgccactggcaccacttcaccaaggatcaaccacggcgccgccggcgaactgggtgttgccactggcaacactccagcagggatcattcacggcaccgccagcgaactgggtgttgccactggcaacactccagcagggatcaaccacggcactgccagcgaactgggtgttgccactggcaacactccagcaggagccgacctcggtgccggcgacgagcagggtgattccactggaatcactccaccagggatcaaccacggcaccgccagcgaactgggtgttgccactggcaacactccagcaggagccgacctcggtgccggcgacgagcagggtgattccactggaatcactccaccagggatcaaccacggcaccgccagcgaactgggtgttgccactggcaacactccagcaggagccgacctcggttccggcgacgagcagggtgattccactggaatcactcagcaaggaaccgacctcggtgccgccggcaagctgggtgatgccactggcatcacttcaccaggatccgacctcggcgccgccggcgaactgggtgttgccactggcaacagtccgccaggacctggcctcggcgccgaccgagggctatcaacctctcccactcaatag

SEQ ID NO: 338910 - DNA, 1098 bp, Pseudomonas aeruginosa
atgagcgaaatattgatctctaatgtcagcgcccctccaaacataaaagcgcagctcaactccttaagtaaggatataaaatttacgagggaaataaccaagggtggaaacggctatcttttttttggtgaaaataggattctgaaaaacgaggttgcagttaaattctactactggggaggtgatgcaaagtaccatgcagaacctagcaccttagctgcaattgaggcgcctaacattcttcaagtaaaaaacgctggtctacttgatggggaatgggcgtatttcgtgactcctcgctgtcccaatggtgatctagatgatgtgcttgaaaaaactgagcacggcaatcttcaggccgttgagcgcaccagtcaaatattgtgtggtgtaacgaatttgcaccagcggcgctatctacacagagatctgaaaccgtctaacatctacgtcggcgaggacggaagatcaataatcggtgactttgggtcgatcaagtacataccagaaaatcttaacgcaatacccgcctctagccatgctgtgctctatagaccgcctgaatcgattgatgcgaactcctatgggtttggaggggatatataccagtgcgggatcatcctctaccagctattaggaggttatttgccttatgaggaaatggcgtggctgagtaagactgaaaagctcgagcacaatcgccaagagtccagggccgataaatcaatttatattgattcctgcattcaggccaaaatcaaaagaggaaaaattgtaaatatcgcctcgcttccttcttgggtgcctgacaatctaaaaagaacaataaggaaggctacccatatagatcccgccaagagatatctgtcagcctccgcttttcatacgcatctcaataatatcaaatcagaaattcctgactggtcggtagtcgcagggcagccaacgcttgggggcaacatttcgtttaggatctgcaatgatgatgggagcctttatgtccagaagtcgaagaacgggggagactggaggcgagacaactcaatcgtaggcgggagcatttccgagattgttaagaaaattgaagcaaaaatttga

SEQ ID NO: 338911 - DNA, 279 bp, Pseudomonas aeruginosa
atgcacctgcgcaacggcgaccggccctaccgggattgcgccgatgcgctgtgccactgggcggaaacgtgcacggcggtggcgctgcggctcgtcggcgaacgcctggagctactggcaccgctgggcgtcgacgacctgctggcgctgaaggtgcggcccaccgcgcatttcgccggcaagccggaggtctaccggcggcgcctgcgggagaagaactggacggcgcgctggccgctgctggatatcagtggcagcagccagacgccaggtccttga

SEQ ID NO: 338912 - DNA, 438 bp, Pseudomonas aeruginosa; identical to SEQ ID NO: 319452

SEQ ID NO: 338913 - DNA, 1431 bp, Pseudomonas aeruginosa
atgaccccaggttatcccctcgccctctctcttgccgtctccatggccgtgctcggcagcgccttgccggcccaggcgcgccaggacgatccgtcgctgttcaaccgccaggcccgtggcgaactcagcgagtacggcggcgcacggcgcgtcgagcaggacctgacccaggccctgaagcagtcgctgtcgaagaagaaggcgaagaacgtgatcctgctgatcggcgacggcatgggcgactccgagatcaccgtggcgcgcaactacgcgcgcggcgcgggcggctacttcaagggtatcgatgcgctgccgctgaccggccagtacacccactactccctgcacaaggacagcggcctgccggactacgtgaccgattccgccgcctccgccaccgcctggaccaccggggtcaagtcgtacaacggcgcgatcggcgtggatatccacgaacagccgcaccgcaacctgctggagctggccaagctcaacggcaaggccaccggcaacgtctccaccgccgagctgcaggacgccacccccgccgccctgctcgcccacgtcaccgctcgcaagtgctacggtcccgaggccaccagcaagcagtgcccgagcaatgccctggagaacggcggcgccggctcgatcaccgagcagtggctgaagacccgccctgacgtggttctcggcggcggcgccgcgaccttcgcggaaaccgccaaggctggccgctatgccggcaagaccctccgcgcccaggccgaagcccgcggctaccggatcgtcgagaacctcgacgagctgaaagccgtgcgccgcgccaaccagaagcagccgctgatcggcctgttcgcgccgggcaacatgccagtgcgctggctcggtccgaccgccacctaccacggcaacctgaaccagccggcggtgagctgcgaggcgaacccgaagcgcaccgccgacatcccgaccctggcgcaaatgaccagcaaggccatcgagctgctgaaggacaatccgaacggcttcttcctgcaggtcgagggcgcgtccatcgacaagcaggaccacgccgcgaatccgtgcggccagatcggcgagaccgtcgacctcgacgaagccgtgcagaaggccctggccttcgccaaggccgatggcgagaccctggtgatcgtcaccgccgaccacgcccactccagccagatcatcccgccggaaaccgccgcgccggggctgacccaactgctcacgaccaaggacggcgcgccgctggcgatcagctacggcaactccgaggaaggctcccaggagcacaccggcacccagttgcgcatcgccgcctacggcccgcaggccgccaatgtcaccggcctgaccgaccagaccgacctgttcttcaccatccgtcgcgcactgaacctgcgcgactga

SEQ ID NO: 338914 - DNA, 3981 bp, Pseudomonas aeruginosa
atgaccgaccagactccttcccttgaccaactcgtccggcgcctcgaccaggcccagatcagcgaccgccaccgcttgcgccggcagctccacgaactgcgcaagcagcccgacgacgcgcgcctggcgcagtgggtcgagcgcttccaggcctcctgcgccaaggtcgaggcgcggcgcgccagcgtgccggcgatccgctacgacgacagcctgccgatcgccgccaagcgcgacgagatcaaggccgctatcgccgcccaccaggtggtggtgatcgccggcgagaccggctcgggcaagaccacccagttgccgaagatctgtctggagctgggtcgcggcatccacggcctgatcggccatacccagccgcgtcggctggcggcgcgcagcgtggcgacgcgggtcgcggaagagattggtacgccgctgggcgcgctggtcggctaccaggtgcgcttcgaggaccagagcgacgacagcaccctggtcaagctgatgaccgacggcatcctcctggccgagacccagcacgaccgctacctggagcgctacgacacgctgatcgtcgacgaagcccacgagcgcagcctgaacatcgacttcctcctcggctacctgaagaccctgttgcaccggcgtccggacctgaagctgatcatcacctcggcgaccatcgacctggagcgtttctcccggcatttcgacggcgccccggtgatcgaggtttccggccgcacctatccggtggagacctggtaccggccgctggcggcggaaaccgacgaggagggcaaccgggtcgaggacgacctgtcggtggaccagggcatcctcgccgccctcgacgagatcgccgcccacgaacgcgaggtcggcaagcggcccggcgacgtgctggtgttcctccccggcgagcgggagatccgcgacgccgcggagatgctgcgcaaggccaacctgcgccacaccgaggtgctgccgctgtacgcacgactgaccccggccgagcagcagaagatcttccagccgcgcccgggacgcaagatcgtgctgtccaccaacgtcgcggaaacctcgctgacggtgccgggcatccgttacgtgatcgacagcggcaccgcgcggatcagccgctacagctaccgcgccaaggtccagcggctgcccatcgaggcggtgtcgcaggccagcgccaaccagcgcaagggccgttgcggacgggtcgagccgggcatatgcgtgcgtctctacagcgaggaggacttcaacgcgcgtccggccttcaccgacccggaaatcctccgcaccaacctggccgcggtgatcctgcagatgctgcacctgcgcctcggcgacatcgaggcgttccccttcatcgagccgccggacggcaaggcgatcaaggacggcttcacccttctgcaggaactgtcggcggtcaaccgcgaaggccagctgaccccgctggggcgccaactggcgcgcctgccgatcgacccgaggctgggccgcatgctgctggaggcggcccagcagggtagcctcgaggaagtgttgacggtggccagcgcgctgtccgtgcaggacccgcgcgagcgtccggtggagcggcagcaggccgccgaccaggcgcacgcgcaatggaaggacccggattccgacttcgccgcgctgatcaatctctggcgtggcttcgaggagcagcgccaggcgctgggttccaatgccctgcgcagctggtgccggaagaacttcctcaactacctgcgcctgcgtgagtggcgcgacgcccaccgccaactgaccctgatctgccgcgaactgaagctgccgttcgggcgtccggccaaggccgaggcgcgcaagccggaggcgaagaaaggcgcgtcggccgacaacgaacgcgaggtaccggggatcgattacgcggcggtccacaaagcgatcctgtccggcctgctcagccagatcgggcagaaggccgaggaaggcgactacctcggcgctcgccagcgacgtttctggatccatccgtccagcggcatcgctcgcaagcgcccgcaatggatcatggccgcggaactggtggagaccaccaagctgttcgcccgaatggtcgcgaagatcgagccggactggctggagccgctggctgggcacctgatcaagaccaaccacttcgagccgcactgggagaagcgtcgcggccaggtggtggcgttcgagcaggtcaccctctacggcctcatcgtcatcggtcgacgtccggtgcactacggtccgatcgacccgccggtggcgcgcgagctgttcatccgcgaaggcctggtgcgcggcgagatcaacagccgcgccaagtgcctgagcgccaaccggcagttgctggaaaagctcgacgagctggaagccaaggcacgccggcgcgacatcctggccgacgaggaaaccctgttcgcctattacgacgcgcgcctgccggcggatatctaccagaccgccagtttcgagaaatggtacgcccgcgagcggcagaaccagccggacctgctgctgatgcgcgaggaagacgtgctggcccgcgaagccagcgaagtcactgcggcgcagtacccggatcgcctgcgcctgggcgatctgcacctgtcgctgagctaccagttcgagcccggcaccgcgcgcgacggcgtcaccgtgcgggtaccggcgccgctgctgccgcaattgccggccgaacgcatcgactggctggtgcccggcctgctctacgacaaggcggtggcgttggtgcgcaacctgccgaaggcgatccgcaagagcttcgtgccggtaccggacttcgtccgcgccgccctggagcgcatcaccttcggcgaaggttcgctgccgcaggtgctgggccgcgagcttcagcgcatgaccggcgtgcgggtagccgacgaggcctgggccgaggcggcgacgcagttggacgatcacctgcggatgaacattgaggtggtcgacgcccagggcaagttcctcggcgagggccgcgacctggccgaactcaccgcgcgtttcgccgaagccagccaggcggcgctggcgataccccaggccgacaaggaacagcagcgtccggtggaggccaaggccttcgccagcgtcgccgagaaggcccagcagaaggtcgccggattgtcgatgacggtatacccggcgctggtggaggagcagggcgaggtcaaggaagggcgcttcccgacccaggccgaggccgactaccaacaccgccgcgccctgcaacgactgctgttgcagcaactggccgagccggccaagtacctgcgcgccaagctgccggggcagaccgagatgggcctgctgtaccgcgagctgggacgggtcgaggcgctggtcgaggacatcctcctggccagtctcgacagttgcgtgctgcagggcgaaagcctgccgcgcgacggcgccgccctggccgcgctggccgagcgcaagcgcgctgcctggaacgagcacgccgagcgcctggcacgcctggtgctggatatcctcaagctctggcacggcctgcagaagcgcttcaagggcaaggtcgagctggccatgaccgtgccgctgaacgacgtcaagggccaactggccaacctggtgtatccggggttcgtccgcgccaccccgctggagtggttgaaggagtatccgcgttacctcaaggccatcgagcagcgcctggacaaggtcgccggccaggtccagcgcgaccgggtgtggagcggcgagctgggcgaactctgggcgcaataccaggcgcgcctcgccaagcacgcccaggaaggcaagcgcgacgccgagttgcaggtgtatcgctggatgctggaggagtaccgggtctcgctgttcgcccagcaactgggaacccggctgccggtctcggacaagcgcctggccaagcagtggagccaggtcgagggctag

SEQ ID NO: 338915 - DNA, 210 bp, Pseudomonas aeruginosa; identical to SEQ ID NO: 319449

SEQ ID NO: 338916 - DNA, 1689 bp, Pseudomonas aeruginosa
atgatcgaaaacttctggaaggacaagtacccagcgggtattgctgccgagatcaatcccgaccagtacccgaacatcctgtcggtactgaaggagtcctgccaacgttttgccaccaagcccgcgttcaccaacctgggcaagaccctgacctacggcgagctgtacaagctgtccggcgacttcgccgcctacctgcagcagcacaccgatctcaagcccggcgaccgcatcgccgtccagttgcccaacgtcctgcaatacccgatcgtggtcttcggcgccatgcgcgccggcctcatcgtggtcaacaccaacccgctgtacaccgcgcgcgaactggaacaccagttcaacgactccggcgccaaggcggtggtctgcctggccaacatggcccacctggtcgagggcgtactgccgaagaccggcgtcaagcaggtgatcgtcaccgaagtcggcgacatcctgccgccgctgaagcgcttcatcgtcaacttcgtggtcaagcacatcaagaagatggtgccggcctacagcctgccgcaagccaccaagctgaccgacgcgctggccaggggcgccggcaagtcgttccaggaagccgcgccgcaggccgacgacgtcgccgtgctgcaatacaccggcggcaccaccggggtcgccaagggcgccatgctgacccaccgcaacctggtggccaacatgttgcagtgcaaggcgctgatgggcgccaacctcaacgagggctgcgagatcctcatcgcgccgctgccgctgtaccacatctatgccttcaccttccattgcatggcgatgatgctcaccggcaaccacaacatcctgatcaccaaccctcgcgacctgccgtcgatgctcaaggacctcggccagtggaagttcaccggcttcgtcggcctgaacaccctgttcgtcgccctgtgcaacaacgaaaccttccgcaagctggacttctccgcgctgaagctgaccctctccggcggcatggcgctgcaactggccaccgcggagcgctggaaggaagtcaccggctgcgccatctgcgaaggctacggcatgaccgagaccgcgccggtggtatcggtcaacccgttccagaacatccaggtcggcaccatcggtatcccggtgccctcgaccctgtgcaaggtgattggcgacgacggccaggaagtgcccctgggcgagcgcggcgaactctgcgtgaagggtccgcaggtgatgaagggctactggcagcgccaggaggccaccgacgatatcctcgacgccgatggttggctgaagaccggcgatatcgccatcatccaggaagacggctacatgcgcatcgtcgaccggaagaaggacatgatcctggtctccggcttcaatgtgtatccgaacgaactggaagacgtgctggcgaccctgccgggcgtcctgcagtgtgccgcgatcggcatccccgacgagaagtccggcgagtcgatcaaggtcttcgtggtggtcaagccgggggcgaccctgaccaaggaacaggtcatgcagcacatgcatgacaacctgaccggctacaagcggccgaaggccgtggagttccgcgacagcctgccgaccaccaacgtcggcaagatcctgcgccgcgaactgcgcgacgaagagctgaagaaagcgggccagaagtaa

SEQ ID NO: 338917 - DNA, 1689 bp, Pseudomonas aeruginosa
atgcaacctgaattctggaacgacaaacgcccggccggcgtacccgacagtctcgacttcggcgcctaccgttccgtggtcgaggtcttcgagcgctcctgcaagaaattcgccgaccgcccggccttcagcaatctcggcgtgacgctcagctacgccgaactcgatcgtctgtccgccgccttcgccgcctacctgcagaaacagaccgatctccagcccggcgaccgcatcgcggtgcagatgcccaatgtcctgcaatatcccatcgcggtgttcggcgccttgcgcgcggggctggtggtggtcaacaccaatccgctgtacaccgcccgcgaaatgcgccaccagttcaaggacgccggcgtgcgtgcgctggtctacctgaacgtgttcggcaagctggtcgaggaagtgctcccggatacgcggatcgagtacctgatcgaggcgcgcatgggcgacctgttgccggcgctgaagggttggctggtgaacagcgtggtgaagtcggtgaagaagatggtccccgattatcgcttgccccaggcgctgccgttcaggcaggccttgaagcaaggccagggccatgccctgcagccggtcagggtcggcctggaggatgtcgccgtgttgcagtacaccggcggcaccaccggggtctcgaagggggcgatgctcacccacggcaacctggtggcgaacatgctgcaggtccacgcccagctttcccagctcggcaaggatggcctgccgctgatgaaggagacgcaggaggtgatgatcgcgccgctgccgctctaccacatctatgccttcaccgcgaactgcatgtgcatgatggtcagcggcaaccataacgtgctgatcaccaacccgcgcgacatccccggtttcgtcaaggaactgaagaagtggcgtttctccgcgctgctcggcctcaacaccctgttcgtcgcgctgatggagcaccccgggttcaaggacgtcgatttctccaacctgaagctcaccaactccggcggcaccgcactggtcagcgccaccgccgagcgctggaagggcgtcaccggctgcaccgtggtggaaggctatggcctcaccgaatgctcgccggtggtgaccaccaacccctacggcgagcaggcacgcctgggtacggtggggataccggtcgtgggcacggcgctcaaggtgatcgacgagcagggcaacgagctgcctgtcggcgaacgtggcgaactctgcgtgaaaggtccgcaagtgatgaaggggtactggcagcgtcccgaggccaccgaggagattctcgatgccgaaggctggctgaagaccggcgacatcgcggtgatcgacgaggacggcttcgtgcgcatcgtcgatcgaaagaaggacctgatcctggtctccggcttcaatgtctaccccaacgagatcgaagacgtggtgatggcccatccgaaggtggccagttgcgcggcggtgggcattcccgacgagaagtccggcgaggcggtgaagctgttcgtggtggcccgcgaccccagcctgtcggtcgaggaactcaaggcctactgcaaggaaaacctcaccggatacaaaattccgcgacagattgtgctcaaggatgcattaccgatgacgcctgtgggtaaaatcctccgtcgtgagctgcgcgaaatcgcctga

SEQ ID NO: 338918 - DNA, 951 bp, Pseudomonas aeruginosa
atgcccgccgctgcctactggctccccgccagcgacgaaaccccgctgtacacccgccactggccgagcgcaacggccgtcggcgcggtgatgctgtcccacggcatggccgagcacgccggtcgctacgagcgtctcgccgccgcgctgaacgctgccggctaccacttctatgcgatcgaccagcgcggccacggccggaccgccgaagccgacgagctgggccacttcgccgaccagggcggctggggcaaggtggtcggcgacctggccagcctgaaccaccatatccgccagcagcacccggaactgccgatcttcctgctgggccacagcatgggcagctacatctccatggcctacctgctgcaccacagctgcagcctgcaaggggcgatcctttccggctccaactaccagccgcaagcgctctaccggatcgcccgcctgatcgcccgcttcgagcgctggcgccaggggccgctgggcaagagcgcgctgatcgacttcctctcgttcggctcgttcaacaaggcgttcaagcccaatcgcacggccttcgactggctcagtcgcgatccgcaggaagtcgacaggtacgtggccgacccgctgtgcggcttccgctgcagcaaccagttgtgggtggacctgctcggcggcctggccgatatcaccccgcccacccacctgcggcagatcgatgccgacctgccgctgctggtcatcggcggcgaacgcgacccggtcagccagggcaagcgcctgggcgacctggccgacgccctgcgcggtgccgggctgcgccaggtgaccctgaagacctatcccgaggcccgtcacgagctgttcaacgagagcaaccgcgacgcggtcacccaagacctgatcgactggctggaacaggccctgcgccaccgccgggatcattcgacaaaggagagaacatga

SEQ ID NO: 338919 - DNA, 3237 bp, Pseudomonas aeruginosa
atgtccggcgaaacagctacggttttggtcaacataaatctgaaggggcggcagctagacttagtgctcgggacggatcgtctaactttggtccttgaagccaaagcctgtacggtgccgctcagcgggacgacaaatggcccatggaccgcgcatccccgttcagggcgttcgagagccacgggcaatgcctacgcccaggccttgggcgaaaaaaacgctctctgcgacgctctccgagactttttaggtagtgttgaaggatatccggatgctcatgtggtgttcgtccccgagctggctgcgggctcagagttgttgtttgacttcaaggtcacctatggcgggatagacgggctcgctatacaactggccaagcgcaccgagctccgctgcactaccgatcaatggcgcgcgtttgcaatccagcatagccttgagcaggtgttcgatctttccagcgctctggaccctcgctcgctcgaagcgcagcgaacacttgcaacgtatatcgccgctttcaccgctacgtatgcttcggcagcagctgagtacaagacggacctctacgacgtcgacggggagctcgtagatttgccatgtctcgagcatctgttgcaggaggctcgcacggaccttctaatccaaggtccttcaggctgcggtaagtcattgctgtcggtggtgttagcaaaccggttgtgcgctaaagatgtgataccgatcatcgtggagggaaagctatttgagggacagcttggcccggcgctggatcgtgaagcagctctactggacgtactatcagccaagaagctattggctgcagttcgtacgctatcgcgaccgattgccataatcgtggatgggtataacgagtgcccttccgacttgaggtttaaattgatccgggcgctccgcgccgcttcgatcaggtatgacgcagcgattgtcgtgagttcgcaaatcgagaccgacagggcggatttgcttccgcttcggaaggtcaccgtttccgctcccagccacgacctcaaggttgagatagcgtcccttgataccgcctccacggagttgctggctcctctgctacagacaatcgctaccggtattgaggccagccttgttggtcaaatggggcgcgaagtgaacctagtttctagcagatccgcactgtttgacggctttgttcggcggcgccttggttctaatgcaagcgagggcataacgctcttatgtcacgtcgccggactgctgttcgagcgcatgactttcagcttatccatacgcgagcttgaccgcatcctagttagagaacggcttggggctgaggtgctccaagaggcacttcggatgcggctgctgatccagcgaggagagcgcctaagtttcgtccatgaaatgtacctcaatgcctttgcggccgaggctatcctgcggcagtttggttccgacttcgacgctatgactcgggcgttggcgctaccccgattccatgaactgcggacatttgtggttggcgctatcgaggatatggagttgctcgctcgcttgctcagctcgaccacagatgcgcagttgctgaaggccatcataaaaggagaatgtggcagcgccgctaagaggttcgtggcccatgacttgaatgccgtaatgggccgattacgggttgaagttgaaacagtccgtttcttcatcgctcctgaccagcactggcatattggcgttgagcccgctagtcgcatgctctggacagagcatgaaagagcaatgctgtctgcattgcctgctgcattggcgctcggtcaatactcactggagttgctcgatgttttccgactgctcgataagcggctaatcgaggagcgagcacggcttcaaagtgaggcggttgagcagggcttcaagctgctgaggaccagcttatttgcagctgcctacgtattcggtcagcacgaccttggagtttcacttgtcatatcggctctccacggcgggggtttagagcgcttagccctacattctgagcggcaagcgcccctgagagacgtatggctcaatgtagctacgccaggacagttctactttgcgctggcgttgtcgcgtgatacctacaggctggagcgaagcattcttaacctggcgatcgaccaaacgctgccgctgttcgaaattgagcgctggaagtatctgccttatcacgttcaattagatctcatgcatttcgtgcactttcttccacgggatgacttgacccagcaagaaaagctgtcgaaggcactcgaaagcctgctccccgtgctaaatccgattctgcaaaccactgccctcgaagccctcagcagtttgggagcgctggatgacgaggttaaggggcacgagacacagattcgactacaagttgccgaggtcctcgttgaccctggtgcggagggtgcggcggaaatcgcctgggagatctatagcgggcaattcgatcaccccttcgacatggcctacatcaacgttgtcgacaacctttcaaacgagcagcaactgacactgatgcgattggcctgcatgggagcgtccgagtacagtttctttgtggggtcgctaatggacaagcttgctggtgaaggtgatgccctcgcggttccggcgatctcgcgctgggcacgcttgccagatccgaccagtccagtacgtcagaacgcagttgaaatctatatttccgcgctgatggccttggggaaacttcaatcagatctaccggtggagtcgtgcccaatggggctcggcccccgtgaagatgcgatgtccgcatgcgggatgatctactactggctgcagcggcgtacctttgaagcagcagaggcggaaccgccagttatggctgctctggaggctctttctgccgatccatcgcgcgcgattggtgtgctatgcgagatctcccagtcgatcattggccatgacccgcgcggcacgttgttggttacagcctttcccgcccgtatggtcatgcttgctcgcgtagccctccagcaaggaggccctatggaaggatacttttccggcccgcacttcttcgagcgcagagatgccgagcgatttgcgatctccatgattggttcttacgggggggcagacgacttgccgctgcttcgtacttttgtagatcaagtggaactctcatggaatgctcgcaacgcccttgcggcgatcgaagcaagagcttcaaccgttgcacagcggtag

SEQ ID NO: 338920 - DNA, 1278 bp, Pseudomonas aeruginosa
atgactcaacaagagagccccctcccagaagaacaacgcacagattatttcgagagaattccggtctggagaactggtgaaaagtgctttgaagtcatggcggacgagcgcagcggtcgtatcccggtaacacgcttggagtcttggcgaaattacactgagctactagagagcccattctttaatcgttttggcgtacaactgatttttcgtgggcaacgccgctctgattggagccttatgcctacattaggtcgcctatctgccaatgggatagttaccaagaatttggctgaagcccagcttgaacgcttcaagagagcgattcgtgggcgactaagcgacaacagtcttgtagatgaaaatgacgagctttggtccattggtcagcatcacgggctgatgacgcctttgttggactggacatactctccttatgttgctttgttttttgcttttgcaaaggccgacagcaaggatgaagaggaaaacccctaccgggttgtctatgtgcttaacaaaagttttattctagaaaatgagggcgaaacaggcatccgactttgggagccgcgcaaggatagctatgggagattggttaatcaggccggactgttcaccttctcccctgacgatgccacgatagaaaacaagctggcgaatgttttagccgacgacaaggcttttgaggatgaggagctgcgctctgcagcagaagaggatcagcccgatttattggctagatacatctgcaagatctatatccgtaacgaagaacgtgatgtttgcttgcgccatctgcggcggatgaacgtgcatcatgccagcctctttcctgatctcatcggcgcgtctgattattgcaatatcgcaaccgccgaagcggaggaagaggccagccttgcacaggcagcaaagcgtgagcgctcgatggctactcaagttgttcaagtgccttctgttccatctgtgggcgttgtggaggctcccatcattgattcggagcaaatgtctttcagcattgaggccatcttgcgtgctcatcctgacgcgcagcaagtggaaccagggcgtatcgcgttgattgccagcgagctgtcccgcgatatttccaaacaccaggttgtagattgggacaagcgcgaagacgctcaggctcgaatgcgtaacgttatccgagtcacgttgcgaaagaatggctatccatcgcaactacgtgatgaagtggtcgaacaaatcatggatgcggtgaagcagcagacaggggaggtgagatga

SEQ ID NO: 338921 - DNA, 1383 bp, Pseudomonas aeruginosa
atgacggctactgaatcgcagcatcctaaaaaatcccctcatattaccggcccacttggtgactttgtggagttcaggaacggcaggagctctcccgttcgcactgactctggaattttccccgtttacggttcaaacggggaaattgggaaagctgaaataaccaatgccctcgaagggacggtgatcgtggggcgcgtaggatcttactgtggctctgttcattattcttcgagtaagtgctgggtcactgataacgcaattgttggtcgaagcaagagtcagaaagattcaagattctggttttataagcttgcatcgcttgatctcaacaactatagggcgggctcagggcagccactacttaatcaacagatactaaacagcattcaggtatcagttccagctagtgaagatgaccgatatcaaatcgcaaaaacactagctttattcgatgacaaaatcgacctcaaccgccgcatcaaccaaacccttgaagccatggcgcaagccatcttcaaatcctggtttgtcgatttcgacccggtcaaagccaagattgccgccatcgaacaaggccaagacccgctacgcgccgccatgcgcgcaatcagcggcaaaaccgatgccgaactcgaccagatgccccgcgagcaccacgaccaactcaccgccaccgccgcgctgtttcccgatgccatggaagagtcggagttgggagaaactccaaagggatggagccttgttccctttggttcattgctttcgtacaccattggcggcgattgggggacagaagcaacggatactgtgaacgacacgcgtgttgccatcattcgcggaactgacatccccgacttagatcaagcccaattaagccgagtacccattcgatatacgaatcagaagaagctcgccacacggcgcctacaggttggcgatattgttttggaggtttcaggtggcagcaaagatcagcctacaggtagatcattttatatgactgccaacgcgctgcgggagtttgactgtccagtcgagcctgccagcttttgccgacttttgaggcctgtcagccttgaggttggtgtagtgcttagtttgcatctgtcctacatctatcaacaaggaaagacttgggagtatcagaatcagagtaccggaattgccaattttcaaacgtcccatttccttgaggccgagctggtagttgcccccccgaattcggtcttagaagtcttctgtggaatggttagtccgattctggagcggaggcatgatgcacaagggcggaaactggctctaacgcgtgacacgcttctccccaaacttatgtctggagaactttctgtttcgtgcccacttaatgaggatgctcaatga

SEQ ID NO: 338922 - DNA, 2631 bp, Pseudomonas aeruginosa
atgcctgatgagtacttgccattactggtttttcctgaaaagcgaattctccagccagaaaagggcaacggttttcctccgggaaaacagaatttgcccggccatggtgcccaggtagcccgtattggaagacagatcgaacatctggaagaagacttcgcacgctatcaggccagcctgactggtgctctggccgggctcgaacctgaaatggtcctggtcatcgagatcgttggacgtctggacgacttccgacaagccgttgaagcggctggcttggaatggctaggggagacggaaatcgacgacctggaggctgaggatgatggcttccatgagcgagatgctgccggtcaacctgcggttaagccgctgagcggtcgcatgtttctggccatgagcaacatggggggcttgcaagagattctcgcgctttgggagcaatggaaagccaatagaagcctgccccacggaaaaacaaagtggaaagccgttttcgagcaattgaacgtgctgaggcgctggggcattgaggagacattggtcgaaacaggcatgatcgaccgctggcaggacctgcttgaacccctcgaccccgaagagaaggtgagatttcagattgagcttttctaccgcaagagggttgaaaagcgtcgaaataatgaagtaacaattcgatcattgcttgaaggcctcggaggccaaacgctttcggagttccttgatatgcctcagatcgcattccatgcggtcaaggccgaattgcctgctcacgccattcagtcgctgctcgatcaagtagctgcggatgaagctgatatcgacatcgagttgttcaaattcgccggcatcatgtatttccgccctaccgggcaaagcctggcggtttctgaggagggcgagggagagccggctgcgttccccgaaagtgtcagtgacctccctcctgtcgcagcgctccttgatggcgctccattgcaattgcatgaagcgctgaaagaccgactgctggttgatgacacctttggcttggaggccacttatcaacctggagagcgcaagcatggcactgccatggcttccttgattcttcatggggatcgcagcaatcccgagtccgaaccgctaccgcacaaactgtattgcatcccggtgatgcagcctgaccatcagacacgcgaacatgatgaacatatgccggatgacgttttctttgaagaccgcatccatattgccgttcggcgcatgttcgaaggctctggcgacgtccccgcgcaagcgcctacggtcaaggtcatcaatctttccattggtgatacagcgcgggaatttatccatacgccgagtccttgggcacggttactcgactggttggcctaccgccaccgcgtgctgttctgcatcagcgcgggcaactactgcgacgagattaatatcggactcaatcaacagcagttcgccgctctttctgatggagagaagataagcgccaccgtcaaagcaatatcaaatagcttgacttcccggcgtctgctttcgccggcagaagcgatgaacgccattacggtaggagccgctcacgccgatgattctggagatgcatatccgcaatttggccagcgtgtcgatgtgctgccttcgcaaacactgttcagtcctgtcacccgtctgggctttggttttaaacgctccataaagcctgacatcctcatgcccggagggcggcaactctacaacgcccctgtgctagctagatctaccctgtacagcgtcgacaactccatcgtcggaccaggtcaaaaagttgcgctggacagcagacagcaaggcgttttgaacaacgaagccttctggcgtggcaccagcaatgcgacggcgctggccacacgaggtgcggtgcggctgtacgacatgctggacagactacgcaacgaggagggggaggatattcctgagacgttgatgtcggtgctgatgaaggcgctactggtacatggcgctaagcaagacgacgctggcaagcaacacatcgaacaagcgttgaaagacgcgcgcaactctcgtcagttcaagcaggtaatcacgcgctaccttggctatggagccgtggatatcgagcgtgtgctgacctgcactgcccagcgagcaaccgtcctaggctgtggagagatacgggaaaacgaggtgcatgagtatgcctttccgatccctcccggcttctcttcccaaaagatttggcggcggctggtagtgaccttagcttggctgacaccaatcaatccggaccaccgcaatcttcgagaagccaagctgacgctagagcccggagggggaaattggtccagtcagatccttaaactggatcgtcaagatggtgaccacaatcaggtggagcgtggcaccgtgcagcatgaagtgctggaaggcaagaagcagatccaggccttcgaggatggtgagaccttgcgcattcgcgtcacctgcaaaaaggacgcgaccgcacgccttgatgctgtcattccctacgggctcgctgtgactttggaagcgaaggaagacattccgatctaccagcaagtccgtgcccgtatcaagcagccggtgcgtattgcaccgggcgtagaccggtga

SEQ ID NO: 338923 - DNA, 1014 bp, Pseudomonas aeruginosa
atggcacaagctgataccttggtcgccctggtaaaagcagccagtagcggcgaccaaccttcttttcggaagtcgaccgaagccttgattcaagaagaacgtggcaaggggcaccgaatcctagccgaccgcctggaaaaggcattacgagcgccagcccatcagccgaccttattccagccttctgcagcagcgacgcgaccagcccaaactgggggcatagcgcagaaagatctgattgccgagttgacaccagagcgttcgctggaaagtttagtgcttaacgatagtattcgcgggcagttacgagaagttgtcgaagaacagcatcgtgctgagttgctgcatgctcacggcttaagcccaaggcatcgaatcctactagctggggcgccagggaacggtaaaacatcggttgctgaagcgttggcatttgagttgatggtgccgctgatcgttgtgcgctatgagtcgttgattggcagctacctgggcgaaacttctatccgcttgaaagccttgcttgactacgctcgaacacggcgctgcgtgttgttctttgacgagttcgaaacattgggcaaagagcgaggtgacactcatgaaacgggggagataaagcgtgtcgttagctctttgctgcttcaactcgacgatcttccagattatgtcgttgtcgttgctgctagcaatcacccagaacttttggatagggccgtttggcggcgctttcaggttcgactggaactccctcttcctacacgcgcacagttgaccgcgttcgtcgcctctatcagtgaacgcagcaaggtcaattttggcttggccaatgagactgtcgcaaaaagacttttaggcctcagtttttcagaggtggaagagttctgcttgggagtagtccggagagcggtactagatcagaaggtggatgacgccagaaccatcgtctcttccaggttggaacaatggaagaagcggttgaaacctgccaataaagaagtatcagacgaataa

SEQ ID NO: 338924 - DNA, 216 bp, Pseudomonas aeruginosa
gtgctgtcggacgacaaccgccacctgctgcgcctgatccatgacaaacaacccaagtccctgaccgaactggccgaactcagtggccgcaaagtgccgaacctgtcgcgcaccctgcggatgatgtcggattacgggctggtttcgctgcagcgcaatgttcgggatgttcagccgaccgcgctggcgacggagtttctggtggtgctggattga

SEQ ID NO: 338925 - DNA, 2052 bp, Pseudomonas aeruginosa
gtgatcgaactggatactcttgactcgaaagctgcggcagcctttgaaggatatatcgtccgcaaggatctggttaggacctttgccaggcaattcccggtgccgacctatgtggtcgagtttttgctaggtcgatactgcgccagcactgatcccgatgagatcgaagagggtatcgagattgtagagcgtcagctttcttcgcggaccgtcaaggccggcgaggaagagctgttcaaggcgcgcgcctacaaaaacggcacggtgaagttgattgatctcgttagtgcgcgcttcagtcagaaagacaacggttatctcgcaagcctgcctagcgtgcagctcacaaacgttcgcatcgcagacaagttagtggacgataacgagcgcctgctcacgggtggtttctatgcggaaatcacgctggagtatgaccccgcaatagcggaggagcgaggcaacccgtttggcgtgcaagatctgcgacccattcagctttcgaagcgcgacgtgctcgatacccttggcgaggcgcgaaagtctttcagtagtgaggagtggaaggattttctgctgagatctataggccttgagcctgagagactggatgcccgagctaaggatgcgctactgctccgcatggtcccgttcgttgagcggaactacaacctggttgagctggggccccgcggtacgggtaagagccatctgtttcagcaggtctccccctatgcgcatctaatctcaggtggcaaggcaaccatagccaagatgttcgtcaacaacgccagtggacagcgaggtttggtatgtcagtacgacgtggtctgctttgacgagatcagcggcatttccttcgactcgaaggaaggtatcaacatcatgaaaggttacatggagtctggtgaattcagccggggcaaggagagcatccgggctgatggttcgctggtctttgtgggaaatttcgatgtagacgttgagcaccagcagcgagtggggcatctgtttgggcccctccctcaggaaatgcgtgatgacaccgcctggatggatcggattcactgcttcctacctggctgggatgtgcccaagatgaatcgtgagctgaccactgatcatttcgggttagtgagcgacttcttctctgagtgcctgagccgtcttcgctacgagagtagggtcagtgcgctgcagaaccgagtccatctgggcggcgctttgagcggccgagataccaatgcggtgaacaagacggtgtccggacttctcaagctgctctatcccgattcatctcagacgatttcagatgaagaccttgagtgggcaacgcgccttgctcttgaggtgcgccgccgggtcaaagagcagcagaagcgtattggttctgctgagtttcgaaacacccacttcagctacttcattggtgatgacggtgtcgagaaatttgttgcgacccctgagctgcgtgctgataacgagattggggacgacccgctcgagcctggtcagatctggacaatcagtgagggtggggcagagatcgatgataacgcggggctttaccggattgaggtcaacgaagggccaggttctggagtgaagatcctcaacaatccagtgccgccagctttcaaagagtcggtccgctacgcagagcaaaacctgtacgctcgtgcctcacaactgattggagatcgcgatcctcgcgcgcatgagttcactgtgcagttacgtgcttttgacgccgccaagcgcggctccaagctcggtgtcgcggctttgattgcgatgtgtagcagtctgctgaagaagtctgttcggggcgggttgattgtagtgggcgagattaacctgggtgggtctatcgagcctgtgcttaacccagtgagcatcgccgagttggcggtagagaagggggctagtgccctattgatgccggtcacctgccggcgtcagctctatgacctgtctgatgacatggccactaagattgatatccagttctatcaggatgctagggacgcgtttttgaaggcgattgtggagtag

SEQ ID NO: 338926 - DNA, 2322 bp, Pseudomonas aeruginosa
atgaccgtacttgaggctttggctgcgagccttcgtgctgcagcgcagtacaacgccagttcccaggttgcacctacagcgatcctttggcctgacaaggatcgcgagtggttgcctgtgcttggtcaactccaaagcgcgcttccggagcttttttcgctcggatgctataagcccgatcaccggcaaggcccggccatatggctcaagtgtgtaatcgcagatgcgttgcctgagatttcccttccagttagccagaccccgatcatctatttgccaggggtaagccggcaggatttgagggcgatcgctgcatgccctgtggagctgcagcccttggccgagttgcagtatcggggcgtgctgtggagccaggtgaacgccaaggactggaccgtcaatgcgtttctgatttcgcgcactggtggcttggggttggatgttgcgcaggacgccaaaacccagacagcaatgctgcgtgcgcttgaaccattgctcgatactgacgtttcacaactccatgggcgccgactggaggccagtgacttcaaccagctactcagtaccgacagcgtacgagatgtgctgacgtggctcagtgacagcaaggctgtgcagaccagttgggcaggggcccgctgggatgcctttgtgggtatctgccatagcgagtttttggttcatcccgagaaagatggcgatctagtcgcggcagagaatctttgtgcccggttggggccctgggcacgcgtctgggaacggttcattgagaacactgctgccttttcaaggctgccgagtgtcttgatgcgctgccagccagatctggcagcggatgtctcgacctatccaagctacaaccagcagcaggaaaacgatctgctggcgcagctgcgttcgctttccacttgcggtagcaacgagctgcgtaaggggctcattgctcttgatgcccaccacggtgtgcgtcggtcatgggtatgggcggagatgggcttagcgcctattgcccagttgctcgagccgctggtgctgattgctaaaacagttggagatagtggtctttccggtaccactcccgaggaaatggccgagcattatcggagccattattgggtcgttgacgatgctcagctccgagccctggcgatggcccgagagccgtcaatgcaattgttggtgagggatattctcaacagcttatatacgccctggctgcacgagacggcgctgaacttccagcagctggtgagagctaaaggctacccggggagcgatggtgtcaatgaggctgttgccgcctatcagacctccagtgaggtcgttttctttgttgatggactgcgctatgacgtggcacagcgtttggcaattcgtctgcaaggtttaggtgaggttaggcaacggactaattgggctgcgctgccttcggtgacggctacggctaaagctgccgtgatgccgattcatcatcaggtaacggggcgcacaaccgatactgaattccagcccagcttgaaagctgaggacaagccgttgagcgctcattacttccgcaagttaatggacgaggacggttggcaagtcctgggggctgaggagaatggtgatcctcaaggattggcctgggtgcagaccggcaatatcgatgaagcaggccacacagacaatctgcgtctggcaggccggattgattctttgctgcaggatgtatacctacgcgttgaggagcttctgcaggccggctggcgaaaaatccgtatcgtcacggatcacggttggcttttgacgccacagccgatggctaaagtcgatctacccaaacaccttgcagaggtgcgctgggctcgctgtgctgaaatcaaaggcaccgtccagaccaatctgcccaccgtcaattggcgctggagtccagagcaaaccattgccgttgcacctggagccagtgccttccttgctgggcgtcattacgatcatggaggtttgagtctgcaggagtgtttgacgccgataatcgaggtgcttagcacggctgcgccgtcgttgaagctaagcgctgcggctatcacaaaggtgcagtggctgggcctgacgtgtcgcgtagaggtacaaagtacagccgctgatctgagtgtcgatctgcgcagtagccctgcggatccggcaagctcgcttgtgcgcgctaaaggccttaaggccggaaaatgcagcctgctggtggaagatgatgatcgggctggggaagcggtggtgttggtagtactggacagtgctgggaacgtgctcgccaagcaggcgaccttggttggagatgaagcgtga

SEQ ID NO: 338927 - DNA, 1674 bp, Pseudomonas aeruginosa
atgagcaaaaaaattagtggtgccgagtatccgctgtcaaaaatatttagctctgaattcgattatgtcatcccaccttatcagcgcccttatgcttggacaaaagatcaggcgggtgagctgtttgacgacctctatgatttttttaggaatgaggtcgaggacagctactttctgggatcgattgttcttatcaaggatgagggtaagcccgcagctgaggttattgacgggcagcagcgtttaacaaccctaacgattttgctgtcagcactgacgtcgctgttgtccggggacaatcattcctcgttctacagctttattcgtgagccgggcaatgtggcgttgaagctcaatcccaagcctcgtttggcactgcgtgagagggatcgcggcttttttgctcaatatgtgcaagcgcttaaatttgatgatcttatacagattgatcctgctcaacttgagaatgagtcgcagagaaatatacagggaaatgctcgtcttctaagagaccggcttcaggagaaatttcgaggtgatgaggccgctttggtggacttcggctcatttctgctgatgcgctgttttctggttaccgtcaccaccccaagtcaacagtcggccttcagggtcttctcggttttgaacaaccgaggcttggatcttctaccgacagacatcatcaaagcggaggtcatcggcaagcttccggaagacaagcgcgaagctttcaacgaacgctgggaagaccttgaggttgcgaccggccgcgatggctttaacgagctttttggtcatattcggatgatctatgcccgctttaaggctcggcgcatgctgcttgaggagttcaaggatcacgtgctgagccaggtgacgtcctctgaggccctggtcgatgaggtggttgcgccctacgcagaagcctatttgatcgccaaacagtgccagtacgtctcgacttcctcggcagaaaaaattaacgagctgttcacgtggctgaacagaattgacaactcagactggttacccgtggcgattgccttcctagcccgacaaggcaacgatgccgcggctgtgttggacttcatttctcggcttgaacgcctggcagccttcctgcacctgactgccaagaatgtgaaccagcgtatcgagcgctatgccctggtcatcgaggacatcctcaaaggggtttatgtcgaccgcgtggagctaacgcctgctgagtgcgctgagatgttgcaagcgctggatggtaacgtctacgagatgaccgcccgacgtcgaaactacttgatcctgcgcttggactcgttcgtctctgcgatggcggccaactacacgccgaatgtcctgacaatcgagcacatcctgcctcaaactgtcgatcctgctagcgagtgggcagccatttggccagacaccgttatgcggatgaaatggttgcatcgcttggcgaacctggtgcctctgacgcgtgccagaaattccaaggccttgaactatgactttgctaagaaaaagtccgcgtattttgccggtagtagtggcgtaacgccgtatgctttgacaagccaagtgttgcaccagcacgagtggacacctgaacaggttgaagctcgccagagggatcttttgaaagcgctttctgccagctggcgtttggcgtag

SEQ ID NO: 338928 - DNA, 783 bp, Pseudomonas aeruginosa
atgagtgaaagtgaatttcctgcttttcatggtgcgcgtcgtgcgatagtggtcttgaagaaaaatgatatccgccttgttagaaatgacccaacctttgaagaccgagagtttctttatgatgacgaggcattcgtacttgagtatccaccaaacgaggattatttaggccagtctaaagcattagagaatatcgtttattcagatctggtgcggccaggagcagttttggttcagagtccatatgagaaagattcatatgtcgagcttgagcgagctgctgaggtttttgcgattgagaaggttcaccatttctcaagattgtgccagctgttgggcgcgacctttgtcgagaccgagcaggttgagataaagcgagaaggagagtcttctatttatggagctaaaggtaatattggtcctgttaaaggtgacgttaagattactgcaactgctgatcaaagccttacacgtaaatttattgttaccacaacaatggacgggcgtgaggctgatatagatgctgcagaacgatttctaaggagtaagaaccttctgggcgatcgtatcatgcggagtcttattgagcagcgagctgattcgaccaatccgattcgtgaacagagggttacacttagtctttcgaacgaaaccaaaagtacccttggggtcgtcgggaagctaaatctgcctagtaaatttggtgtgtcagctgagtataagagcgttgctactcgaaatgaggagtactctctcactttgcttgtgaaattcgagtcgtga

SEQ ID NO: 338929 - DNA, 666 bp, Pseudomonas aeruginosa
atggcttggcaaatagtagcggcagcagtgggtgggctcgcagtcggagtttggggctgggttaaacgcgacaaagtcgttgcagcctgggactcattagtgattgctctgaggggaaagaaagtcactgttcttggtgcaagaggatcgggtaaaaccactctgttaactttcttgtctaaaggcgagttacccaaaggcaacgcgcaaacgacgtcagcaaagcgtgttgctgccaatcgtttaaagttaaaagatttgcagcttgatttgaaagaaactaaggaccttcctggtggtgaagcagccatacagcagtggaaagagctgcatgatgcatcagattttgttatctatttgattaaagcccatgaaatggatgtggggcgagtagagtatgaccttaaattgataaatgagtggcaggaaaaacataaaagcaaacccaggctgctagttgttgctactcacatggacctagataagggattcgttatgctcaaggagaatgagcaaggagatttccatgatcgatttgtcgggaagcttcagcgttgctttagtagcttcaagaccatgccaagtctctatctgggcggcttaaataatcagtcaaataccgaggatttggtgattaaagttattggctggatgcacaatgcctaa

SEQ ID NO: 338930 - DNA, 783 bp, Pseudomonas aeruginosa
atggagctctccgacgaagctcgcacctggatcgcgcgtagctctgcgctgaatgcgttagccgacgacgatggcatcgtctgcctctcgcctctgcgtggtgaaaaggcagcagcagatcgactggaaaatctgctgcacgcggcgttcggtacggattggactccccaacgtcgcaaccagctattggagcaggttggcgcccaaagtctcgatgtctggctgcgcgacaagttcttcgagcagcactgcaaacttttccatcaccgcccctttatctggcagatctgggatggcctcaaggacggctttagcgccttggtcaactaccacaagctcgatcgcaacaatctggaacggctgatctacacctacctggatacctggatcagcaaccagcagcgggcagcgagtgagaaggtggacggcgctgatgcccgcctggctgcagcacaggatctgaaagcccgcctggtgcgcatccttgaaggcgaagccccttacgacatcttcgtacgctggaagcctctggagcagcaacccattggctggaacccagacctcaacgacggtgtgcgcctcaacatccggcccttcatgactgctgaagtcctgcgtcacaacaagaagcccaaactcaacatcgagtggaaaaaggatcgcggcaacgatgtccccagtgccccctggtacaccctgggccttgagtacggcgaaaaagaaggcgcccgcatcaacgaccaccacctgaccttggccgagaaaaaattggctaagcgatag

SEQ ID NO: 338931 - DNA, 3465 bp, Pseudomonas aeruginosa
atgcttaaccgcgaaatctacctgaacgatccgctggaaaaccgcctggccaacaacggtgtcgccgaagtgaaggacgatctgtccgagcaggcgctcaacacccttcgttatgagctcaagacgttcgtctgtgaaggtgagtaccaggccggtatggacaagatcctgtccacctacctgcgcaacctgggcagcaatcatgagcagccgggtgtatggatcagcggcttctttggctcgggtaagtcgcacatggccaagatgctgcgcaccctgtgggtcgatcaggctttcccggacggccttaccgcgcgccatattgccaacctgccgcagaacgttgcagacgcattcaaagagctgagcattcagtcgcgtcgttatggcggtctgcatgctgcgtccggcacgctcggggcgggtgcgaacaacaacgtgcgcctcgcattgttgggcatcatcttcaagtcagcgggcctgccggagcagtaccaccaggctcgatttgttctttggttgagagagcaaggctacttcgatgctgttaagcaggcagtagaggacgccggcaaaccctgggagcgtgagctgagcaagctgtacgtttcgccactgattgccaatgccttgctcacggcctacccggacatggccagcgacgctcaaggcgtgcatcaactgctcaaaggccagttccccacggtcaccgatgtgaccaacgaccaaatggtccaggccatcgccgatgcgctggaccgcgaaggccaattcccgctgaccctggttgtactcgacgaagtccagcaatacgtgggcaacgatgtagaccgtgcgcacatgatccaggaggttgtcgaaacctgctgcaaacactccgcgttcggtaatcgcttgctgttcattgcgaccggccagaatgcgttgtccggtatgccgaacttgatgcgcctgatgggtcgtttccagattcctatcatgctcagcgataccgacgtggagtcggtcatccgtaaggtcatcctgcaaaaggtcgagaccgctcgtgctgggctgcaggcgcttctgaccaagcacctgggcgagatttctcgtcatctgcgcggcaccaaggtggagtaccaccaggatgacgagaaggtcatgctggccgactacccgctgttgcccgtgcgccgccgcttctgggagaaggtgctgcgtattgtcgataccaccggcactgtttcgcagctgcgtaaccagctcaaagtcatccatgaggccgccaaggccacggccgagaaagagctgggcaatatcgttcccggcgactttatctaccagcaaatcgcgcccaacctgctgcagaccggtgtcatttccaaggaggactacgagcgcattgccgagctgtctgctggagatgacgaccagcaactgcagtcgcgtctgctctcgctgattctgctgataggcaagctgccgacagactcgattgccgactgtggtgtacgcgccaccgccgacatgctggctgaccttctggtagataacctcaaccagggcaaagatgagctccgtgcgcgcattcccgttcaactggaggccatggccaagaatggtcaactgatggccatggagaccagtgctggtgtcgagtaccgtctgcaaacccaagaaagtgctcagtggtacgacaccttccgccagcaggaggccgacctgcgcggcaacatgcagcgtgtcgagaacttccggattgacctgctgcacaagcaaatcaagtccgaattggtcaaggtccgtgtcacccagggggcgtgcaaagagaaccgccaggttatcgcctgcttcgatgcagaggtgcccaaagatgccaaccagaaaatctatctctgggtacaggacggttggagcctgaacgaatcatccttccttgcagaggcgcgtaaagccaacccggatctgccgacgctgtacctctatatcccagcgcgcaaccgttccgagttgaacaacgccatcatccatcaagaagccgccgatgcgaccctaagcctgcggggtatgcctaataccgaagcgggaaaagatgcccgcaaggccatggaaactcgccagcgcgatgcgcagaagcaggtcgaccagctcctcaaggaaattctttcgggtgtgcaggtgctgcaagccggcggtgcggaagtagatggcaacagcattgccgagcggattcaaaccgctgcacaagcctctgtagtgcgcctgtaccgtgagttcgatatggccgatagcccgcattgggccaaggtctacgaccgtgcccgcaaggacggcggtcagaacgccctggaggccgttggttttagtggcgatacggaaaagcacccagtctgtgccaccctgctgcgctatatcggcgcctccaagaagggcaacgagattcgcgaccagtttgcagccgccccatacggctggcagcaggacaccatcgatggcgcgctgtttgcgttggtcgcggcgggtgtactgcgtgccaccgatgccagcggcaatgcgctgacggcgcaaagcctggagcgacagaaactcacccaaagcaccttccgtccggagacggtgacgatccgccccgtggacctgatcaagatccgtggcctgatcagctcgttgggtatcgactgtccgccaggtgaagagcaggcccgtttgcctgcactgatcaatctggcccgcgagctgcaccaagcggcaggcggtgaggcgccggcgccggcgcgcccggacgccagcttgattgatgagattgccaaggagagtggcaatacccagctcaagttggtgctggataacaaggatgccatcaagccactgctcgatgcctggcgcagcctgggcgagcagctgcgttctcgccgcagtgattgggacctgctgcaaaccctgctgcgcctcagcaaggggctggccttcggtgagaagctctgtggtgaagtggatgctatcaagagcaatcgcagcctattggccgagcccaacccgctcgagagcctgatcagcaccaccgtcagccagttgcgtgaggcgatcaaccaccacttccgcgccttccacgccgaataccaaaagcgccaggctgagctgacagcagacagtcactggcagcagctctctgctgcccagcagaatgagctgctggctcgccgcggcctggttgagcccgacgcgctgagcctcggtagtcgtgaagaagttatcgacagcctggaaaccaccagtctggagcagtggaccgatcgtaaagacagtctggccgccaagtttgaaagcgcccgccaggaagcggtcaaactgctgcaacccaaggttcagcatgtcagcttgcccaaacgcaccttcgaaaacgaagcgcagctacgccaatggttgaccgaaatcgaggctcagctgcttgccaagctggcggaaggccccgtgatggtctga

SEQ ID NO: 338932 - DNA, 546 bp, Pseudomonas aeruginosa
atgagtagtcgcctcaataagctcatcaaaaactacgctcgccatatcagcctgccttggcaagcgggcctggcagatgagcagcgcgttctgtttgccgtttatcacaaggaagacgagctcaagctgcgtgcgcgaatcgaagaattcaaagtagccacggaaagcgcaggccacccctggctggcgctggatatcaccaacgcatttcccgagtggatggccgcagaagagtaccgcgatgcctattttactgaccccagcgaccttatcggtaactaccccgatttcattcaggacctcctggatcgactggaacagcagctgggtgaccacgctaacgagaacaccctcgtagcgctgattggcagcggcaccttgtttggctttggctcagtcgcgggcttcgtcaaagccctctctgcgcatgtgcccggtaggctgctggtgctcttcccgggcgagtacatcgacaacacctatcgcttattggacgcccgtgacggctggggctaccacgccacgccgctgacggctgacaactga

SEQ ID NO: 338933 - DNA, 858 bp, Pseudomonas aeruginosa
atggcagctttgcagatcattccctccctcaacacccgttcagcgggtgctgtgagctgggaacccacaagtgatgccatgaccaatcagcagtctttgatcaatttcggcttcaagttcggcagaagcggagcgcatgactcccgcaccatgatgctgccggagttgcgcagccttttcgcttgtacgcggtccagcgatggccgcccgcagtatcgtgagcaaatcacggagctgaactgcctggacaaacccaccagtcgggcgcgcaaactgtcggctgagcacctggtcgatctctacggcctgtcgcccgatatcccgctgtttcgcgtttttcgccagctttgggatgtgcgcgcagaggcgcagccattgctcgcgcttcaactcgctgcagctcgtgatcctctgttccgtgtgtctgtaccgctgatgctggagctgcagcctggtgagcctctgcagcgagaacaaactgaggcggtgttggctgctcaagatcccaatcgtttcagtcccgcgtcgctcaagtcctatgcgcaaaacatcaacggcagctggactcaggccggatttctgcgtggccgtgtcaagaagagtagggcgcagccgcaggtgactgaggtgaacgtcgcctatgccctgttccaggcctatctcaacggtctgagcgggcagcgcctgttctccagtgagtggtgcaagctgctggattgccgagttgaacgcctgatagagcttgcacgtacggcatccttgcgggggctgatcacattcaaacaatcgggtgaggtcattgaagttgggttccccgacttcctcaccgccactgaaaaggcctggctccatgagtag

SEQ ID NO: 338934 - DNA, 528 bp, Pseudomonas aeruginosa
atggcgcttgccgagcacgtggcagccgttgggcaacgtatcaaagagctctctgaccgcagctactttgacttgccggggctgaatgcgcctgagatggtctttatgttcgtgcccatcgagtcggctttcgtcgaggcgctgaaggcggacgaaactctgttccagaaagccatcgagcagaacgtgctggtggcgacgccaaccacactgctgaccagcctgaacatcgtgcgccagctatggcgtttcgaggatcagaacaagcacaccgccgagttagccgagcgtgccggcaaggtctacgacaagctgcgggcagcatggacgccatcggccacagcctggacaaggcgcaggatgcctacaagaaagcctacgatcagctggtcagtggcaaggctaacctggtcaagcaagtcagtgatttccgtcagttgggcgtggcggttaaaggaggtctgggtcgaccgggcggatctggagctcaacctgatctcccagatgccagctgagcagcaggcgtga

SEQ ID NO: 338935 - DNA, 411 bp, Pseudomonas aeruginosa
atgctgctgaagcagttgaccatactgagcgcgagcggcgcttgcagcgctctgcacctcgaccagttgagcggattgatcgcggtattcggttcgcaaacgcccagcttcttgctgggcgaactcgacctgccgctgaagctgttcaacatgagccttttccgcccgcagaccagcactcagctcacggagttcatcgtctttctggtgagatgcagccatgtgctgctccagttgcgactgacagatctgcaagcctgtaatcgcttcacggcggcgcaatacctgccagtagactgcaacacccgccagcacaaccagcaacaaactgctgctaatcactatccacgacaacccaatcatgttcatgctcgagactccctctatccgccagcccaacgggcggcttga

SEQ ID NO: 338936 - DNA, 1176 bp, Pseudomonas aeruginosa
atgggcctggacaagaacatcgccagggtcgagaagctcgacgagcatacggtgaagttcaccctcaacgaggtcgacgcggccttcatccagaacctggcgatgcccttcccatcgatccagtccgccgaatacgccgcgcaactgctcaagcagggcaaggccagcgacatcaaccagaagccgatcggcaccggcccgttcgtgttcagccgctaccagaaggatgcgcagatccgcttcaagggcaacaaggactactggaagccggacgaggtgaaggtcgacaacctgatcttcgccatcaacaccgacgcctcggtgcgcgcgcagaagctcaaggccggcgagtgccagatcaccctcaacccacgccccgccgatctcaaggccctgcaggaagcggcgaacctgaaggtgccctcgcagccaggcttcaacctcggctacatcgcctacaacgtcacccacaagccgttcgacaagctggaagtacgccaggcgctggacatggcggtgaacaagaaggccatcatcgacgccgtctaccagggcgccggccagttggcgagcaacggcatgccaccgacccagtggtcctacgacgagaccatcaaggacgcgccctacgatccggccaaggccagggagctgctgaagaaggccggcgtcgccgaaggcaccgagatcaccctgtgggccatgccggtacaacgcccctacaaccccaacgccaagctgatggcggaaatgctgcagaacgattgggcgaagatcggtatcaaggcgaagatcgtcacctacgaatggggcgaatacatcaagcgcgccaagggcggcgagcatgacgccatgctgatcggctggagcggcgacaacggcgacccggacaactggctcggcaccctctacggctgcgacgcggtggacggcaacaacttctccaaatggtgcgacgccggctacgacaagctggtcaaggatgccaagcgcaccaccgaccagggcaagcgcaccgagctgtacaagcaggcccagcacatcctcaaggaacaggtgccgatcaccccgatcgcccactccaccgtgtaccagccgatgcgcaagacggtacacgacttcaggatcagccccttcggcctgaactcgttctacgaggtcagcgtcggcaagtag

SEQ ID NO: 338937 - DNA, 1884 bp, Pseudomonas aeruginosa
atgaacgccctgcccacatcgctgttgcagcgcctgctcgaacggccggcgccgttcgccttgctctaccgcccggaaagcaatggcccgggcctgctcgacgtgattcgcggcgagacgctcgaactgcacggcctggccgacctgccgctggacgagcccggcccgggcctgccgcgccatgacctgctggcgctgattccctaccggcagatcgccgagcgcggcttcgaggcgctcgacgacggcacgccgctgctggcgctgaaggtcctggagcaggaactgctgccgctggagcaggccctggcgctgctgccgaaccaggcgctggaactgagcgaggaaggtttcgacctcgacgacgaggcctacgccgaagtggtcgggcgggtcatcgccgacgagatcggtcgcggcgaaggcgccaacttcgtgatcaagcggcgcttccaggcgcgcatcgacggctacgccacggccagcgcgctgagtttcttccgccagttgctgctgcgcgagaagggcgcctactggaccttcatcgtccacaccggcgaacgcaccctggtcggcgcctcgcccgagcgacacatcagcgtgcgcgacggcctggcggtgatgaacccgatcagcggcacctaccgctacccgccggccgggccgaacctggccgaggtcatggaattcctcgacaaccgcaaggaagccgacgagctgtacatggtggtggacgaggaactgaagatgatggcgcggatctgcgaggacggcggccgggtgctcggtccctacctcaaggagatggcgcacctggcgcacaccgagtacttcatcgagggccagaccagccgcgacgtgcgcgaggtgctgcgcgagacgctgttcgccccgaccgtcaccggcagcccgctggaaagcgcctgccgggtgatccgccgctacgagccgcagggtcgcggctactacagcggggtggcggcgctgatcggcggcgacggccagggcgggcgcacgctggactcggcgatcctgatccgcaccgccgagatcgagggcgacggccgcctgcgcatcggcgtcggctcgaccatcgtgcgtcactccgatcccctgggcgaggcggcggaaagccgggccaaggcttccgggctgatcgccgcgctgaagagccaggcgccgcagcgcctgggctcgcacccgcacgtggtggcggcgctggccagccgcaacgcgccgatcgccgacttctggctgcgcggcgccagcgagcgccagcagttgcaggccgacctgtccggacgcgaggtgctgatcgtcgatgccgaggacaccttcacctcgatgatcgccaagcagctcaagtcgctgggcctgacggtgaccgtgcgcggcttccaggagccgtactcgttcgacggctacgacctggtgatcatgggccccggcccgggcaaccccaccgagatcggccagccgaagatcggccacctgcacctggccatccgttcgctgctcagcgagcgccggccgttcctcgccgtgtgcctgagccaccaggtgctgagcctgtgcctgggcctggacctgcaacgccggcaggagcccaaccagggcgtgcagaaacagatcgacctgttcggcgcagccgagcgcgtcggcttctacaacaccttcgccgcgcgcgccctgcaggaccgcatcgagatccccgaggtcggcccgatcgagatcagccgcgaccgcgagaccggcgaggtccatgccctgcgcgggccgcgcttcgcctccatgcaattccaccccgaatcggtgctgacccgcgagggtccgcgcatcatcgccgacctgctgcgtcacgcgctggtcgagcggcggccctga

SEQ ID NO: 338938 - DNA, 837 bp, Pseudomonas aeruginosa
atgcacagatatgtcgtgatagacgccttcgccagcgaaccgctgcaaggcaacccggtggcggtgttcttcgactgcgacgacctcagcggcgagcgcatgcagcgcatggcgcgggagatgaacctgtcggagagtaccttcgtgctccgcccgcaacaggacggcgacgcgcgcatccgcatcttcaccccggtcaacgaactgccgttcgccggccacccgctgctgggcaccgccatcgccctgggcgccgagaccgacaaggacaggctgttcctggagaccaggatgggcaccgtgcccttcgccctggagcgccaggacggcaaggtggtggcctgcagcatgcagcagccgatccccacctgggagcacttcagccgaccggccgagctgctcgccgccctcggcctgaagggctcgacctttcccatcgaggtctaccgcaacggcccgcgccacgtcttcgtcggtctggagagcgtcgccgcgctgtccgcgctgcaccccgaccaccgcgcgctgtgcgacttcccggacttggcggtgaactgcttcgccggcgccgggcggcactggcgcagccgcatgttctcgccggcctacggcgtggtcgaggacgccgccaccggttccgccgccgggccgctggcgatccacctggcgcgccaccggcagatcccctacgggcagcagatcgagatcctccagggcgtcgagatcggccggccgtcgcgcatgtacgcccgcgccgagggcgccggcgagcgggtctcggcggtggaagtgtcgggcaacggcgcggccttcgccgaaggccgggcctacctgtga

SEQ ID NO: 338939 - DNA, 2649 bp, Pseudomonas aeruginosa
atgagtgcaagcgaagcagtcgaacttgccgataacgcgctgggcgtcattcaggaaatcgagaaccgcgcctccgaaaaattggccaaccggggcagcgatgctacgggcgccttagctgcaatcaacacatttaacggttccacggttgttgatcgcatcgccgctatcaccgacagcgtgacccagtcgcttcttaatctggttcgcgaaccagccatttcccgcgtcaccgttgagagggacgatggtgaaatagatacctactatatctgtcgtacaacaggaatctcgctgaacggggcgaaactcgcaagctatcgaactgatcttggtcgtctggcctcccgcgacgccggtgatgaagtagaagttcagatcggtgacacgcgggttgtactgcgcgttcttgaaaacctggagctgaaacccaacaagattgatggtcagtgggactctgtcgggggaatgtggcgacgcgaggatgaactgccccaaaccatcccatcgctacgcaagctgatcgctcctcatgatcaggacgattttgcggcaatgctggctgggaacactgatgacgaacaaaaactcgtcgaaggtctaaggcaccagattcgcagcgccatggcgctgcgtgaccaagcggtcctggataaattccaggacgatatcttccgcttaccgattgatcgtcaattgatcattctcggccccccgggcaccggtaagaccaccacgttgattaagcgcctaggccagaagcttgattgggaggctttggacgagcacgaacgttctttgctggatgcagccctttaccgctcacgctgggtgatgttcaccccatcggagcttctcaagcattacgttaaggaagccttcagccgggagaacgtcccggcttccgacgaacacattaagacctgggctaaacgccggcatgaactggcgagatcagtgttcggcatcctgaaaaccaacactggcggaacgttcatcctcaaggaagaccgacatcattgcggtgcggagaccatcgacgacccttgcaactggttcgacgcggttaaaacatttcatcgccaccggattatcaaagacttgcaggaaggagcggttctacttcgtgactcggctccagagcatactcgaccaattgtcgaccaagtgctgcatgcggtccctgacatagaatcaggccagttgctcgaggcctatgccgcctggaatagcttggaagatcgagtcgagccactgcttaaggcaagccgtgagaagacagacaaactgatcagagaacaaggcaaccttctctacaacaagaataaaaaagtattttctgaactcgccagctttttggatacgctcggacaaagcgacgacgaagatgatgacggcgcagagtttgatgacgatagcggcgaagaaactgcacagccttcgcataatgaggtgcagaaagcgttcttggcattccaacgtttcctacaaagctatgcacgcagccgctaccgcggacgtagcctgggcaagaccagccgagctgcacgcattcgggactggctcgacgagcgcgtgccctcagatgaatggctaaagagcctgggcggcgagatgaccttccagaatgcgctacgccgtttccgcaatgcctggaaacgctacgttttggacgttccgaccagctatcgagggtttcgccgtcagtgccttcttgatcagacttacggatatcaacgccctgaaagccctacccacatcgacactacagaactcgacgcagttctccttctgatgctcagctcggcccgagatttgatccaacagggcttcgtgaagcgccaactcgatcaacctaggtttagcgaactactcagaatctcgaaccaattccagtaccaggtactggtcgatgaagcgaccgacttttcagcgcttcagctcgcctgcatggaaagccttagcgaccctcgcacgaggtcgttctttgcttgcggagacttcaaccagcggatcaccggcaacggcctgcgaaatcttgagcaattgaaatggatatctgatcgcctgaggtatcagcgcatcaacacggtatatcgacaaagccgactgttgaacgcattcgccatcgagctgcttagcctgatgggtggcgaccttgaggctactggcagcctgccagagcattcaactcacaaaggagtcatgccggtcctggcagagaatcttgatagcaagtctatctacagctggctggcagatcgaattggtgagattgagcgacaggttcgtgaaatgccgagcattgccgtgttggtcccctcggaagaacatgtgaagccgatggctgaagccctaacggagcagctggagtctataaacctgcgtgcagtcgcgtgtgtcgatggccagaccttgggagacgagacggatgtccgtgtgttcgatatgcagcatatcaagggccttgagttcgaagcggtcttctttgtcggtgtcgacgaactcgccacgacgaagccagaactattcgagcgctacttgtatgttggcgcaacccgcgccgcaacatatctgggagtgacctgccatcatgccctgcccgcacgcttgaaagcgcttcaacagagctttgtcgaaagctggtaa

SEQ ID NO: 338940 - DNA, 1893 bp, Pseudomonas aeruginosa
gtggccgatgccgaacaggacggcggcgagcgtccgctgctgatgccaggcaagaagaccctgttccagcgcgtcctgaccaaacccggcgcggccatctccgccgaggctggcggcccgccccgggccggcgcggtgccggccttctcggtgctctacgtgtacgcccgcaagcaggtcggcggcagcccctggctgcgcgtcggcgcctccagcaacggcgagggcgacggctggctgccggccagcgcggtgagcgactggaagcagagcctggtgctgaagttcaccgaacgctccggccgcgcgccggtgatgttcctcaacagcgccgagcaggtcgagcgcctgctcggcgatacccgcgcagcgcgcgacaccctgacccaggcggtggatcacaagggcgatccgcaggtggtcgcggtcgagcccaacgaccgggcgatcccccaggaccagttctacctgctgccgatcttcgactcgaaggaaagcttcgacgccgacggccagccggcgcagttgctggaggtcgcctcgatcgaccccggcggcagcgccgcggcaccccaggcgccgggccaggccgggcagggcggcgccagcggcgcggcgagcgacaccttccgcaccggcatcgtcctggtggtggacacctcggtgtcgatgcagccctacatcgaccgcgtgcgcgaggtgatcgacggcctgcagcggcagatcggcgagcgcggcgacctggacaaggtcagcttcggcctggtcggtttccgcaacaacaccgacaagacccccggcctggaatacgtcagcaagaccctggtgccgctgcaaccgggcaacgacgcgcagcgcttcgccgagttgagtagccaggtgcgcgccaccgacgtctccagccactcgttcaacgaagacgccttcgccgggatcatgcaggcggtcgacgaaatggactggtcgccctacgccgggcgcgtggtgctgctggtcaccgacgccggcgcgctgcgcaagaacgacccgctcgggcgcacccagatgaacgaggccgaggtccgccaggcggcgctgcgcaagggcgtgaagatctatgccctgcacctgcgcaccccggccgggaagaacaaccacggctacgccgagcagcagtaccgcagcctcaccgccgacgccaacccgaagatcgccgacctctacatcccggtggccggcggcgaggtgaacgccttcggcaacacggtgaaggagatcggcacggtgttcgccgacctggtccacgacgccggcaaccgcaagccgcaggcgccgcgcttcgacgccgcgccaagcgtggcgagcaagtcggcggccatcggctacgccatgcagatggaattcctcggtcgccgcgacccggtgcgcgcgccgcaggtcgtcaccgcctggaccgccgaccgtgacctgaccaacccggcgctgccggcgttccaggtctgcgtgctgctgagcaagctgcaactcaacgaactgcaacagtcgctgaaactgatcgtcgacgcggccaagcgtacccagacctcgcccaaggacttcttccaggaaatcgccagcgccagcgcctacatgagccgcgacccggcgcaactggtgaagggcagcaacctggcacagagcggcgtgctcggcgaatacctggaaggcctgccgtaccgcagcaagtcgctgaacatgacccaggacctctggctgtcgctgagcgtcgccgaacagcaggacttcatcgacgaactggagtcgaagatccgcctctacgaaaccttccacaacgacgtcgccaactgggtccggttcggcgacgccgacgccggcgacgcgctgtaccgcgtgccgctgtcgacgctgccatga

SEQ ID NO: 338941 - DNA, 240 bp, Pseudomonas aeruginosa
atggtcgctgaggtcaagtgcctgagcgacgcatcgcaagctaagtgtttagaaggggattggtccgtacgagccgatatcgaaaggcttagctcctttaacacctcaactcgtttattcgtgctggtgattgctaaaggtgagcaggaaagcaataccggtaaacgtcttcgcactgatacgtgggtggaagggcgcgaatccatcaacctagatttggggcatgtagtggtctactga

SEQ ID NO: 338942 - DNA, 855 bp, Pseudomonas aeruginosa
atggctgttcagcgcccatctgtccctctttcagatctattgggaggaccagagctcaatcctcggcacgaaaactggctatggctccatctgaatagaaacggtgccgcgcttgacccaaacgagttcaaagggcacgccatgagagatcggatggctgagtacatcctgaaatccggtatgccgaaggagctaactcatgctgaaagaagcaggactctgcttcctgaagactgtctgcaatggatcacatcagacccaaggcagctaaattggctgaccatgaagattcagggcagtagcgtctttgcatacacctcccctccaccgcgcctgctcggccgtgaattcgttgttgccatgattgacctcgatgcgagcgatatcagtgcaaagaaagcagccctgcaaagcctcgaaagcgcttgggttagtcacagacagcaagaccacattttcaagtggttccaagacagcaagaatggccctcaacgctgcactctcgcctgggagcggctcaacaagaacagccccatactcactctcggtaaggtgccatttgaggactacaacggactactggatttcttcgaccaagcacctatgggcgaagctgataagaagctcttcgtcctagacatcaagaagcgctggagccaacagcgatacagggaaaaacaggtcggaaagaagcagtacaactttgtgctgtcagacaaagccaaccgacaccttgatagcctgaccaagacctatgatttgaagagaaaccaggttctggagatcctgattcaggtggaggcaaatgggggcagctacattgctgagcagttgaaggcactcagaagtctgtag

SEQ ID NO: 338943 - DNA, 198 bp, Pseudomonas aeruginosa
atgcgaattctcaggttaaaggacgtcatcgacactacaggtttgtcccgctcgaccatctacaagtacatcgccgagggtagattccctgcgccgattagcttgggcgacagatgctcgggttttctagagaacgaggtctttgattggattctggctcggatcgaagagcgcgatgagggcaagaacgctgcgtga

SEQ ID NO: 338944 - DNA, 1329 bp, Pseudomonas aeruginosa
atgctgaatgatctgcttgccggtggcgggcccatgcaggcgacgctgagtgacgtggcggcggatttggtggccatggtgtatcggactacgtcgagtacggtccgcaactactggccacaagtgattggtcgagagggcgacgttgcgggtctagcaactcaatcctatcccatgtgttgggccaggattgagttgcaactggatagcctactggatccgcgcggccttcaatcgctggcggaggccttgcagttcgcggcgcactttgaggcgcactaccgagaagatatgcatgcggcatgtcatcacttaagcccgaagcggttgcacgaccaggctgcggatgtctggtcgctggcgtcgcatcttgggattctgatggccatcgcaggggcagatgctaacgtgtgcgagtggctcgaccagggagccaagacgatcaaatcaatggccgatgccggcccgctcgtctatcagcagattgagtctttacatgccttattcaacctccaattgggtgatgcgctggatgcgctcgaaaccgacttcgtggagcgattggctgagaccgacgcaagtgttctggcatctaggctggatcggcgcttcgctgtgggctcctccatggcgaggagcgatctcaagcaagccctggccaagactcgagaggtcgtggtacgcacatacctgcgttgggcttctctacagaagaagcgatttaccgcgaaggatgtggaaggtgtaagtacccatatgcaggcggtcgtctcgaagacgcccgcggccttcttcgccaaagaagcagccggtatctgcacacgtacaaatactgctatgtggcaggagccgagaaatgctcatttactgatttttgctcctggggggaagcgcctggaagggatggccttactctatttcgagcgagttccggcactggatgaggatagggatacgttgatcatccgtgcgctcaacccaatgggcgacgccctggcgtcgcacggagtgtcctcgatcgtcgatggatatttcgatgttgccatacgtattgcccaagacaacgatttagctgctgtagctttcccctgtcctatggggatgcatctgatgtcaaatcatcaggccgtggagagcgacatcaaggagcgttttatgaggcctgcacagtcgcactggcgttggggtactaaggagcaagtgggacgttggtacgcacagccgcgcaaggtggcagcgagcttttacgcctatgaatcgggtgagacccttgtgaatgagctttatgcgttctggcatgccaatgaaaaggtacagcctacggtctga

SEQ ID NO: 338945 - DNA, 2778 bp, Pseudomonas aeruginosa
atgcagatcaggaatccaataactgagctacacgacacgaaactgtacggccacctactgtcactcgatcaggagtatgcagaccggatcacgacctttgtccgggaggtcgcgccactgatggcaacaatcaaggactacttcccgtattacacgcgtcatgacgcgcatcatggttatcaggtggtgagccggatggagcattgcctactcacctcatgctttaaccccacacagccggaagcattgaccgcgcaggagatcttcctgctgattgccgccgcatacgcgcatgaccttggcatgactgtctttccaggagaggagcaggccttggcgacaaagctgggccttcatcttgaatcaagctggctaaccaacgagagtcttcaacgctacctgaggcagaaccattcaagccgaggcggcgagtacatagacaagaatgctgagcagcttggcgtcccccgcaatcttgttgcggccctggaccttctgatgaaggcgcataactactccatcccccaactagaaggagagcttcaacgcccgttcgcggctggtcagaagggcagcaatctagctcagttagctgtgatcgtgtgtgttgccgatgccatcgagttcagccatacccgagttattgatggcgtccttgagcgtcttggcatggatgacagcatagctgcaagaatctcctatgccgaaaatatgaagcatatctgcacaggggatagccttgctgtaacccacgaaggacgcatcattgtgagtggcgccttcgcagatgcgaatgtgctggctcttgcgcatcgtactcttgaccagatggaagaatggattcaggggtacagcgatattgaccagcgctgccagcatcggaggttgaaagtaagaggggaaccctttcaacgtgatcttgtgttcagtggcggaaactttcagcgcctgggtgtccggctcaacaagcgtagcgtgatcgacctcattgcatccaatgcgatatggcgtactcatcaggggatcgcattgcgcgagctcgtacagaacgcagtggaggcctgtcgctatagggcgcatcactctgcgccgtcagacaaatatcagccagaagttcgtgttgtattcgatagggaacagcatgcggtaacggtcagtgacaacgggtgcggaatgtctgagcgcacggtcctcaacaatttgttgaccgtcggcagtagcagatcccgcgaggccgcctacacggaaagcgattatgcaccgatagcccggttcggcatcggcttctggtctgttttcacgatctcagacgtggccactgtagccaccgctgcttttgaagattacaggggcaggccaagcgaagcccagcatgcacgtggcttcgagttcgacgtgcaattgagcgaattgaaagacttcactgtctttgctccggtggagcggccttgcggcaccactgttaagttgaagctcaagcccgaggtgattattgatgatgtctacacggcactgaaagcacaattgctttgttcgatggtgccactggtactggtgctggatggggttgaagcacccctcggggccgacgtacccgatgtaaacgaggagatactgttcggtgtgcgtcgccgggctgcggagggtctcggaatcaaggtctttccgtataggggggcgacgccacgaatcgacctggctttcgggctggcgtaccgaattgagaatggccgggcgacgtttatggcggagccaggatgctccatgctcagcgtgataggcggtattcggacgcagctatcagctgtatgcggcttctcagtgccggtgcgcgtgacgcctctatgcatagacctaaaccgcgttggtctttatagcgccaatgctcggacgccgcagggcttcgagttctcaatagacaggcaacagctcaacagcaatgcagccgcgcagcaatatgtggctgatgcactgcaactctttcatgagggctatcgcgactttctcaaggaaacagactcgtaccgcccagagtccattcatgccttgcaggaagaggccgcttcgcacggtggcaatgtctatgacgtgtatacagggaccgagctggctaccgctaaaacaagctatccagacctcatttgcgccaagctcatcccggtcaatccgaacatcccgtttagtacggcggagggaaattccaggtttctggacctgaatgagctttccgatacaaatggcctgatcatctgtttgcaagcaacccgtgccccaatgcgatatgggtcatccatacacttgaacctggaggataggggggcacttgagattgcgtatgcgcttgcacaaaaaagcgcacaagagaacccgggcgagcctgtctatctcatgcagccggatcgaacattctcaatgctgttcgataactcctcatctgcaaaggcaagtgtgctgtccttaagggggcagttggatctttgtctactcactgttcgtctgggggaggtgaactatgaggagagacctgtcgacattgtttcaaacattagtggcccatgggctggggctatctactggcgggaatttcagacacctgataaaaagccctatctgttcctagggcgacaccgcgttttgatcaaccccggttccccgcttcaggtgcatctcaaatcccttgctgacgaaaagcgatttgcagctattgccactgtgatcagtctcttgaaggaggatgaggctggccacaagccgccgtcgttggcgaacattctttaa

SEQ ID NO: 338946 - DNA, 426 bp, Pseudomonas aeruginosa
ttgcgcttctttgcgcgcaaggtagtgaatggcggtccagtaagcttggggggcctcgaagagcacactcggaccggcgtcaacgagctctcggacttcagtcgtaacttcgtccccaagcacccagacctgttcatactcatttccgcggaggtgagctacggcgtccggcaaaagcccgtgcacaatatccatcagcccccagagcgatggattagggcgggcctgagcatcttcgatgggctttttgacctgcacaaagcggcgatgatcaccaccagcgtcgatccaccgcagatcaagatcgtcctctccctcaggacgaacagaggcattcggcccatggcgatcgaaatggtcgaacagcagatccaagataaccgtggcctgatagtcgaaaccgcggattgcgctaatcccacctga

SEQ ID NO: 338947 - DNA, 4506 bp, Pseudomonas aeruginosa
atgcagtgttatgtgcaagaggtaaagcggctgcatacccttctgccggggatactcgaacgcatcagcatccgggatgtaaatggatcagagatcgaggtggctgagcgggttatgcagcgcttggagcagcgctatggtttgctgcgaccgatcattgagcacacgctctttcgtaatctgcggggcttcatcaacgatattgccaagcagccagcgcggtcgttcgatcatgaagaattagagacggagctgcgttgcgtctggccgcagatggtccccatcaaggcaccgccgccgcttggggacgaccatgtaaggcggcctgcgctggcctccgacctcagcaattcatgggttggaacagctgtcgaggttgtcggaatatctggttctggcaaaacccggttggccgctgaagttctcgagcggtcactgctgacccatccggaccgtgttgccctttatgccgaagtacgtacaggcgttagcctgcgcgattgcctggttggtgcagcttttcacctcaggcgctggggggtatcgaagccctttgctgtggcgatccagcccgaccagactgacgagagtgtgcttgttgctcttgcgaaggccttctctgagttacccagtgagtgtctgcttctactagaccttgccgagggtggtgagccgccgggttttgcgcgggacctcgccgcgttcattcgtgtgcagctttcaaacacactgcgccttattgtttttggacaggagcgtgggcttcgggagctaacccctctggagcagatgcagtttggtgttcgtagcctggatgctcctggtctgagctttgaggagtttgtcgctctggtcggacaacgacacgctgagccggatcggtctcgactatgggggatttaccaacaagtaaccgccggccgtgcggcaggtttaaacgtcagtctggcacaagccttcgctcgggcccgaacaacagatgaaatggctgtgattgcagcccgccctgccgaggagcggctagcttatgcagagcgcagtcgattcagccgattggctgcaggctcactcgctgccgctgagagggttacttgtttcgcacttccgttccgacggattgacgctgaaagcgtcttcccgaatgagaatgtcggcctagcgattcacggtctcttagacttggggctgctacgtcggcatgatggtgatgctttcgaaatgcacgaaacagtgcgtgccggtcttgaggagatgatcgctccgcagactcgtcgggacgcccatagtgctttggctgcctggtatcgagatcagggccagacaggtgctgttatcctccacttggagcgggccggtcgaaatcaagaggctcaggcccaagcacgggaagctttcctggcgggaaagagctggggggcactctggccgtacgtagcccggcaccgactcatatccgcaaaagaggtgatcgtcgtccttgccggtcctgggcggattgggggcgattacctgctgcctgatattttcgaggagttgagggatccgcaggtcaccgaaacgctcatagacttcgttcgtgagcagtccgcgcgcctgttcgcggatcctcaatgggctctgcccatctttgaggccatcctggcggcgacaccgtcacgtctgaacgatctgattgaatttcttattcaggctgcaccagaagctgaggcatgtgcgagtgctttggcttggctctcaattgctgcgcgccgcaagaagagccaaatcgagccctccacgttacccgctcttgatcgtcaacctgaaacggtccagagagccttactagggctcctgctgcagggggggcgtgctgcaatgcggcatgcgcttagttacctcaagacgcatccggaattgatcgagacaagtcgtagcagcggttggcctacgattcgcttaggagttcgccatgccgaggatgttgctgacctactttcggccatcccgatggcatcacttcccgacatgattcgtactcgtggccccctgtttggccccttgggtggcttactctggcaagttcgtaaggagttgcgaggtccatgcatagctgtgctgcaggctcaagcgatggacagtgatgcccttgttaacgccatcaggatcctgctctacctaggtgagccgacaatattggacttgtgcgttccccttcataatcgggagggcgatgtgggtgcgctagcgagcctcatttcaatgatggttccggccctcacagactggctgccctatgaggcgagcgtgctggaccaggcagcagagttctcggtccgattacaagcactgattcatctggcttggtctggtcgtcaactcgacgatttgctcaatcgcctccaagcgagtgccccgtcagattggcctcgttggaacggtgccctcaggctccttactagtttgacgccgttcgctgccgcgatccccttgctggagaatgccttggcatctaaggatgataaagaggctgttcagattcctctcatcatcgcgcggcaagggcaagctcttggagctagtgcctcggctgtacttctccaggcactgagccatcgcagccctcaggttcgtcttagcgcggcgcttgcccttgctcgtcggcgtgatcgctctgccttgtcacggttgatcgaatgctataggcaagaggcggttccagaactccaagcaatccttgcgacctccgttcttgcttcgggggccaggtcagttgctgatctgaccggtcatatggagtctcctgcgatagatctgtggtggtgcatcctggcgcaccgtacccgagacatgtgtgcaggcaatcggcttgtttcaattgcaactgatcgccgccagttatggcaggttcggagggccgcgatcaccgctgcgggtagattgccatatgaggcagcacttgttcgtatcgaacccaaagtcatggcagagcagtcgccattcaccctggatcatcatcggagcctcctggctcactgtgtaatggcgcatatcgctcccctggcagcatgggatctggaacggtcttatcaaggtgatcgcgtgggattcgttagctgtttggcgtcttacttcgaagagagctggggtgggactctcgacccgaccggcttgccatctggggaggatgctgccggttggttatatgacatgcttgttcgcggagacgggcaagactgctctgcagtagatcagctcctcaattccctacatgtcccactgctgcaagcagcggtgttgcgctcgcttcgactatgtgggcggccagacaggatcgacgtacagctgggggcagctagtcatgtttggctagctttccgagccttgctggagcgttctaaattcgcagagcgtggtccagtgctgggacaaaggttgcacgctctcgtaggcggagcggaatgggcggatgacagggtggtgaaggattatctccatcggctcggagcatcaacagagatggatgcaggcgagcagcctgctgcagtttctgcacttgatcccaagaaaggggagggctcaccactgaatttccaggcggtggttcgccttctttctggtagtgccgttgatgctttacccgatgggcctatagttcttgagccgataacggctgaggagtgcgaaatcctcattggtttagctgatccgacaaaagatcttgagcggggggtaacagtctttacccctgcggtctcgttcaccaaggaggggcaccaagtcgctcagcgccaaactacttctaggggcgggccatccttaccggatcgtttacgtccggccattgtcgccgctaactgttccggccttccaattccgtggcacacgaagctacttgagggccctcttggcgaatcctatgcggccaagtttcttgagtgcttggcggcccaagacgacgctacacgtttctatgcggccctggctgaggcggaggaagtgttgatgccagtgctttgccaaaaagcctatggtctatcggctcagcttgtgattgatgtccgtctcgctcctgctttagctcgctttctgcatgctggtggtgatgatttctttgagggcctttgcatccttgctaaatgcatcgacgctcctgaaattcaacctatcttggagggcttgctccatcgttggactcagcgatttgacttacaagctggctccccaaaaaacgatgaggcttttctcctgtggcgtggctttgctcggctgagtgagcaccctcgtttcagtgcaattcctgactggccccaacagttggaggcggtactgaggacgcccatggcttggtatcactcccaatcgatcatgcgtgtgctggagcgggatccggggtcttatgttttggtcgagtcgcgcttgtttaaagaggccaattgggagcattaccgagaagacgaagttgaacggctcgaccgtgctgctgaggctctatttgggcgatttcaaaatgcatcggtacactga

SEQ ID NO: 338948 - DNA, 981 bp, Pseudomonas aeruginosa
atgaagtacagactgatatgggcagcactggtcttactgactgccagcctagcgcacgccgaggtcacctacctgccctgcgagttgttcagcaaggaaggaggactcaacaactacaactgcactccgggcaaaccagggaatggctcatcacgccttacggcccaaatggagcaagcgatctacacagatgggtatggccagcaacgcgttgccaccgtcccgaagtacatcggcgcaatctgcaaagacaatatctgcggcgtggttggtgcttacttcaagggcgagtttgtcggcaatgcgactcacggctactacatcattccgcgaggctggtatctaggagctgcgagcgatggcagtgcaatggtctatcaaaacggtacaggccctcgccacggccaagcagcgggagttgcaccgcagagaacaccgcaagctatcaagaagcagctttcccccgctgaactcaaagccgcaatccaagccgatcacaattacgacttcgacctggtgtacgccgccagactgagcacgagcaccaagactgcttatgtcggcgtgctgacctaccgaggacagagctatcagatccctgctgaggaggtgctcgactatgtgccgatctacaaccacacaggcgaacgctacgactggggcgatccgattttcaaagacggtagccactgcaatccaacaagcggtttttgtaaggatgccggtggcaatgccctaggtctcgtcgattacaaagtcgaggactacaggcgccagggcattctgccggccgcacctgcggcttcagtgggcgtcgaggtcagctcagtggccaaccagacggcagataatgctttgactggcgaaacctgctacgaccaaaagatggcagccttccgcaaagagaatggagaagaggccatgatcattcacgaccagatcgttgaatgggagcagcaatgcggcttgccgactgagtag

SEQ ID NO: 338949 - DNA, 321 bp, Pseudomonas aeruginosa
atgaaaaagatcacttacgaagaactgacttcgctgctccgcaacaaggagtcctttgaggtcgttggcctcagcggtcgcatgggcagcgctgtcaccaccatcgagaacaagattgagtcggccggcatgaagtgccgcatctacaccttcggccgcatcgccgctgccggcggcagcttcttcggtggcatcaccggtgtagtcggtttggcctctgccgtggggattgcggcccacaacctggccacgttcaacccggactacgaaattgccaagtaccccatcgataaccgcatcgtcgtgaagtacaagaaatag

SEQ ID NO: 338950 - DNA, 888 bp, Pseudomonas aeruginosa
atgctcaaagggctcgcgattactcccccggtgctcgggcggatttccattggcaaggtcatcgagaagaacggcaaacgcctgccggagaaggatgaccagttcaccatcacgtcccaggtgcaaggcaaggacggctggctgctgcacccgctcaatgacgaactgcgcaaaggtcaggaggacaaactgcgcagcattccggtgcgcatgctgttcaacgagccggaacttaacttccgcgctgactacaccctgttcgatcggcagtccggacgccccatctgcgtgggcaatggcgagagctgcaagcgggttacccaggacggtatgcagtcactgccctgtccctcaccggatgcctgcccgctggccaagggtggcgcctgcaagccttacggccgactgaatgtagtcattggcaatgaggatccgctgggcagcttcgtgttccgtacaaccggcttcaatagcatccgcaccctcgccgctcgactgcattacttccaggccatctcgggcaaccgcctggcctgcctgccgctggagctgcgcctgcgcggaaagtcgacccggcagagccatggcaccacgatcttctacgtcgacctgacggtacgtggcggaatggacatggcgaaggcactgctggccgcgagtgagctcgatgcgcagcgacaggcgtcgggcttcgatcaggcagcgctggatacagtggcacgcagcggcttcgggaacggagcctttgaagacagtgaagaggatgcaggggccgtggtcgaggagttctatcccgaggagagacagctgaccaccccctcatcgaacggaggtacgcagcccacgctggctaataagcttgaagcactcgcaggagggcagagctaa

SEQ ID NO: 338951 - DNA, 240 bp, Pseudomonas aeruginosa
gtgaaggcactgcgtcagtcgatggccgacaagcaaaagcgggaggccgagctcaagcagatgctgcaacaggccatgggttatgccagccgggcggagttctccagcggctatgtcagttggcgtaaggccaaggacagcatcggcctcgatgtcgctcagttgctccaggacaagccctacctacaggccaaatatccgctgctgaaacccggtgcgcggcgattcctggtcggttga

SEQ ID NO: 338952 - DNA, 585 bp, Pseudomonas aeruginosa
ttggctctggaggcggcattgtgcttctgggattccctgatgcacgagtcggagttcggtctgtcggaccaacttgcggtggagttcatcaagaccatccggtcgaagatctattcgacggcggccacagtggggaaaacggcgcgtgactacgcctgcacctttctggcgctgctcagctccgatcaggggactctaatcttccagattggagatggtggcatcgttctggatgtcggcgccggccttgagcttgccatcgctccaatgagcggtgattacgccaacatgacccacttcgttacggatgaaaacgccttggactacctagagagcaagtcctacgaggggcgggtagagcgagccgccgtattttccgacggggtacagggtttagctctgaacctgactgacagcacgcctcatgcccccttcttcgcgccgttcttcagcgtgctttcgtcagttacaccggatcagcgccaacaactggagccggcgctggtgcgctttctcgaaagcgaccaagtgaacgagcggaccgacgacgataagtcgatggccatagctgtttggcggtactga

SEQ ID NO: 338953 - DNA, 1944 bp, Pseudomonas aeruginosa
atggtttcggtagttctcgattcgagaggtatgccgttgcgtctgggagccaagctcggggacggcggtgagggcacagtgtttacgctgtcaggtcgcgacgatgtggtagccaagatctaccaccagattcctgatcaggcgaagcaaaccaaaatccgcgaaatggtgcagtgtggtgacaccaaattgctgaacttcactgcctggcccatcgaggctctgacagagcagaagagcggcaaggtcgctggttttctgatgcccaaggtgtctgggatgacgcctctgcacgaggtatatagcccggcacaccggaggcaggatcatcccgagtggggttggaacttcctgatcttcgtagctcggaacctagctgcggcttttaactcagttcacgagcatggtcacgtgctcggagacgtgaatcagggcaacgccttcgttagcgccaagagcaaggtggtattgatcgattgtgactcctatcagatcaattttcatggacacaagcacctgtgtgaggttggtgtcccgcactttacgccacctgagctgcagagcagctcctcgttcaggggggtggtgcgtaccccgaaccatgacaactttggcctggccctgctgatcttccatattctgttcggcggccggcacccatacgccggggtgcctttgaaggatggcgtaggggattcgcttgaggacaatatcaagaacttccggtttgcgtattcacccaatgctgctagccggcacattgggccgccgccaagggctttgtcgctgtcattggtgccgagtggagttgcaaggatgttcgacatcgccttcacggaagaggggaaggatcgaggtagacctacagccaaacagtgggttgatgccctggatcatgtacggggtaacttggcggtctgtggcggacaccgtaaccactattacctaaaaggccagggcgcttgcccttggtgctcgttggaaggcgtcggtgtcatctactttgcttaccaggtcggcagcaatgacgcagtggtattcgccggtgatatcaacaagctttggagtgcgatacagtcgattaggttgccagaaggcatcgcgttgccaattggaccgtcgcatcctcagcaggctaagcccaagccagatgtgggcctggctgattgggaacggatcctgactaacatcgctatcgtaggtggtgcgatagcgatgtgcgtagtgctgccgcaagcgttctttatctggatgcttgtgggctggttgatggtgtcgggggtttctaactcagggcagtcagagctaaacgcggagcggagctcccgcagtacggcaaaacgagatgctgagaacgagctcaaggctgttttgcgggaaatggaggctgaggctggactagcggctgcccgcaaacacctaggggagttgcagagcctgaaattgcgttttgacgggcttgctcaggaggagcagaggagtatggccgagttgccgcagagggcgcatcagcgccaactcaccgagcatctggagcggttctacatagacaaggccaagatttcaggtataggtcaggctaagcagtccaccctacgtagctttggtattgaaactgcggcggatattgagtggaaacgcatccgtaggattcgaggctttggggatgtgttgacccgagccctggtcgattggcgaaaagaaaaggaacgcagctttcggttcaatcccaatcgcggtgtaaccgatgcggaccgaaagcaagtgcagcagcattttgtctcaatcaagcaggacattgagaggaagatgcgggagggcttgaaaaaggtccaggcggcaaagacccaagtcgagtctgttcagcgccgtcatgctgatcgattgcagcaggtatatgaccggctcttgcaagctgagctggacttgcgggcgatgaattag

SEQ ID NO: 338954 - DNA, 1005 bp, Pseudomonas aeruginosa
gtgcgcctacccaagcccttgctcgacttcatcgaccattcgctggccctgagcggccggccgttcgagccggacacctcgctggcccccccgcacggccgctacgccaccgtacactatgggatcatgctgccgggcctaccggcgccgcaccatttcctcaacctggtcgcggtgatcgggcaaccgaagacgcgcctgttcgccaacccgcacctgatccgtaccaccgcccgggacaccgccaacctgctggtcggcaccgccaccggcacaccggaacatttccgcggctacagcatcggccaggactgcacgttcgccgccgacggcagcagcctgcgcttcgccgacgacctggtgctggagggtcgctacccggacttcagcgcgcgtcgcgaggggcatgcgttcaacctgcaactgacgctgaaggccactgacaaggtggcaaatttcgccagcctgatcggcggcctgtacgatcactggtcggtgctctgccaataccggggccatctcgaacgcaacggcgaacgcagcgagatcgccggcctgtgcaccttcgaatacgcccgcgcggtgaacgtcaatctgccgttccgcttcttcacctaccagatcctcaacctcgacgcgcgcacccaggtgctgctggtcgaggtcctcggtccgctcggcctggaggcgcagcgacgggtctacctgcgctcgctggacgatcacggcggcgtctacctgcgcggcttcgacttcagcgtgcagcgcttcgcccccacgccggtgaccacgcccaacggtacgcgcatgcgcctgccgcaggagttcacctggcgcgtagaggacgacgacggcaacgagttgatcaccatccgcggcgacgccaacggcgacttccagtacggcctggccgccggctacgtcggtagctaccgctacgaaggtcgctttcgcggccggcctgtctccggcaccggctatatcgaatacatcgacttgcgctga

SEQ ID NO: 338955 - DNA, 843 bp, Pseudomonas aeruginosa
atgacccagccctcgaaacggaatgggcaggttccgctggacgacgccctggagcgccatcgcgacgcgctgaaggacctgttcccgctgccgccctcccggccgaaatcgcgcaaggcaagcaaggcggccggcgtcgcgctattgctggcgctggccatcggcgccctggcctggctggacccggcctacaagcgcgagcgcttcgccaccgccatcggtgagcggcgcgacgtgaccctggccgacggcagccagctcctgctcgacagcggcagccagatcgaggtcagttggcacccgctcagccgccgggtcgcgttgcgcacggggcaggtgcttttcgaggtgtccccggcgcgctatcggcccttcgtggtgtccgcggggtcgaccgacgtccgcgtgctcggcacccggttcaatgtgcgccgcctggacgacgacgtccgcgtaaccctggagcgtggccgggtggaggtcggcacctcggctacggcgcaagcgccagtcgtgctcctgccgggccagcaggtcgatgccattggtgggcaactgatgccgctggccaaggtcgatgccgccacggcgatggcctggaaagacgaccgcctggtcttcgagcgcacgcccctgggcgaagccgtcgcgctgctgcgccattatcgcaaggcgcccattctcctggacgaccccagcctggcctccctccggctgaccggcgtcttcgccgcgcacaacgccgaccggctgctcgacctgctgccgagcatccttcccgtggccgtgtcgcggcaggaggacggcagcgtcgagatccaacgcaaatcgacgcgaaaataa

SEQ ID NO: 338956 - DNA, 720 bp, Pseudomonas aeruginosa
atgtatagcaaggcgcaagcgcagaactcccaggagcaactgatccagcgttacgcaccactggtcaagcgcatcgcctatcacctgctcggccgcctgccggccagcgtgcaggtggaggacctgatgcaggccggcatgatcggcctgctcgaggccgcgaagaaatacgacgccggcaagggcgccagcttcgagacctatgccggcatccgcatccgcggggccatgctcgacgaggtccgcaagggcgactgggcgccgcgttcggtgcaccgcaacacgcgcatggtgaccgacgcgatccgcgcgatcgaggcgagaaccggacgcgacgctaaagatcacgaagttgctgccgaactccaattgagcctcgaagattactacggcatcctcagcgacacgcagggcagccgcctgtacagcttcgacgacctgttgcaggacggcgaacatggagtgccggaagacaccagcctcagtcacaacgaaccgatccacggcctgctcgacgaacgtttccaggcggccctggcggatgccatcgccaagttgccggagcgcgagcgcctggtgctggcgttgtattacgacgaggaactcaacctcaaggagatcggcgaggtactgggcgtcagcgaatcgcgggtcagccagttgcacagccagtgcgccgcgcgtttgcgcgcgcgcctggccgattggcggtcggcctga

SEQ ID NO: 338957 - DNA, 978 bp, Pseudomonas aeruginosa
atggccaacgaggtgtacgccaacaatcgggagatttcctgcaaggcgggggatggggtgtcgatcgccaggtttcccgacgtctgtttcacgcctccgcagactgcggcgacaccgaccgggatacccattccctatcccaataccggctacgcgaaggacatgacgcggggcagccggacggtgcggatcgacggcaaggaagtgatgctcaaggacaagagctactttcggaagagcactggcgacgaagccggcaacgcgcccaagaaaggcatcgtcaccagcaggatcaagggcaaggtgtacttcgtttcctggtcgatggatgtcaagttcgaggggaagaatgttgaccggcacatggatctgacgacgcacaaccacgcctcgatgccggcccagacccctccggggcccactaccgaaggggtcgcccaggacgcctcctgtccccatgccaacctgaagcgcgatcctcccaagggggagcatgagatcaatcaacaggctcgtctcgagcatcggaagaatgtgcagaagcgcaacgaggagaagctcgaccggatgctggacgaagccgacaaggctggcaatccagcgcagaagcaacaactgttcgagtcggcgttggcctacgacaccctgatcaagggcgagcgcttcgagctgaaagtagccgagcagacccaggcgaaagaggttgcggtaaagatcacctgccgcgactgtggtctggtggtccaggagttcgatgtggttacccgcgacggcgtggtcaaggagtgcaaggccagttggggccaggtcgggctttcgcagttcaagcgcgaagaacagctggcgcagcggtcggatgtattcggcccgggcaccgtggtgcacgtggcaattccgaagggacagcggggcaatctcgaaagcaagttcggcaaggaaaacaaggcacacatgtcgggaaagatccaggagcactga

SEQ ID NO: 338958 - DNA, 717 bp, Pseudomonas aeruginosa
atggcgttttcgtatccgatcgcgatccactttccatcgctccccagggcggccctggaggagaaggcgttggccgtcgtcgcggccttgagacgccgccatgcggtggtcgcccaggtgcgcgaaagcgtgtcggagctggtggtcgacccggccaccggggagtggctcgacacccgcagcgtcgccaccgattgcgcgtcgttggaacaatgcctgcagcgctatgactggttgcggctggaagtggagcttcggctcgggcaggggcgctatttcgccgccctgtgcagctttccggtcgatgcgcaggcggagcgcggcggccttcagttcaacttcagcgaccgcgcctatcccgcgatccatgaattcgaggatggcagcggcggccagttcgatggccaggtcaagcgcgacttcctggccgtctgcatgactgtggtacgtcatgtcgacgccgatgcgttcatcctgcttcaggacgagggccggtttcgctgtatcgagctggacgaggtgctgcagcgcctggtcgaacccgagatgagcttgcacggtcggcggcccggctcgatcaccggggtacgttcggcctggttgagcgcgcagcgcatgcgtgagctgtgggcgctgccgcatgacgatccgcgctgtttcgaggcgggaggatacagcgtgctggatatgatccagcggttcgcctggaaaggctga

SEQ ID NO: 338959 - DNA, 1563 bp, Pseudomonas aeruginosa
atggcagctccagattttcggctggctccctctgctaacactgatgacagtacacacttcgatgatgttggggcgatccgtagaacgatcacgccagagatcgttatcgcgctgtgtgggcccatggggacgccattacatgaggttgcagaaacctttcagtcactcctcactggagctgattatggttaccacgaagtcaaggtgatcaaactgagtgatgagattcgaaagcactcacagcttcctgaaggacgatcaatcctgaagctgatcgaagctgggaatgagctacggcatcagtacggcaatgagattcttgcccgctttgccattcgacaaataactcttgcacgtgaagcagcgcaaaaacaggccgaggatcatcacgagccggacctttttggccctcctgaaggtgcaattgtccccaaagtcactccgcgttactgccacatcattgattcaatcaagcatatcgatgagttgcgtttgctccgctccgtatacggagacatgctgcacgttgtcggggtttactcgccaattgatctcaggataacgcgcttagagaggattaaaggcccagaggacgaggttcatgcgctcatcgatcgggactctggggaggaggtagattacggccaacgagtcgaggacacatttccccaggccgacttcttcttgcgagttgagaagacaacagacactcatcggaaggggcgagtaaagcgttttcttgaccttatgctagggacagtcattgcgacaccaaccttgaatgagcgagcaatgtatgcggccttctctgctgctcgaaactcagcgtgtctatcgcgccaggttggggcggccattaccagtgcggagggagaaattcttgcgacggggtggaatgatgtaccgaaagcattcggtggtctgtatcagacggaagtgtatggaagctctccggatgaggatcgtcggtgctggaacctaaatggtggcctttgctccaacgaccaagagaaaaaggtcatttctggagtgattgtggatctcttagttaaagagggtctcatcgctgcagacaagagggatgcagcatttaccgttattagaaagaaatcccaactcaagagtcttatcgagttctcaagggcagttcatgcagaaatgcatgcattgctcaacgcgggggcgactgacggagggagaattcgcgacggaaagctatttgtcacaacctacccttgccactcgtgtgcgcggcatttagtcgcagccggtgtgcgagaggtctatttcctagagccttaccgtaaaagcctggctaccaagctccacgaggatgctataactgagaacgaaagcgataccgataaggtgcgagtgatgccgttcgacggagtggccccgtctcgatttttgaggtttttctcggcccaccctagtgggcggaaggatggcaacggaaagatgtacagtcgggacgcgcatcccgtcgcctcgatcacgatggaggcccttccgacccttgaagctctcgttgtcgaagcactaaactcccgcggcatttga

SEQ ID NO: 338960 - DNA, 1227 bp, Pseudomonas aeruginosa
atgaaaggaaaagaagttgtcacgatcgccgctattttaatatctatgccagggttggcttattcagctccccccgtgcgagaagagccgagagagaatgtgtcttctggtcagccaaccccgatagatcgggatagcgttcttgaggacgcaaggaataaccctgggcagacattcgacttgggaggcggtgtttcggtgtccacggctccgcatacagccggtgtaagaactgattatacatttaatgattttttgaagattgtaaacaaggccttcaccgagccggttacgtctttttttgagtcggcagacgatctgcatgcagcgcttaataacagaacacctactttcgatcccgcaagtcgtgaagttatgagtaaagtagggcaggtcattggcattgtagtgggagcctctgggggggttggggctgtcatgactacgactgggcaagtggctggtatcgctagcaacgatgtccaagcaaagatgaactctttccctcttggcttcaggctgcaagggaaagacatagtaactattgagccccttggcggggctaggcagagagctgcatctggggatgtggtgagtcaaggagggaagccttttacaagtgtgcttagacgagtgaatggccgtataggtattccgctaagccctgtcgacccaccaaggctcccatcagagtttgtagctgagcggctgcctgcatattctgagttaccggttgatcatgaagagtatatgagtgatgagagcgatgatggtcctctgccagatgagctgacagtcagcggaagcggttttgatccgaccccttatgaggaagctttgaatatggtaattacaccatcaagaggtgaggaggttgtgactttggttcgtgggacttcaaagctggcagtcgagagaatggtggggaatggaagcgcgggtggtgatcctgtagatatatcggtgcagccgctaagtgaagcacaagtgcgggagcaggttggaaaaggtggtgtttttccagagttttcgacagacataacagtggctgacgggttctccagagggcactatttggtagtggtagggattaaagccaagtatcttagttcagcaagcgttagtgagcaggggtttgctgcaccgaaaagtgctcctattaaagtactgaaagtatatgaccgaacctttggcaaacctgaggtacgtggtcctaatgcttcgtaa

SEQ ID NO: 338961 - DNA, 1365 bp, Pseudomonas aeruginosa
atgacagtttcccgcgaacgtctagccgacctcttggttgaccctcgagaagatcttgattgcgagatcaaaaactggcttgatctgcaagattcaaacgatgacaaggcgactttcgcaaaagctgtgctcgccctcgttaaccacggtggtgggtttatcatcctcggtctcgttgaaactgatgcgggcatggtggaggcggaggggcgaccggccacacttgaccgttacagccaagacctgattaacggcatcgtgcaaaactactgtgatccaccgtttcactgtgcggtgcacatcgttgcaaacccaacgggtgcagtctttcctatcgtgatcgtccccggcgggcatcgtgcgcctgttagagcacgccgagccgggccaaatggaaacaccgttcagaataacgcgatctatattcgcaagccgggccctcgtagtgagtccccccaaagtgcgcaggattgggatgacctcctagcgcgatgcctccggaatcgacgcgacgagatgttcgatcaaatcagagatttgatctctggatccgttccacaagtggagcaaccacctgaacctgccaggctcgacgaatggataatgtctagccgtgaacgctggaggggactcaccgagccacttcctgaaagagttgggccccgactgcctcatggtcgcttctacgtcgcctacgaaatagtcggcgaacgcaggcaaatcgcccccgcacaattccccgagctacttagagcaagcgttacgagacacaccggctggccgccgttctggtatccgacgcgggccggaattcagccttacctattcgacggcgctgtcgagtgctggttgggaggtgatccccaaactccggtagaagctcgagatgcggcgcactctgacttctggcggatccatccagatggcttggccttcctgcttcgtggttttcaagaagatggcatggatgcgcaactaccggggcgcgccccaattccccccgctactgttttcgatattacccttccggtctggagagttggcgaagccctgctgcacgcgagaagcctcgcagccaatctttttgagggaccgaccacgattaggtttgttgtcaattacgaagggctagccggtcgatccttggcaagtatcaccaacctccgccccgttcgggaaggccgagttgcccgccaagacacgatcactttgaattcgcacattgacgctcaggcgatagatccgaacttgccggagattgttcacccccttttatcgcctctctatgcgctttttgatttctttgaactacctatgcagttagtggtggaggaactcgccaacatgagggcgggtaatttctga

SEQ ID NO: 338962 - DNA, 1035 bp, Pseudomonas aeruginosa
atgccaggagaagcagacgtattaataggtgggcccccatgtcagcctttttcgaaggcaggctactgggctcgaggagatgctctgcggctagatgacccccgcgcagatacgcttacaggttatctccgagttttgcgcgacgtgcgaccacgggcgttcttgcttgagaatgtttacgggcttgcctatcaagggaaagatgaggggctacggcacatactcgaaggtatcgagcagataaatcgcgacacaggaaccaattacaaggtcacatggaaggtagttaactgcgcggagtatggtgtcccccaaacccgggaacgcgtgtttctgattggttccagagatgggcgcgcattcacttttcctgctccgactcacgctaaacccgcagatattgagcagaatttgttctgtgatttagagccgtatcgtacggcctgggatgccattggcgatttgcctgagcctactgctgatgaagtcggactgaaggttgggggtaaatggggagatctccttccgagcattccagagggggaaaactacctctggcacaccagtcgaggtggcggactaccattgttcggatggcggacgcgctactggagcttcctgctgaagctatccaaacgcatgccttcatggactattcaggctcaacctggatcatccattggaccgtttcattggaacaatcgccggctgagcttccaagagctatgccgactccagacatttcctgatgggctgcgcctggagtgtggacgaacagaagttcagcgtatgctaggcaatgcggttccgtcgcttgtagctgaggtgcttgccagggcaataagggcgcagctcttggactcgccgcctaagggcaggctcaagctcatacctccgaggcgtgagtacgtaccgccagccgtaccctgcgctcctgtagctgcgaagtaccatacatttattggtgatcatgctgcccaccccggtaccgggaaaggtcgtctggcggtaaagcaaaaaacggcgagcatctaa

SEQ ID NO: 338963 - DNA, 1095 bp, Pseudomonas aeruginosa
ttggaaataagtaaaaaactcgcgaaagacatcatcagagcagaggcggaagctatctctttaggatacccagtcaatggagcttggataaaaaaaattgaacatttatcggagctttgccaggggcaggctcgaacgcacattgcgttcatcggtacggaaatgcttgcgaaggcagttaaccgagacgttgatctatacgcgatcaagcctacgcattcagcaggaaatccccgcgcgtactccgcacgctctttatgtcatagcgtcctcgtgccgctggcggcagacatcggattcaatatcggggtaacaggccgagagcctttaaataaccagccatatttccgaatgactcacctaggtgacggcaccccggtccatccaatgagtgctcccgcattccactacatgatgggactggtagatgagcttcaacaaatggagtccgagaacgaggcaaaggatgccttgcgagcattcattgctgtccgtcagcgttatcagcctcgctacagagcatcttcagctctggtgacagtcaagccggaaacactagcttcagtgatacgtcagtttgtccaacaagactctgagagtggtcgccgagcccaagccgtggttgctggcttgatggataccgtagctggtattgacagggttgagagcggtggtattcatgatcctagccgtaactcccctggggacgtttgtattcgcgatgcaacacagcttggcgtgtgggagaaggcgtttgaggttcgcgataagccggtatccatgagtgacgtacaggttttcggccagaaatgtgtggatatgggggtaagagaagccgcggttgtaatggtttcggatcggcaagcgcagctggatgaggcccatttagagcaatgggcttctcacttcggtatcggcctgacacttttctacggatggcatagcatcgttgaccaggtattattttggtcaggtacgccaaaaccagaggcagcgattcttgctgtagaactcatctacaatcgactggtagcaattgagacctctgagacaggggttgcaatgtggcaggggctcactacacgcaagttctag

SEQ ID NO: 338964 - DNA, 138 bp, Pseudomonas aeruginosa
atggccgggagggaatatttccatattccctcccggccattcttcatatataggcgtatttatataagcgccgatatgcgggtcggcttgattcattacaacgcgatattcccgactttcgccgaagccgcgttgtaa

SEQ ID NO: 338965 - DNA, 1902 bp, Pseudomonas aeruginosa
atgatgacgcgccccgtgtggtatctgcccctcagtgaagaactcggccaagccctcgccagcggcgctgcgcttgacctggagcaatcttgtcgctacgaagtagcagcgattctctacctgctccaactgccgaagctgactacgccacctcaaacgccgctggagatggagcgcatttttgcgaggttactgacgcaaccgactgacgttctggcgtctgtactaattacgtcttacagccagaaggcattcaatgctggcttggcgattgcgcctactgcaggggtaggcctgattgatcagaaggcagtaaccctacgccagtacgtccacagtgacggttcatggaactttgatttttccaggacctatagccaaccttctcgtgcgaccaagcatgatcacactcggtccaatgggcagatcattcgcttgagtgatccacaacaccgcctgatcgaaaccatccgcgcgaaccccagcgactccatcgagacccaggcttatgccggcgcgggaaagaccttcgttctgaaggaaatcgtcagcatcctgcacgacagaaaatgcctgtttctggctgacgtcgagagcaagctgtggccagtcaaaaaccaattctcccagcaaaagattcaggcactgaccttctccaagctcgccagcctaatcctatcccgaggcaattcgctgctggagcataaaatcaaggcggcagccaaccgccgcttctctggtgaaaacgtcgcagaacggctgaatatttcttccctaggcaacctaagcggcccgcagatcgttcgcgcgatacgcccagcgataaacaagttctgcctttctagcgacacggagattagcgcgagacacctgccgatcaccctactggcatcactctcccccacccagcaacaactgttggtcgtgctagccaaccagctctggtcggcaatgattgatctcgagcgacaagacctggccatccaggtcaccggctggcaccgactgaaacagattgccttgatgggtctccacattccgacttcataccaagtggtaatcatcgacgaggggcacgacctgatcacccctctgattgagattctcgaccgctcgccgcaggtagtaatcaccttgggcgatcagttccagaacctccaaggccgctacgtttcccattccgcccaaattcgccaccgcgagatgacactctcgctgcgcgccggtccacagcttgttgattacctgaatccactgatcgatgccttcccggaggcgcgggtcgagccccttatcggcaatgtcgagaaggaaacggttatcgccgagtatcgggcagagcagtttccgccggagccctctgccattctggtagcagatgaatggggcgtattcgactggctgatccgcaatcggtatcagggcaagggcgccgcggtggcttacagcgtagaactcgggaccttcctggaagactgtctcagcctctataccgggctggcaacccagcaccacaccaagcttgcagcctatcgatcctgggacgaattgcgcgccggaatggtctggaatcatgccttcctgcgggtcgaggattggctggaaaaggtcggcacgaagtttggggtttccggcctttacagcggcgccgaactggaggaactcggtcggggcattccgagccggcacttgatcgtcacggtagcttccgcgaagaactttgagctgcctagggtggccatctccgaagatatttattacttcgacgacttgcgcggcaagcgcgaaatgtcgcgaaaactggcgctgctctacaccgcaattactcgttgctctggaaagattttcttccccgacacccatcacgactggatcaactgcattttgcactctcgacattga

SEQ ID NO: 338966 - DNA, 1329 bp, Pseudomonas aeruginosa
atggaaaatgaagtgctcagcacatacgccaaaggcgatgaatttgaggaacaggtctttcaattcctgaccggtgaggttcaaaatggccgcttcctctttcggcctgagtactgccgggctttcaggaagaaaggctattactcgcgcgaccgcgaggatttcatagttttcgatatttctctcgaggtttttctgcctggattcgaaaagccatcaatgctaattctcattgagtgcaaaaattacaatagcacggttcctgtaggcgaaattgaagagtttggtttcaagattggccaagttagtggtgtcaatgttaaaggtatttttgcatccgcaagtgcgttccagtccggtacattcaatattgcccgaaacaaaggattcggtcttttacgatattttaatcaggcggagtttcgatgggatcttcctcgtgcgttgcttacgggtgctcgaagcgccaattcgagaaagcgtgtcgagattgagtatgcgctgacggagtctagatttcagcccgctgtctacaacgtttacgccgttactccgtgcggatatgcggatggatgggaaggtctttggaaagggctgaaccttgaagctgccttcagggaaagtgacctgagagtgatccttcagcccgctgtagttgcgaaggtgcgtgtcgcctatgcctcaaaaagtagtattgaaaacttggctgaacgtgcattgaagtcgatttcttacattcgtggtgttgtcgatttaagcaaattggttgctcatgaaggctctcatggtttagttgtgagttttcatgaggatagcccttcggctcttggaagtattaattttagtcccttgcagataagagtttttgccactgacaataagtctcacttggctcgattcacgttagcccatgagcttggtcattattttcttgaccatgggcgattcatgaggcacgagtgcattcgattggatgacatagaccacagtcaatcaataatcatccccaggagtgaagtcgagcgactagagtggcaggcaaatacgtttgcgtcatgcctgcttatgccgcgtgaagagttccttatagtactagacgctctgctaaaacagcatggaattaaagaccgcggacatgggcgcctatatctggatgggcagcgtgaaaatcaagttaattttcggttgataacgacagctatgagcaggcattttgaggtgtctgtaactgcagttcgtttgcggatgagggcgttagaggtcctcattgaagctgaaataccgagtccgagagtttgttgccccaagcacttaagcataaccgcctga

SEQ ID NO: 338967 - DNA, 342 bp, Pseudomonas aeruginosa
gtgaaagcaacagtctccaaggggatcgatcctactgccgcccgcaaggctgccaagatcgaagcccaagccgccgtcgccgccaccattgccgaagccgagcgccaggctgcggaaaacaagacggtcgccgacctcttcgaagagtggatgcacgacggcgtatcccgccaggacggcaacgccgaactgcgccgcagcttcaccaaggacgtgctcccactcatcggcaagaagcctctgcgcaccctgaccgagaaagacctgctcaacgtccttcgccaaatcaaagcccgcggtctgaaccgcactgtggtgatccgcagcaaggacatcggctag

SEQ ID NO: 338968 - DNA, 1020 bp, Pseudomonas aeruginosa
atgatcgaactgcaccacgcgcctttgagcagtggggcggtggtctgcatcgaggctgacggcacggttgcctgggaaactccgcgcaagatgctggtccgtggctcccatgactcgacaatccatattcggagcgtaggcggggacgggcagggcaacgcgactcatctgtacatcgacggcaacccaagcaagtggttgcaaggacataaccttgttggttcctgtgatctcgttgccctcgtctgggatgcttttcaacgcctctgcgccctggtgggccttgagccgactgactttgagcgtcagaaggtcagggcagggcagtaccgcgtcactcgcgtcgattacaaccgaatgttcgaacttccaagccgggccgatgttcgagcctggctgcgtgcgggcgagttcaaatgtaagtctcgtcatggtcgcccggtaaacaatcgcgggactctaactttcggcaaaggctcaagtcattggtcgattgtttgttattgcaaggccgatgaaataacttccggtggttcgcataagttgccagaagaattccatcagtatcctgaaatctatcagtggatagataacaagctccgcgttgaacttcggttgcgctcaaagaaactcaaggcgctgaaccttgaatatgcctctcaactcacccccacggttctttggaagctctaccgtgatttcattggggaactggatatgtcagagcaaatagaacttaattcagagcaaatgatgaaaatcccgagcaaggttctcggcacttacatgctctggaagcaggggcatgacatttcaaacttggtagcgaaggctacttattatcgccatcgtcaagttcttcttgggtatggcatagatatcaatatccgctgtgatcgccgcgacgatagcaatgttgtgccgatgattcggattcttgaggctaagcctgcggccattccgagcttcttctttgaaagggggctgattcatagatcggcccgtcaggtggctgtatga

SEQ ID NO: 338969 - DNA, 372 bp, Pseudomonas aeruginosa
atgcacgatgagtcagcgatgagtgacgtaaccatggcgataggcgagaacatacggaaagccagagagcgcaagggcctgaggcaagagcaagtcgctgaaatggcaggcattcccctgtccacatacaagaactatgagcatggcaaacagccaccacccggcgaccggataggagccatcgcacgaaccctcggggtatcagctgatgaacttgtgttcgaagagagcgagcgccaagttgctgacgagctacgagccctattcaagaggttcgaagtgcttccaccagacctgaaaacccaagccaaagtggcaattcggggcctgctaatgagctatgaagtcgaggccctcaagcacgaggggtag

SEQ ID NO: 338970 - DNA, 264 bp, Pseudomonas aeruginosa
gtgaaaaagcgttttaccgaagagcagattctcgacttcctcaagcaggcggaggccggtgtgccggtgaagggactgtgtcgccgacacggcttcagtgatgcctcgttctacacctggcgggccaagtttggcggtatgaccgtggcggacgccaaacggttgaaggatcttgaactggaaaacagccgattgaagaagttgctcgccgaggcccacctcgacatcgagtcgctgaaagtggtcgcccggggaaaagggtaa

SEQ ID NO: 338971 - DNA, 1110 bp, Pseudomonas aeruginosa
atgaagctggatcggctcaagtcgaagtgggtcgagttcgatacgcccgaagagtggtacaacctgcctgatggctcggtgatcgtgattgacgaagcgcaacgtgtgttcggtaacgatggctccagggcgcgcccggagaaagtcacgcgcttcgagacgcaccggcaccagggcctggacattcatctgattactcagcatcccagcttgctgtgcacgccagtgcgcaagttggtcggcaaacacatcaacttcattcggccctatggccgggagaaaggcatcttccggcatgagtacgagttctgcatcgacaacccggagcggcgcagcaacttcaagcaggcccaggaagagcgggtcacgctggataaggcgtatttcggcgtctacaagtcgtctacggtgcacacgcacaagccgatcacgcccagctacatgaagaaaatcccgctgatcatcgcgctgatgttgattccgatcggtgtgcttgttgggcttgtcgtgaccgcgatgcgtcaggggaatgaggagaaagaggcggctcttgcgaggagtcaggcggctgaggcgtcagcgggtgttctgcctggggctggaaatgctgttcaggcagcccccagggcctccagtggggcgaaatcgaccgatgagttcttgggtgatatgtcgcccagggttcccgatctggtggcctcggcgccgcgctatgacgatctgaacaagcccagggatttccctcggccggtgtgtgcggccagctcggacccgaacttgatcggcaaggctcctgagcggcgaattccgctgggcacgtacaatggccgggtgatggtctgccagtgctacacgcaacaggtcacgcggatgcacacgacgttcgagttctgcatggacgttgtgaacaacggctatttcgacgacacgcggatgccaccgacttatgccagcggcaacagcacgcgaggcttgatcaccagtccgtcggttgacccggcgacggcgattgagcgagggcgcgcagcgacatcgccgacgccgggggatgcgttctcgacacgagtaaccatcgtgccggatagcagcaggacgcccaggacgctatga

SEQ ID NO: 338972 - DNA, 639 bp, Pseudomonas aeruginosa
atgctgatcccgatcggtgtgcttgttgggcttgtcgtgaccgcgatgcgtcaggggaatgaggagaaagaggcggctcttgcgaggagtcaggcggctgaggcgtcagcgggtgttctgcctggggctggaaatgctgttcaggcagcccccagggcctccagtggggcgaaatcgaccgatgagttcttgggtgatatgtcgcccagggttcccgatctggtggcctcggcgccgcgctatgacgatctgaacaagcccagggatttccctcggccggtgtgtgcggccagctcggacccgaacttgatcggcaaggctcctgagcggcgaattccgctgggcacgtacaatggccgggtgatggtctgccagtgctacacgcaacaggtcacgcggatgcacacgacgttcgagttctgcatggacgtggtgaacaacggctatttcgacgacacgcggatgccaccgacttatgccagcggcaacagcacgcgaggcttgatcaccagtccgtcagttgacccggcgacggcgattgagcgagggcgcgcagcgacatcgccgacgccgggggatgcgttctcgacacgagtaaccatcgtgccggatagcagcaggacgcccaggacgctatga

SEQ ID NO: 338973 - DNA, 639 bp, Pseudomonas aeruginosa
atgctgatcccgatcggtgtgcttgttgggcttgtcgtgaccgcgatgcgacagggggatgaggagaaagaagcggctctggcgaggagtcaggcggctgaggtgtcagcgggtgttctgccgggcgctgggaatgctgttcaggcagcccccagggcctccagcgggtcgaaatcgaccgatgagttcatcggtgatatgtcgcccagggtgcccgatctggtggcctcggcgccgcgctatgacgatctgaacaagcccagggatttccctcggccggtgtgtgcggccagctcggatccgaacttgatcggcaaggctcctgagcggcgaattccgctgggcacgtacaatggccgggtgatggtctgccagtgctacacgcaacaggtcacgcggatgcacacgacgttcgagttctgcatggacgttgtgaacaacggctatttcgacgacacgcggatgccaccgacttatgccagcggcaacagcacgcgaggcttgatcaccagtccgtcggttgacccggcgacggcgattgagcgagggcgcgcagcgacatcgccgacgccgggggatgcgttctcgacacgagtaaccatcgtgccggatagcagcaggacgcccaggacgctatga

SEQ ID NO: 338974 - DNA, 639 bp, Pseudomonas aeruginosa
atgctgatcccgatcggtgtgcttgttgggcttgtcgtgaccgcgatgcgtcaggggaatgaggagaaagaggcggctcttgcgaggagtcaggcggctgaggcgtcagcgggtgttctgcctggggctggaaatgctgttcaggcagcccccagggcctccagtggggcgaaatcgaccgatgagttcttgggtgatatgtcgcccagggttcccgatctggtggcctcggcgccgcgctatgacgatctgaacaagcccagggatttccctcggccggtgtgtgcggccagctcggatccgaacttgatcggcaaggctcctgagcggcgaattccgatgggcacgtacaatggccgggtgatggtctgccagtgctacacgcaacaggtcacgcggatgcacacgacgttcgagttctgcatggacgttgtgaacaacggctatttcgacgacacgcggatgccaccgacttatgccagcggcaacagcacgcgaggcttgatcaccagtccgtcggttgacccggcgacggcgattgagcgagggcgcgcagcgacatcgccgacgccgggggatgcgttctcgacacgagtaaccatcgtgccggatagcagcaggacgcccaggacgctatga

SEQ ID NO: 338975 - DNA, 1467 bp, Pseudomonas aeruginosa
atggcccttacagtcaacacgaacattgcttccctgaacactcagcgcaacctgaatgcttcttccaacgacctcaacacctcgttgcagcgtctgaccaccggctaccgcatcaacagtgccaaggacgatgctgccggcctgcagatctccaaccgcctgtccaaccagatcagcggtctgaacgttgccacccgcaacgccaacgacggcatctccctggcgcagaccgctgaaggtgccctgcagcagtccaccaatatcctgcagcgtatccgcgacctggccctgcaatccgccaacggctccaacagcgacgccgaccgtgccgccctgcagaaagaagtcgctgcgcaacaggccgaactgacccgtatctccgataccaccaccttcggtggccgcaagctgctcgacggctccttcggcaccaccagcttccaggtcggttccaacgcctacgagaccattgacatcagcctgcagaatgcctctgccagcgccatcggttcttaccaggtcggcagcaacggcgcgggtaccgtcgccagcgtagcgggcaccgcgaccgcttcgggcatcgcctcgggcaccgtcaacctggtcggtggcggtcaggtgaagaacatcgccatcgccgccggcgatagcgccaaggccatcgccgagaagatggacggtgcgatcccgaacctgtcggctcgtgcccgtaccgtgttcaccgctgatgtcagcggcgtgaccggtggttcgctgaacttcgacgtaaccgttggcagcaacaccgtgagcctggcaggcgtgacctccactcaggatctggccgaccaactgaactccaactcgtcgaagctgggcatcactgccagcatcaacgacaagggtgtactgaccatcacctccgctaccggcgagaacgtcaagttcggtgcgcagaccggtaccgctactgccggtcaggtcgcagtgaaggtccagggttccgacggcaagttcgaagcggccgccaagaacgtggtagctgccggtactgccgctaccaccaccatcgtgaccggctacgtgcaactgaactcgccgaccgcctactcggtcagcggtaccggcacccaggcttcgcaggtcttcggcaacgccagcgccgcgcagaagagcagcgttgccagcgtcgacatctccactgccgacggcgcccagaacgccatcgcggtagtcgataacgccctggctgcgatcgacgcccagcgtgccgacctcggtgctgttcagaaccgcttcaagaacaccatcgacaacctgaccaacatctcggaaaacgctaccaacgctcgtagccgcatcaaggacaccgacttcgctgccgaaaccgcggcgctgtcgaagaaccaggtgctgcaacaggccggtaccgcgatcctggcccaggccaaccagctgccgcaggcggtcctgagcctgctgcgctaa

SEQ ID NO: 338976 - DNA, 1977 bp, Pseudomonas aeruginosa
atgtcaaccggtatgtttattctgcactccaactatacgccggcgggggaccagccagaggcgatcgcgcggctgctgtcggacatagaagaaggtgcgacgcaccagacgctgaaaggtatcaccggctcaggtaagaccttcaccatggccaatgtgattcatcgtctgaagcggcccacgttgatcttggctcccaacaagacgttgaccgcgcagctctatagtgaaatgaagcacttctttcctgagaatgcggtcgagtacttcgtttcgtattacgactattttcagcccgagatctatatgccgggcaccgatcgtttcataccgaaggactcggccatcaatgaccaccttgagcgcctgcgcctgtccacgaccaaatccttgattgagcgtcgtgacgtgatcgtcgtcgcttcggtgtcttcaatctacggcctgggtgatccagatgcatatcgagcgctacagatcgctctgtcccctggggtcaaactaaaccagagagagctaattcgtcgcttggctttgctgcaatatgatcgcacggagcgtacgctcaagcgtgcaacgttccgcgtccaaggtgatgtgattgacattttccccgctgattccgagtacagggcggttcgggtggaactgttggatgacactgttgcgtctgtccaatggatggaccctgttactggcaagacgttgggagagatagaccattatttggtttcgccaaaaacgcttttcgcaccgcccacgaacaaaatagattctgcatccaaaaagatactcgctgatatggaagagcgggttgccgagctgaacaggaataatcgcttggtcgaggcaaacagactgtacgagcggatcacgcatgacgtggaaatgatgcgcgaggtcggctattgctcggggatggagaattattcctgctacttcagcgaccgagacgcagcttctcctccgatcacgttgctggattatttgccgaaagacgggctgctgttcgtcgatgaatctcatgtcatggtgccacagatatccgcaatgtaccggggggatcaggcgcgcaaggacacgctgatcgattacgggttccgtttgccttcatcgaagaacaaccggccattgaactttgacgagttcgagaaggtcaagcctcagaccatctttgtttccgctactccgggcgactacgagctgagggtgtcgaaaggcagggttgtcgaacaggttatcaggccaacgggactgcttgaccccaaggttgaagtgcggaaagcggatggatacatagatgacctgcttgccgaaatatcgaagtgcgtgaagagaaagaatcgagtgcttgtgactacgctgacgaaggtcagtgcagaagagctaacggatttcttgacggacaacgggattcgagcgcgctacatgcattcggacataaaagcggaggatcgtgttgagatcatcaatggcctgcgcgcaggagagttcgatgttttgattgggattagtcttttgcgcgaagggctggatattccagaggcatcattggttgccattctcgatgcagaccgtgcagggttcttgcgttcggcccatgcgctcattcagatgatcggtcgagtcgctcggaatgaaaacggcaaggcgatcttgtacgccgacgcggtgacgccggcgatgaagcaggcgatcgatgagaccaataggcgcaggcagcttcaaattgcctttaacgaggaaaatgggatttctccagcctcgtctgtgcgaaaactagcaggggaagagacgaatacggaggagcccaccgttcattccgaggctttctgcgagaacttgtccgacctttgcgatcagatcactgccaaggaacagcagctactcgaatttaccgataccggtgacgagcagcgcgtcgaagacattcgtcatcagttggatgggttgtaccggcaattcatttacatctaa

SEQ ID NO: 338977 - DNA, 633 bp, Pseudomonas aeruginosa
atgagccacgagctgccttcgttcctgatcgatgccggtgaactgctccagcatgtgagccgcgtcgtctatcggggcagcccgctgtactatggtcgcagcagcacgaatcgctacgatgacccggcgggggcctacggcgtgctctacctggggcgcgacctgcccacggcgctgatggagtcggtgtttcacaagcaccagtggcttgaagacacgaagcgctccatcgccctgaaggaggtccacgcccggatggtccgcgccgtgggcgtgctggacgacgtgctcctggccgacctcacggcgccgggcgtcatggcgggctacttcggcctgaatctggagcagttggcgagccgcgactacacgcacacgcagcaggtgtccgctcaggtgcatgcgatggtcggcgacgacggccagccgctgttcgacggggtgctctatccgtcgcgcaacaactatcccgccgcgagcatcgccctgttcgagcgtgcgggaacgaaggtcagcgttgtcgaggacatcgacctggttgaccatgtggactggccgcgtttcgttgccacctaccgcatcggcgtggagcccgaccccggcccggtggaaccggatgacgaagcgtcctga

SEQ ID NO: 338978 - DNA, 366 bp, Pseudomonas aeruginosa
atgaacacgacgacccgcaccagtaccgcagaacgcctcggccgtacctttggccgcggatggcgcgtctatgcgcgtggcgaacggcgggtatcgaattggttggtggccaaaggggtgccttcggttggtgccacagtgctgctgtgggtggtcaagctggctgtgctgggcgcgctgctctacgccgccttctggttcgcactcgtgttgctgggagtcgtggtggcgggatgggcggcggctgccaatacatcggaagaagacgagtggccgttcaccgacctcaccgaactgcgcaagacacccggctacgatcccaatctgtacaacgatacgtcgcacgagttgtacaccgacgactga

SEQ ID NO: 338979 - DNA, 357 bp, Pseudomonas aeruginosa
atgagcctgatgcgtgcggcctggctgcgcccgcgctggctgttcaaccggcgcgcagcgaaggcgctgctgtggacgatggtactcgcggccgtcgccgtgggtgccaacatcgttggcatctacctcgtcggaagtgtcgcgggctgggagcgttggctggcggcagcagcgggctacttcctggtctggcggctgtgcctgtatggcgcgacggcctacggctgggtctggatgcgtcgccggctgcttgcgcgtgaggacgacgcgcaagcgcggcgccgcctggtacgcagcgagatcgccggcgtcgttgccatcgtggcgcttgaagccagcctgttgatgcagggctga

SEQ ID NO: 338980 - DNA, 1395 bp, Pseudomonas aeruginosa
atgaagcgttccgactctatgcagttctccccaccggctcgtggcaagaggatctgtttggcgcttaccggcgcgttggttctggcaagcggcgtggcctggggccaactgggctaccagaccagcggcaacgtcatcggcgatgacgtcatgtactccatcggcggcggcagcgccgtttcgatgggccgcgcagccggcatgcgctcgctcggcgtgggtgtcggctggaacagcaatctgatctgcggcgacatgagcatccagaccacgttgaagaatcaactcaacggtgtcaccaatggctttcagcagatcatgtcctcggtgatccagagtgctacgagtgctgtggcgtccctgccggcgttgatcatccagcgtgcagatccaggcctctacaacctgctcaccaacggcgttctgcaagcgcggctggatttcgaccgctcgaagctgacgtgccgcgccatggccgaaaagatggccgaaacggctggcggccaactcggctggagccagatggcagaggggttggcgctgcgtgacgctgtttcgagcacggatgccgtctcggccatcgagcaggccgagacgcgccgtggcaacgatggcgtgccctgggtcgggggaagcaatgccggcggctccggtcagcccgcgatcaaggtggtcggtgacgtcacccgcgcgggctacaacctggtcaatggccgcggggtgaccgacacgtcggcaatcgctccggccagttgcacgagcctgtcgtgccaaacctggaccacgccgcaggcggccatcgagtgggcaacacgggtgctcggcgagaaggagcagcgcacctgcgacgcctgcaccaagacggagacggtgcccggcgtcgggctgacgcccctgatccaggaggagtacgacgccaagctgcaggcgctccaggacctggtctccaaggcgaagaacacgacgcccgaaaacctgcgggaggccggcagcgcgtcgctgcccatcacgcgcggcgtggtcgaggcactgcgcgacgaaccggaccagcacctgctgtcgcagcgcctggcgtccgaggttgcgctggcgtcggtgctggagaaggcgctactgctgcaacgcacgctgctgaccggcaagaaggagcccaacgtggcggccaaccagctcgccgtggaggcggtgaaccacgagagcgacacgctcgatcgcgagattcgcaacctcaagaccgagctggagctgcgccgggagctggcgaacaactcgcccatggcgatcatccagcgccacggcacgcgcgcggcgggctcgcgtggcatctacgaaggcgatccggtgcctgaccgcctcgatcagttgcagaagggcaatccgggaggccggccatga

SEQ ID NO: 338981 - DNA, 447 bp, Pseudomonas aeruginosa
atgccggcatccttttccacgttcgcgtcgggctggcgaacccttggtctcgtcgtggcgctgccggcgtccctggccgtgttcagccccgtcaccttcgcagccgacgtactggtcgtcaccgacagccaccacccggtcaagaccatgggcggcgagcggctgatcgagctggacgaagcccgccggattgaagcggagctttctgcggaactgcccgccgcccccgaacaggcggcggccaccgtcaagcgtcggctgaaccaaggcggcgccgacctacagcgccgcatcgcttccgcataccagggcgtcaccgacgcatggagcctgggcatcaccagcatcccggctgtcgtggtggatcagcgctacgtggtctatggcgagccggatgtggcccgcgctgtcgcgcgcatcgagcagcgtcggaggacccagccatga

SEQ ID NO: 338982 - DNA, 495 bp, Pseudomonas aeruginosa
atgtctttcgccatcaatgactcctgtgtggagtcgctttccgccgtagctgcccagcacgaagactggatcatccagcaggccatcgtgctgctggaaaaacggatcttcaaagctggaccatgcctcagccagccggccgccgtgcgggactatctgcgcgtgaaactggtcgctgaacccaacgagatattcgccgctgtgttcctggatagcatgcaccaggtgctggcctacgagccattgttcaggggcacgatcaactcgacttctgtttatccacgtgtcgtcgtacagcgtgtgctggagttgaacgccgccgcggtgatcttcgcgcaccagcacccctcgggcatctccgagccgtcgagcgcggatcgtgtgctgacccagcaactgcaggccgcgctggcgctcatcgatgtacgggtactggatcacatcatcgtaggccaaggttccccgttctcctttgcggagtcaggcctgctgtaa

SEQ ID NO: 338983 - DNA, 765 bp, Pseudomonas aeruginosa
atggaacagaaacgtccttccattccgatgcaggtccaggcgttccgccgccgcaacgggcggccccgctggccctgggcattggctgctgtgctggtcgcgctgctgctgatctggcttgtgtcaaggtcgcccggcgaatccccgccgcagccgcccacgccggtcagcatggcaccggtggccgggccgccctggctaatgggcaaccccaaaggccgtttcacgctgacgctctatgccgacctggagtgcccgttctgccgggagtatttcccgcagctcaagcggtggatcggcaacaacaccgacgtggcgctgcaatggcaccaccagccgctggccgagcacgagccggccgcgtcagccgaggcacgcctagtggaatgcgctgccgaagcaggtgggcatgtcgcgttctggcaggcgatcgaatgggtctatgcccacacgcgcagcggcggccagggcttgcccgatggcttgcggtaccccgaatcgacgccagccagcgagcagtgcatggcaagcgaaaggcccagtgcggctatccgcgcccaggctgcggaagccaccaagagcggcgtaaccgccacgccgtcgctgcgcctgctcgatcgccaaacgggccaggccatcctgctgcaggggccgatcgagggcgatgccttgctgtcagccatggacatgctggcggctgagggtccgaccagcacacccacatccgaaatgcctgccgacgtcgtcggcgacatgcccaggtag

SEQ ID NO: 338984 - DNA, 2868 bp, Pseudomonas aeruginosa
atgcgctggaaactcccctggccgaagctggctgcatccgatggtggcaatgacgagcagccggacggctggcagcgccacgtcgaggcgttgcgccaggccggcattgccgaacccggagcgacggtccagggccgcaggccggcgaccgtggcggacgagcaggcgatgtacgacgttgcgcagtcattcgcggagctgctgccgtgggtggagttcctgccgccgtcgaagtccatgctgctggaggacgggcaatcggtcgcggccttctacgaactggtcccgctaggcaccgaaggtcgggaaccgggctggctcgctcatgcccgcgatgcgctcgaaaacgcgctccaggactcgttcgatgagctggatgagaacccgtgggtgctccagctctatgcacaggacgagcccagcttcgaccagtacatgcagacgctacgcgactacgtgcagccgcgcgcccgcagcacggccttcaccgagttctacctccgcttctttggccaccacctgcgcgcggtggccaagcccggcggactgttcgaggatacggtggtcacgcggttgcgctggcgcggccagacgcggcgcgtgcgcatggtggtctatcgccgggccgccgggcaggcgaaccgccgcggccagacacccgagcaaatgctgaacatcgtctgcgatcgcctctgcggcggcttggcgaacgccggcatccaggcccggcgcatggtcgcggccgatgttcacgactggctgctgcgttggttcaacccacgccccacgatgctcgggcccggcgctgaggagcgagagcgcttctatgcgctggcccgctatcccgacgaggtggaggaaggtgagattgagctggcgagtggtcgggacttcagtcaacggctgttcttcggtcagcctcgctccgatgccgagcacggcacctggtactttgacggtatgccgcatcgcgtactggtcaccgaccggctacgcatgccgcccggtacggggcacctgaccggcgaaacccgcaagggggacgctatcaacacgcttttcgatcagatgcccgaagacaccacgatgtgtctgaccatggtggcgacgccccaggacatcctcgaatcgcacctgaatcacctggcgaagaaggctgtcggcgaaacactggcatcggaacaaacgctcaaggatgtgcaggaggcacgctcgctcatcggcagcgcgcacaagctctaccgcggcacgctggccttctatctgcgcggacgcgatgaagccgaacttgacaggcgcggtctggacctcgccaacgtgatgctcaacgcggggttgcagcctgtgcgcgaggacgatgaagtcgcgccgctcaacagctacctgcgctggctaccgtgctgctacaaccctgcgcaagatcgacggaactggttcacccaactgatgttcgcccagcatgtggcgaatctctcgccggcgtggggtcgcagccagggtacgggtcatccgggcaacacgttcttcaaccgcggcggcgggccgatcacgtttgatccactgaaccgcttggacaggcagatgaacgcccatctgttcctgttcggccccaccggctcgggcaagagcgcaacgctcaacaacctcttgaaccaggtcacggccatctaccggccgcggctgttcatcgtggaagccggcaacagctttggcttgttcagcgacttcgcaaagcgcctgggtctgaccgtgaaccgggtcaagctggctcctggctcgggcatcagcctggcgccgttcgccgacgctcgccggctgatcgaaacgcccagcaacgtgcagacgcttgatgccgatgcactggatgaagaattgccagccgattcctcggtcatggaggaggacgagcagcgcgacgtgctgggtgaactggagatcacggcacggctgatgatcacaggcggcgaggacaaggaagaagcccggatgacgcgggccgatcgctcgctgatccgccagtgcatcctcgatgccgccgagcactgcgtggccgagaaacgcacggtgctcacgcgcgacgtgcgcaacgcgctgcgcacgcgcggccaggacccgacgctgcccgagatgcggcgcgtgcggctgctggagatggcggacgcgatggacatgttctgccaaggcacggacggcgagatgttcgatcgcgatggcacgccgtggcccgaggccgacatcacgctggtggatctcgcgacctatgcccgggagggctacaacgcgcagctctccatcgcctacatcagcctgatcagcacggtgaacaacatcgccgagcgcgaccagtacctgggccgtccgatcatcaatgtgaccgacgaaggccacatcatcacgaagaacccgctgcttgcgccctacgttgtaaaaattacaaaaatgtggcgcaagctaggggcctggttctggctggctacacaaaatatcgacgatctgccgcgtgccgcggagcccatgctcaacatgattgagtggtggatctgcctgtcgatgccgcccgatgaggtcgagaagattgcacgcttccgcgaactctcgcccgcgcagaaagcgctgatgctctcggcgcgcaaagaagcgggcaagttcaccgagggcgtcatcctttccaagagcatggaagtgctgttccgcgccgtgccgcccagcctgtacttggcgttggcgcagaccgaacccgaagagaaggccgagcgctaccagctcatgcagcactacggctgcaccgaactggaagcggccttcaaggtggccgagaagatcgaccaggcgcgcggcatcgagtcgccggccttggaactgtcgtaa

SEQ ID NO: 338985 - DNA, 441 bp, Pseudomonas aeruginosa
atgctctcgaacttgaataaggccctggcgctggccctcgccgtcgcggtgctcggcggctgtgccaccagcaaggaaaagctgctcccccacggcgacagcacgatgatggacatctggcagcagaacgccggtgacgggggtggtggcgccggccaggtggcgcgcaggcaattgctcgatgcacgccagagcctgcgccggacgctgaccgaggccgacgtggaggccgcgcccaccgagcagatgcgctacacgcgcacggcgcgcaacgaggtctatcgccagttccaccgcctgccgaaccccgatcttgtcatgtatgtgtacccgcacctggcgggcaccgatcccgtgccggttccgggctacacgacggtctttcccctgtaccagcgtgtgcagtacgccatgccgggcgagcgcgtggaggactactga

SEQ ID NO: 338986 - DNA, 1431 bp, Pseudomonas aeruginosa
atgcgcagtaatggactcctgaagtggctgatgatcccggttgccgtgctggtgctgttcgtcgccatccggctgttctcgggaggcagcacttcggcaccaccgaccgcggatgccggcgccaagctcacgccagcggaaatgaaggcgctgggcatcgagggcgataccccgcgcgacaccgtggcgacgctcgttgcccaagtgaagcagttgcgcaccgagcttcagaccgcgctctcggacaacaaatcccagcgcgaagaaaaccagcgactgcgccagcgcgagaactccattgaccagcgcatcaattcggccctcgactccgagcgcaccaacctgcgtcgcgaccaagagcaggcagccagcgcgcgtcagcagaccgaagggctgctggccgacctgcaacggcgcctggacagtatcggcggacgtggcggcggccatgccgacctgccggtgggtctggggctgcgtgacggcgacgaggccggcatggaaggcggcgtgcgctgggtcgaacccgacgatgcgaggaaagccgaggggcgcaacagcagtcgtggcacgggtagcggcatgagcttcccgacgagcttcggccccgcgcagagcacgttggaaaccacggcggaaaccgtggcgaacgcgggcgcacgcgccgcaggcgtgaagagcgccaaggcggtctataccgtaccgaccaattcgacgctgatggggtcggtggcgatgacggcgctgatcggccgcgtgccgatcgacggaaccgtcaacgatccgtaccccttcaaggtgttggtcggatcggacaacctgaccgccaatggcatcgacattcccgacgtggccggtgccgtgttcagcggcaccgcatcgggcgactggacgctctcgtgcgtgcgcggccaggtacgcagcatcaccttcgtcttccacgacggcacgatccgcaccatccccgaagaccgcgacggcaaccagcaaaacaaccagcagcagaactctcaaagtggaggcctgggctggatcagcgacccatacggcattccctgcgtcagcggggagcggcgcagcaacgcccagcagtaccttggctcgcaagccctgattaccgccgccggtgccggcgtcgcctcgctgatcgacagcgacagcggccagatgtcctacgtcggcgccgacggctccatcggcagcgtcggtatctcgggcaatgaagccgtgggccgcatcctggccggtggcgtgcgcgacatggccgactgggtgaacaagctgtacggccaggcgttcgccgctgtctatgtccagcccggcgcgaaggtcgccgtccacctcgaaaagccgctcgccatcgacttcgatcccgaaggccgcaaggtcgatcaccgcgcaggagaaagccatgctctcgaacttgaataa

SEQ ID NO: 338987 - DNA, 927 bp, Pseudomonas aeruginosa
atgaagcatcctgtactcacgctgctggggctgttggccgtggccgccgctcctgctgtccaggcagtggagatcctgcgctgggaacgtatgccgttggcggtgccgctgaaggtcggccacgagcgcatcgtgttcatcgaccgcaacgtccgcgtgggcgtacctgcgggcgtcggcgagcgcctacgggtgcagagcgcgggcggcgcggtgtacctgcgcgccagcgagccgatcgagcccacgcggctgcaattgcaggacgccgacacgggcgcgctgatcctgctggacattgcggcggagccagccaaggacggcgaagccgagctggaaccagtgcgcatcgtcgagggcaacagcaccccggcgcgctatggcgatcagcccggcgatgacaacgaagctccggcgcgcgcccaggaccaggccggcgcgcgagcggcgcgacgcgagaccccggtgtcggttgtcctgacgcgctttgccgcacagaacctctacgcgccgctacgcaccgtggagccgctgccgagcgtcatgcgggtgaacctgcgccgtgacctcgacctcggcacgctgatgccgacgctgcccgtgcgcgcggtcgcgctcgcgtcatggcgtctggaagaccagtgggtgaccgccgtgcgcctgaccaacagcagcagcggctggatcaccctggacccgcgcgtgctgcaaggcgatttcctcaccgccaccttccaacacgaggcgcttggcccgcgcgggacgcccgaggacacgaccgttctgtacctggtgacgcgcgggcgtggccttgcgcaatcgctgctaccagcggtcaaccgcttcgacccggccgtgcatctcccgcaaccggaagccggttcccaggatggcaccgaccgcaaggaggtccgccatgcgcagtaa

SEQ ID NO: 338988 - DNA, 399 bp, Pseudomonas aeruginosa
atgtctgagcagcagcacgtccgtgcggacgggaccgtgacgttccttccgcaccggctcaaccgccaccccgttgtcgtgcgcggcctcaccgccgacgagctgtggatctgctgcggcttgtccggcgccgccggcctgctggtcggcgcgccgctgtcgtgggtgttccgcacgatcgcgctagctcccacgttcgtcgtcctgggcgtggccttgggcgtgttcatcggcggcggcattcttcgccgcctcaaacgcgggcgtcccgacacctggctgtatcggcaactgcaatggcgcattgcgacacgtcatccactgatggcgggttgggtgggcggccatgtgctgatctcgcgttccggcttctggaccacccgaaggagcgcgcgatga

SEQ ID NO: 338989 - DNA, 360 bp, Pseudomonas aeruginosa
atgcaaaaccgcatcctcaattcccgtcttgcccagcgcgccgccgtggccctgggcgccgctgcgctgcccgtgctgtcgttcgcgcagggtctgccgcaattggagaacccgacccgcggcacgggcaacggcatcatggaaacgatccgcaactacggctacgacatcatcatgctcgtagccctgctggtggtggcgtcgatgttcatcggcgtgtgctaccacgcttacgggacctacgcggaaatccacacaggccgcaagacgtggggccagttcggcctcacggtcgccatcggcgccgtcctgctcgtgatcggcatctggctgctcaccgaagccaccggcatcctgtaa

SEQ ID NO: 338990 - DNA, 234 bp, Pseudomonas aeruginosa
atgaacggcgcccaggtctcggcatttcaagccaacagcggcatcgcaccttcagcgatggcgaccgtcctggtcggcgtcgtgttcgcggtcctgctcgtctggggcgtctgggccatgcgaacggcctacgtggggtggtccgagagccgcctcaaccagcgccagttcctcggcgtctgcatccgattcgtcgcgatgtacctcgtcctgactttcttcctcctctcctga

SEQ ID NO: 338991 - DNA, 384 bp, Pseudomonas aeruginosa
atgttggctccgatctggctgcgcgccgcgcatcgcggcgtgcccacttttctcgtgacggcccttgtgttgggccagtcctcgatggccttggccgagtccccagcgcagcgtcaggagctggtcgcagcgctgcgccaactcgacgcgctggagcgcacggtcgccgacagcgccgcgcatgcccccatccagccgggcgagcgctaccacttcgactacccgaggctgctggctgacctggcgcgcgtgcgcgccggcatccaggcccatctcacaccgtcgcgcgcccagccgcgcgacccgtccgaattggccggcgactaccgcacggagcgggtcgtcccgccatcaccgccgacgaccgcggagggcaagccatga

SEQ ID NO: 338992 - DNA, 2190 bp, Pseudomonas aeruginosa
atgtcggggaaacagccggtcgaggttctgctacgcccagcggtggagctatacaccgtcgcggcgtgtgcaggcgccgcgtttctgtgcctggtggccccatggtcgctcgcgctgagcccgtcgatgggcgtcggcagcgcgctggctttcggcgcttacggcgcgatccgctatcgcgatgcccgcgtgatcctgcgctaccgacgcaacatccgccgcctgtcgcgctacgtgatgacgagcaaggacgtgcccgtcagccagcagcggcttttcatcgggcgcgggttcctgtgggaacaaaaacacacccataggctgatgcagacgtaccggccggagttccgccgatacgtcgagccgacgcctgcctaccggctggcacggcgactggaggagcggctggagttcgcgccgttcccgctatcccggctgtccgcgctcacgggctgggatgctcctttcaacccggtgcgtccgctgccgcctgtgggcggcctgccacgcctgcacggcatcgaaccggacgaggtggacgtcagccttccgctcggcgagcgtgtcgggcactcgctggtgctgggcaccacgcgcgtgggcaagacgcgactggccgagttgttcgtgacccaggacatccgccgcaagagcgctgccggcgagcacgaagtcgtgatcgtcatcgaccccaaaggggatgcggacctcttgaagcgcatgtatgtcgaggccaagcgcgccggccgtgaaggcgagttttacatcttccacttgggctggccggagatcagcgcccgctacaacgcggtgggccgattcggtcgcatctcggaagtcgccacccgtatcgcagggcaactctccggtgaaggcaatagcgcggccttcagggagttcgcgtggcgcttcgtcaacatcattgctcgtgccctggtggaactgggacagcgcccggactacatgctgatccagcggcacgtcatcaacatcgacgcgctgtttatcgagtacgcccagcactacttcgccaagaccgagcccaaggcctgggaggtgatcgtccagatcgaggccaagctcaacgagaagaacatcccgcgcaacatgatcgggcgagagaagcgcgtggttgcgctggagcagtatctctcccaggcgcgcaactacgacccggtgctcgacggactgcgctcggcagttcggtacgacaagacctacttcgacaagatcgtcgcgtcattgctgccgttgttggaaaagctaaccagcggcaagatcgcgcagctcctggcaccgaactattccgacctggccgacccgcgcccgatcttcgattggatgcaagtcatcaggaagcgcgccatcgtctatgtgggactggacgcgctgtccgacgccgaggttgccgcagcggtcggcaactccatgttctccgacctggtttcggtcgcgggccatatctacaagcacggaatcgacgatggcctgccagacgcctcggctggcgcgcgcgtaccgatcaacgtccatgcggatgaattcaatgaactcatgggtgacgaattcgtgccgcttatcaacaaaggcggcggcgccgggctgcaagtcaccgcgtacacgcagaccctctcggacatcgaggcccgcatcggcaatcgcgcgaaagctggccaggtgatcggcaacttcaacaacctgttcatgctgcgcgtgcgcgagactgccactgccgaactgctgacgcggcagttgccgaaggtcgaggtctataccactaccatcgtctccggggcaaccgacagttcggacatccgcggcgcgacggatttcacgtcgaacacccaggaccgcatcagcatgtccagcgtgccgatgatcgagccatcgcacgtagtcggcctgccaaaaggccaatgcttcgcgctgctgcagggcggccagctttggaaggttcgcatgccgctgccgctaccagacccggatgaagtgatgccgacggacctgcaacaactggcagggtacatgcgccagagctacagcgaggctacgcagtggtgggagttcaccagttccccggccttgcaggatgcggccttgcccgatgacctgctggatgatgctgctccagccgagcctgctgcggtggccaccgacaccgaccacagtggcgacgaggccgcgccgtga

SEQ ID NO: 338993 - DNA, 540 bp, Pseudomonas aeruginosa
atgacaaaatcccatctggccctgcggggcctgcttgtgctgctggcaggtctgccgctggcatcgcgtgccggcgatccgctgatcgtggtcgaagatcgcggtggcacgtcggcgctgccgtactacgaggccctcaacctccaggcgcgcgccgatgtcccgggccggccgcccattccgacgccacaggttcccgccacacccgcggacgaggcagcgatgctgccggtgcgtagcgccaagctcacgcccggcaccgtcgcgcggcgcgtgatcgaagcgcccggcctgcggccgttcgtggtcatcggcgacgacgacgcctcccgggcctggctgcagcgccgcggcgtcgctttgcgcgaacgcggcgcggtcggcctcgtggtcaatgtcgagaccgcgcagggcctggcacggttgcgtgccctggtgccgggcgtgccgctcgcgcccgtagccggagacgacctggccgatcgcctggggctgcggcactacccggcgctgatcacggccaccggcatcgagcaatga

SEQ ID NO: 338994 - DNA, 606 bp, Pseudomonas aeruginosa
atggcagcgccagccgtagcggccacctccttctcgcagctcttgtgcgcactggtgctcgctaccggcctgtgcgcctgcgccgtccatgcccaggagattccgccacctgcctaccagctcgccgcccagcaggcgggcatcccctcgaccgtgctctacgccgtggccttgcaggagagcggcgttcgacgcaacgggcgcatcgtgccgtggccgtggtccctcaatgtcgccggccagtcgcgccgcttcgccacgcgcgccgacgcctgctcgggcttgcaacaggcaatgcgtaccacgccccacacgcgcatcgatgcaggcctggtccagatcaacctcggctaccacaagcatcgcttcaccagcgcgtgcgacctgctggacccgtatcgaaacctcgccatcgccgctgaaatcctgaacgagcagcacacgtccggcgaagactggctgctcgcgatcggccgctaccaccgtcctgcgggcggcgagcccgccgcccgctaccggcgcagcgtgtcgcgccatctcgcgcgtgtgcagggcgcacatccaaacgccgcggtgctcgccgcgcgccaggagacttccccatga

SEQ ID NO: 338995 - DNA, 726 bp, Pseudomonas aeruginosa
atgaagccgtcgatcatcctttccgcactcctactggcttcagtccagtggcccgcgtgggcgcaacagccagccacagctccagcccgcaatgcgcagagccaggagcgcccgctggccgcccgcgtcctggacgaccgagtagcaagcaactgggggctccaaccccaggaatgggcgcgttaccgcgagctgatggatgggccgctgggcatctactcgccaaacctggacccgctgtctgccctaggcatcgaggcacgcaccgacgaagaacggcggcgctatgcagagctgcaggtgcaagtcgaggctcgccgcgtcgagaagctgctcgcctaccaacgtgcctacgacgaagcctggcagcgcctgaaccccggcatgcagcgcgtgaacctgcccgacgacgggccgggcaccggcaccgcgcgcggcagcggtcgcatggcggtgttcgtcaaggacggctgcgcggcctgtgggcagctcgtgcagcggctgcaatcctcgggtgccgagttcgacctgtatatggtgggcagccgccaggacgacgcacgcatccgcgactgggccaagcgcgcgcagatcgacccggcgcgcgtgcgcagcggcagcattaccctcaaccacgacggcggccgctggctgtcgctgggcctgcccggtgacttgcccgcggctgtgcgcgaggtgaacggccaatggcagcgccagccgtag

SEQ ID NO: 338996 - DNA, 642 bp, Pseudomonas aeruginosa
atgaacactccccaatcctcgcggcgcccggctgccgccgtggtggcgcaaagcctgctctggctctggctgctcggtctcagcgtcatcgtggccctcggctaccaggcgatgagcgaccaggccgacgaggaacggctcgactcccgtttgcaacgcctcgaagcgcaggcggtggccttggccgagaccatcggaaccatccagcagcgtccgcaggtcgcaacggcggcggacctcaaagacacccgccaaatcctggaagcacgcgcttcccaagttgagaagacattgagcagctacgcagcagccgacgaccttcaggcgctgcgcgcggagatcgagcagatcaagacgcgtcagaccgccgcgcgtgcagcaacacccgcccagccgcgcacatcgagcaagcccgccgccaagcctgaaccgccgccactgccgttccgcatcgtcggcgccgaactgcgcgccggccagctcagtgtgtccgtcgcgccgagcagcggggacttcacgcccgaccagcttcaggtgctgttgcccggtgatgcggtcggtccatggcgcttgcaggcaatcgatggcagcgctgcggtgttccaagccggcgaacagatccgtcgcgtggcgattccctga

SEQ ID NO: 338997 - DNA, 600 bp, Pseudomonas aeruginosa
atgtgcccctctccaccctggtttcaccatcccgaacgccgcctgctgacgggatttctcggcctgctttggtcggtactggctggcggctgcgcgacaacgactgcgccgcacgcacccgatgccttcgaggaagtctcgaccgcgcccgaacccgaagcgcccgagtacatccccgttgtgcgctatgggcgctacacgttggtcgagctggcccccacggcggcgcagcgcgacctgctgttgcagaccatcgatgtttcgatgccggcggatgcccgcgtcacggtcggcgatgggctgcggcacgtgctcaagcgcagcggctacagcctgtgtcaaacggcacatgccgtgatcgagttgtatgcgctgccgctgccggcggcgcacctgcatctcggtcccatgaccttgcgcgacgcgctgatcaccctagctggtccggcctgggaactgcacgcggatgaccgcgcacgacaaatttgcttcgagcggcccggcgacagcatggccgtcgaatccatgcctgaaccggccgccgccgatgcggtgcagaccttcccactgatgccctccattccaggcggccagccatga

SEQ ID NO: 338998 - DNA, 870 bp, Pseudomonas aeruginosa
atgaacaccaatacccaagcaacgaccaaagtcgtcagtgctcgcctcacgctggacgtgacttacctgctcaacggcgaggccgaatcggaaatgctggcacggctgcgcagcatgtgcgaatacgccatcgatgagggtctgctgaccggcgagaccgccgcggaagtggataagtggtcgatcgatgtgtccgagcagccctcggaagctgagagtgacaccctggtaaccgagatcgcctccttcatgcggcagcgcatcgaagacggcaatctgaacgctgaagacatccccgtgcgcctggcgcgctacggcctgatggctcccgaggcattcgccgacgagatgcgcgagcgcatgggtatggccgacgaagaacccgagagtcaggctgtcatccctccgaccgagcctgctgaaggcggcgagatcgagatgcaagtcgctgtcgcctgcgtcgatgcttccggcacccccaacatgccggtcttcaaggtcagaaccacccaggaggaatacgaccagggtgcccactaccacaaagccaaggatctggccgaagaagcccggtacgaagggccgttcgtctgcttcgacgctgccgaatatggccccatcctgtcggccgcccgcgaactgggtcttgtcccgcaggtcgtcgtggtcgatatgaccgacggccagatccactccatccgctgcgacaccggcgagatcaaagtcgtctgctacgacaccagcgataccgacgagtactcggtggcgatggcggaccggccgctcggcgagaacggccaactcgtgcgctgctgggcgcatgcccaactggcacaggtcgatcctggcctgaagctggctcggggttga

SEQ ID NO: 338999 - DNA, 2280 bp, Pseudomonas aeruginosa
atgtccctcgatctcgaaaccaatgccgctgaagccgcgcccgtacagggcgaactgctcgacgcggaatcttcccctctgaccctgagccttcaggatttcgtcggcgagttcggcgacgaactgctcgacgccctcaacagcgccaacccgccggtctataccggccaaccgcaagcacatcgccagctcatcgtcgccagcctcaagcgcaagctgttccaggcccaggccgaagtcgtccacgccgccgcggagctgctgattgaccgtggcgagcgcgccgcgatcgtcaatggcgagatgggctgcggcaagacgaccgtcggcatcgccacggccgctgtgctcaacgccgaaggctaccgccggaccttggttctctcgcccccgcaccttgtttacaagtggcggcgcgagatccaggagacagtagcgggcgcgaaggtctgggtgctcaacggccccgataccttggtcaagctcatcaagctgcgcgagcagttgggtgtgcagccgaccggccaggagttctttgtcctggggcgcgtcaggatgcggatggggttccactggaagcctgtcttcacccagcggcgcacccgccacggcgacgtggcggcctgcccggactgcggcacggtcatcaccgacctcgacggcgagccggtcaacccggtcgcgctcgaagccgaggagtaccgcaggaagtgcagccattgcgcagcgcccctgtggacgctgatccgcccacgcagcctgtccggcagcgaccagtcctcggccgtgctgaaagccttgaagcgcatcccgaccatcggggcagtcaccgcgcagaagctgatgcagaagttcggagacggcttcctggcctcgatgctcggcgacaacatccatgagttcatcaacctcatggacggcaacggcgagctggtgttttccgaccgtcaggccacccgcatggaacgtgcgatggccaacatggagttcggctttggcgaaggcggctaccagccgtccgagttcatcaaacgctacctgccgcaaggcacgttcgacctgctcatcgccgatgaggcgcacgagtacaagaacggcggcagtgcccaaggccaggccatgggcgtgctggcagcgaaggctcgcaagaccttgctgctgactggcacgctgatgggcggctacggggacgacctgttctacctgctgttccgagcccttccggggcggatgatcgaagacggctaccgcccgaccacgagcggcagcatgacctcggccgcgatggcgttcatgcgcgatcacggggtcttgaaggacatctactccgagagcaccggcacggcgcacaagacggccaagggcaccaaggtatcggtgcgcacggtcaaggccccgggcttcggccccaagggcgtcttgcgctgcatcctgccgttcacgatcttcctcaagctcaaggacatcggcggcaacatcctgccgccgtatgacgaggagttccgcgaagtcgcgatggacacggcgcaagccgcggcctaccgcgatctggcgggtcggctgaccgcggagctgaaacaggctcttgcacgacgcgatacgaccttgctgggtgtggtgctcaacgtgctactggcctggccagattgctgcttccggtcggagaccgtggtgcatccgcgcacgcgcaacaccttggcgttcgtcccggctcagttcaacgagttcgagatcagccccaaggagcgtgagctgatcgacatctgcaaagaggagaaggcgcagggccgcaaggtgctggcctacacggtctataccggcacgcgcgacacgaccagccggttgaaggtgctgctggagcaggaaggcttcaaggtggcggtgctgcgcgcaagcgtggatgccagccgccgcgaggactggatcgccgaacaactggaccgtggcatcgatgtgctcatcaccaaccccgagctggttaaaacgggactggacctgttggagtttccgacgatcgtgttcatgcagtcgggctacaacgtgtactcgctgcagcaggcggcacgccgctcctggcgcatcgggcagaagcaacccgtgcgcgtgatctaccttggctacgccggctcctcgcagatgacctgcctcgaactgatggccaagaagatcatggtctcgcagtccacctcgggcgacgtgcccgaatcagggttggacgtcctgaaccaggatggtgattcggtcgaggtcgcactggcccggcaactggtcgccgcctga

SEQ ID NO: 339000 - DNA, 261 bp, Pseudomonas aeruginosa
atggacccgatcctggctgcgctccccgcctcgctgttaaagctcgttgaaggcagtttgtccaacgacgaagtttcctccgacgaggaaatgctggcgtacttcatcgacaacggcctcaccgaggagcaggcacggcaggcgctgacctatcgcgaccagtacctcaacaacatctacctggacggcttcacgccgatcaccgcggtggacgaggcgcttcacttcaacccgcacacccggcagttcgagccggactga

SEQ ID NO: 339001 - DNA, 408 bp, Pseudomonas aeruginosa
atgggctggtatttctctccccaatcgcggtctgaactgatcgccgaactgatcgcaccgcaggagaccgagcgcgccagcgtgaaggtcatcgcccacacgctgcgcggcaacgtcctctggtccgtcgcggaagtgacggccagggccgaaggcgtgcatcgtgatctcgcgccgggccagtccctgcgctacatccgctgcgatcttctggagcgcagcggcaaccagtggggctacaagccgctggacgagtccatgcacccgtactactactcgtgcccgctgtcctatctggacctcgcaccggagcagtccgccgactggcgtgcaggcgttcgcgcctaccacgcgcggcgtcgtacacccacggttgccacggcacccgccgcggcactattggcctga

SEQ ID NO: 339002 - DNA, 324 bp, Pseudomonas aeruginosa
atgtccaccatcacttgcgatacaccccgttccgcgctggacgaaaccgcgtggcgcgccgtttgcaagacggccgccgagcatgcccaacgtggttgcggcctgtcctgggatcactgggtcacgcttttcagctcggagatcgacgcgcaagccagtcgattgccggaaagccagcgcgttcatgcgctggaaatcgcgacccaggaatgggactacgcaacacctgccgaacggcaggaaacccaggactggctcgctgaaaacggctgctgttcgcatgggatcacgctgggttgctgcccggccggttgcggttcctag

SEQ ID NO: 339003 - DNA, 690 bp, Pseudomonas aeruginosa
atggcagtcacatcggcacccgagaaatcggccactcccatcatcgtcccgggccagctcgcgctgcgcaccattcatggccgcaacggaaagttcaatgttggcaagctcgaatgccaactcggaaaattcacgattaaagacgcggagttggagcaataccccgagggcaagtatcaaggggagttcgtccttcgctacatcttcctcaaaggctatccgatcagcgacggcagcatgcgtttcgagatgcgcgccaacctggacggtatgacacttttcggcatcgacaagctgagcaaggccgaagcacatagcttcgccccgcaggaagtcgatccgctcgatgaagatcaagggacacagcctgcgacaacgccggccaaacccgccaaggcatccaggtccgccaaacctgcacccgtgcagacgtccgcggacccgctggtcgataccacgcccttcggcgtggacgcgccgcctgctgcggctgctgcccccggcagcaccgaggatggcgacgccgcgctgttcggcctgttgtggccgctgggcgagtctgtgaagctggattcgaccatcgaccgccgcgccctgcgcgcccagatcgcccgcctgggcgaactgggctacgcgctggacttcaagacgcaggagtggagccgccaggccgaactgcaacctgcgtga

SEQ ID NO: 339004 - DNA, 918 bp, Pseudomonas aeruginosa
atgaacaccacgtccaacgagaaatcgtatttcgacctccacacctcgggcatcggctacatccagcgtgtccgtgaagtgcctgtccggggcggccgccgtgcgcagcctttcctggcatgcaccgttgccgcgctggtcggccccgccagggaccccagctaccgctacttcgacgtcaaggtctcgggtgccgaggccaagaacctcgtccagcgctacatcggcgttgacgatcccaagcagcgcccgctggtgcgcttccgcctcggcgacctgtggggcgatgcgtacatccgcgacaagggcgagcgcaagggtgaagccgccgcgtccctcaaggcgcgactgctcaaggccgagccgcttgaccgggccgaactggcttccatcaagcagcacgagctgatcacccgcggcatcggctacctcagccgtccgaaggacgtcacccccaaggatggcgatccgttcctgtcgtgctgcgtcgcggctctggccgggcctgtcggtgaaccggactatcggtacttcgacaccatcgtcgccacccctgaagccgagcacctggttcgccggtgcgtgcaggccatcgaaggggaccgcaaggtgctgatcgccttcaagttgaacgacatgaagatcgatccgtacatccgcaccaagggtgagcgcgccggggagccgggagcgagcctggaatcgacgctgatccacatcggtctgatcaagatcgacggcacccaggtctatccgacgagccaggcgcaagccgaggcgtcgcaggccgaggacgcacccgcgcccgaagccgaggacgccgccgacaccgctgccgaccagcctatcgagcccgccgagcgcgagcccgcaggtgaagtcgaagagcaggagccggcattggctgcttcgttctga

SEQ ID NO: 339005 - DNA, 354 bp, Pseudomonas aeruginosa
atgtcactgcgattcagaggctccgacctgcgccccgtgcttgccgaagccatcgccaaccaatgccgcgtcgccctggccaaggaccagggcgtgtacttcctcgccgagcgcggagagcgccgccccgatggccgcgtgaagctgctggcctatgccgtcggctgcaacccggataccgacccgttcgatgactggtgggaactggcacgcgccgagcttggcggcgacgacttcggcgagttcttcgacccgaaagacagcgttttcactcgcattctgcaaagctcagatgatctggagctgtccgccaccgctacgtatctgtcgctggcggcggtggaatcggcgtag

SEQ ID NO: 339006 - DNA, 813 bp, Pseudomonas aeruginosa
atggaccgttccctcatcaaatccatgatgccttcgcttgtcgcgggccatgtccctcgcaacgtgcgttcgttcaaataccgcgtattcgatgatcagccgcagtcctcgacgttgggcttcgccattgaccctcagcccttcaacggcaaggtagtctccgcgaccgacgatgccatcgtcgtcaagctcaagccttccgagttcgccgtgctcgatcccaacctggtgaccaccgttcccagcgagggcgccaaggtccatgtccaaccctacgcccggcgacgtttcgacgggcttcgcgcggacaccccggaagtcgtcaccgagaagacttcggatggcacgccttacaccatcacgaggcatatccttggcaaagcacccgccaagctgcccattcccgagccgcagtgcatggagctgggccaactcatcgagcagttggaggagatgcccgcgcccgacgggttccggtgcatcacccacatgctggtcgatgcaggtgcccgcgacttcgcctgggtcgatcccaagccctccaggatcatcgagaccccgccggcgatcagcttcacggtctcaaccaccaagttcgagggtcaggtgacgatcctctacgaccgtggcggcgacacctacgtggtggagctgcaccgcgacggtgagttggtcgataggcacgacgaggtgtatttcgacatgctcggtgaagtgctggagcggctcatcgacgacgggcgctggcgcctgatcgacgtgagcgtgatcgacgccaaagcctttcggcaacgtcaggcggttccagcctga

SEQ ID NO: 339007 - DNA, 279 bp, Pseudomonas aeruginosa
atgttccccgacctcatctcgcgcacgccagacttcgagcaccagctcggcgcctgcgtcaatgccatgggccaggacgacgccatcggccagatcctggtattcgagcgcatgagcggcacgctgcacatgcgccatatcgccagcgccgacctggtggacaccgacattgacgactacgaaatggtcgtcttcgacggtggcaacaccagcggcgatacatggaagcatgtcttcttcccacgtcagcgcgagcactacttcgtgtacgaagcctga

SEQ ID NO: 339008 - DNA, 738 bp, Pseudomonas aeruginosa
atgtcccagaaacccaatccctttctccgcggctactggaatctgaaaatcgtccgcacgctgtgcatcggctacgacgacggaagcccgcatgtctggcgaatcatccacgcgagtcaaaagcacttttccgacgaggaactgatttcatcctcgtgcatcgtcaccagcgatttcgccgtggtcaggaatggtcccgaacccgtgagtgccgaggtgctggccgaatgcgataccgcagaaggtgtcagcggcgaaggtgtaatcggtgccgtggtctatgccatccatggcgacgacttcgacggtcgccccatccacgtcggcgacgcctattcggcagaggcagcgcgggaagtcgtacagcgcctgagtttcgagaccggctactacagccggtgctgggaaatcagcagcgcacacatcagccaagaaaccggccaatacctcgccaacctggcagacctcgctacgccggaggcattcctgttcatcgcgttccgggttccgtacagcccggcgatcggcatcaagctgatctccactccctggacggacaagaacctggaccacgccgagggcatcagtgcggagcagcttcgccaggagcaccgaagcaagggtatgccggatgacctggcgaacgtcattgaactggctggccaggccgacgtgcgcatcctgattctcgacgccgacgcacccgtgctgttgggcctgccgttggccgaatcctag

SEQ ID NO: 339009 - DNA, 687 bp, Pseudomonas aeruginosa
atggcaaacaactactacgaaggcacgggcgttctcgtgctcaaccgcgttactcccgtcatcaaggcactgttcggtgctttcgcgctcgacgaaaaccatcccggcaatgggcaggcctacatcgcccagatcgccgaaaccaatgatccacgctggacagatgtgctggacggtctggaaaacctggccacacaactcggcatccccatgcccgacgacgaagagttgtcgattccgcctctgcttgaacggctggccgcgcacttcggtgctgaccaggacggggagctggagaacctgatcgagcaccaccaattcgaggacggcgccgacctggaagccctgcttctgatcgctacccgcttcgatgacggccataacctgaccgccatccagtttgagggctgctggtattgcagcaagccaaggctattcgagttcggcggcaacggctgctacctgagccgtgaggtccaggtcttcagaacgtcctcgcaggcgcttcaactcggcgatcaactgcgcaacaccatcctggccgccgacatcgaagaggcctcagcgttgatcgcgctggaggccgccaacctgcttgccggcatcaccgatgagcaatttcgcctaaatgtgcgccatcgcatcgccgaacggctggttcagacgccaacgatcagcgccgactga

SEQ ID NO: 339010 - DNA, 393 bp, Pseudomonas aeruginosa
atgaaccagctactgccgcgggaagtcgtcgatcagatcatgcgggaagagcagcatttcgctgccgcgccccaagccttcttcgaggcctggaagcgcggtgtcgagattgctggtcccgagtggttcggcgacggcacccgtgaaggcctgaaccaggccaagaccaagtgggatttgcgtcccgacatgctgcggctcaacgatgccctcggcgtcctgagcagcggcgaacgcatgttcctgtccgccatggtcagcttctacaacgcgcgcgagggcggtgccatgctcaagcgctgccgcttccacgggctgtcggacttcgacggtctcgatctggaacgccgcaaggtcatcgccgacctgctggtgaactacagcggttggtga

SEQ ID NO: 339011 - DNA, 213 bp, Pseudomonas aeruginosa
atgtcccagcaagcctctttcggccagttggccctgacctactgcggcaagttcctgccgctcgaagtcttgcaaagcgccgccggccactacatcggcacgcgcgataccgaaggtcccgtttcgcgggaatcccgcgagtacttccgcagctatgccgcggctcaacgcgccctcgaaagaggcggctggtcccagctcgccattccctga

SEQ ID NO: 339012 - DNA, 558 bp, Pseudomonas aeruginosa
atggacaccatcaccaagcaagaccgcatcacgctgaagaacctcaaggtcgccgacttcgccagcgaggaaacgctgtgcttcaccgcgaccatcgtgttcgacggcactcccatcgccgaggcccgcaacgacgggcatggcggctcgacattcctccgcgcgctcaacggcaagacgacgctgctggctcaggccgaagcctttgccaagggcttgccgcctgcgccgctcgatctaggccaggagggtgaagaccctcattacatcgacatgacgctcgacttcctggtcgatgaactggccgatgccatgcacgcggagcgcaaggtgcgagccgccttcaaccgcgacatcggcaacaaggtgctgttcatcaaggacggcaaactgctgttcatcaaaggcatcaagctcaaggctatcgccgaccgcaaggcgtacttcgcttcgctgcgcaccaggcaggcccagcccatcgtcatcctcgccgagcttccgcccgagcgggcattcgacctgtggaagcagcatgtcctgggcgacaagcccgattga

SEQ ID NO: 339013 - DNA, 1608 bp, Pseudomonas aeruginosa
atgaacccgcaaccttgcacccttcgcggtgcgccccaggccgcgccactgctgtacggcagcgtgtgcagcggcatcgaggccgtgagcctcgcatggcaacccctcggcctcaaagccgcgtggttcgccgagatcgagccgttcccgagcgccgtgctcgcccaccgttacccccatgtgcccaacctgggcgacatgaccgcgatcgcccgtcaggtgcgcgccggcaccgtgccggcgcccgacatcctggtcggcggcacgccgtgccagtcgttcagcgttgccggcgcgcgccaggggttgaacgacccgcgcggcgccttgacccttgcctatgtggagcttgcaaatgccatcgaccaaacccgccaccaagaccgccgcccgccggcaacgctcgtctgggaaaacgtccccggcgtcctcaacgaccgcagcaatgccttcgggcatttcctgggcgcactggccggagaaagccgtgcgctccagccgccaggggaaaaatgggcgcacgctggttgtgtgtctggaccccgccgccgcatcgcctggcgcgtgctcgacgctcaatatttcggtgtcgcccaacgccgcaagcgcgtgtttcttgtggcatgtggtggtgatgacctcgatccctccgaagtactttttgagcgcacaggcctgcgcggggattcttctgcgggccgcgcgccgtggcaagaagctgcccgcgctgctggaccgggtgctgcagcagcaggcggatacgcaggattcgctggactgaaccagccctacggcaaggtcacgacgacgttcggattcagcggcggcattggccccgtcgatgttgcggcatgcctgatggccgcgggtcccaagcacgacatccgcaccgagacgttcatggtgcagtccatcgccggcagcatcgcccacaccctcgacaccgccaacaacggcaagggcagcagcgaggacggtacgggaaagggcgtgccgatcatcgccttcaccgcccagggcagcggcgcggacgccacgatcgacctgacgccgacgctgcgtgccggcgggcatcgcaacagccatgcgaacgcaggcgtcgtgcccgccatcgccttcgcgcagaacaaccgcggcgaagtgcgcttcgagtcgggccatggacaggtgtcttgcaccgtcctgtccaacggcaagccgggctacggtgtgccgatggtggcctgcgttgccctgcggggacggacgcagggtcttgctgccgaactgggcggaagcgttgcggcggcgttgcgtaccagcggcggcggcgcagacaagccccatgtcctggcccccgacttcgaggcacatttccgctacgactggaatgaatccggtgcagcggactggtcgcaatggcgggtgcggcggctgatgcccatggagtgcgagcggctgcagggcatgcccgacgactacacgctgatcccgtatcgcggcaagcctgccgcagacgctccgcgctacaaggcgattggcaactccatggccgtcccgtgcatggcttggctgggcaaccggctggtgcagtgcctgcacaagacggactcgaccgcttcggattga

SEQ ID NO: 339014 - DNA, 441 bp, Pseudomonas aeruginosa
atgagcacgcatttttctggcgaaggcaacatcggctcgccaccggagtaccgcgaattccccaacggcaatgacgaacccagccgcttgctgcgcctgaacgtctatttcgacaaccccgtacccaagaaggatggcaccttcgaggaccgcggcggcttctgggcgccggtggaaatctggcaccgcgacgccgagcactggaaggacctgtaccagaaaggtatgcgcgtgctggtcatcggccgcatggagcgcgagccttggacggacaacgaagatcagccgcgcgagacctggcagatcaacgcgcgcagcgtcggcatcctgccgtaccgcatcgagtccgtggccctcagtccgaagccgcaggaggcagaaccgaagccacaggctgcccaggaatcgaccgcgccgaaggaggcgaagcgcaggaagtga

SEQ ID NO: 339015 - DNA, 1233 bp, Pseudomonas aeruginosa
atggccgtggacgacaccgcaccacgccgtggccccgtcgcactcgcggatctgttcgatgctgccctgaaagacctcgcgcccaagcccagcctcagtgcgccagcacccgtgcctacgccgacgcccgccacgtcaggcgatgccttcctcttcagcggcaaccggcacgagaccgtgccgcggcggctgttcctcgaccgtcgcctgacgccgctggagcgcaacgcctggcaggtgttccggctgatgctcaacgacgacggcatgacagccttcccgacgtatgagcagcttcgaccctggctggcgtcgatgccctgcgccgggcaggcctcgcatgaaaccgtggcccgagcgttgacgctgttgcgcctcacccgatggttgagcctggtacggcgacggcgtgaccccaagaccggccgcatcctcggcaacctctacgttctgcacgatgaaccactgacgcccttcgaggccatgcagctcgacgccgactacctggcactggtcagccagtccctcggccattcggccaaggctgtccagatggtcggtctgaacaccctcaaggagatcgcggaagatccgatgctctccggacgcacactgccgtcgcggctacaggtcctggccgaacgcctcgccagccaaggcatcacggccgccgaaagttatccacaggaggatgccgcccacgattccgaagaaggagcatcgagccttcttcggaatgcggacgacccgtcttcggaatccgaagcaggggcgaaacccgcgccagacgcctctcttcggaatccgaagcaggcccgtacagtacgtagtagtcgtattaatgaagtacgtactaccgcgcaggcgcgcgcgctgggcgatctgcaatggcccaagcgcttcacggaactgaaggcagagcagcagacaggtgccagggtggcattgcagcaggtcgatgccgcgctgagacaggccgtgctggacgactgggccgcacgatgcagcagtcatggcatccgcaatcctgcggggtatctgttcggcatcatccagcgcgccatccatggcgagttcaatgcctgggccaagaaagacgcgccatcggcacccgtcccgccaaacgagcggccaccagcagcaccgccacctcagccgcagggtaagccagtgccgccggaagtcgccaagcagcacatcgagcggctacgcaatctgctcgccagcaagtga

SEQ ID NO: 339016 - DNA, 1659 bp, Pseudomonas aeruginosa
atggctgagatcacctcccagcagatggctggcaagctgctcgcggccgggttcgagcgcagcggcccgtcagcctcgaccttgagcgacccgatcgccgacacccccatggtcgtgaccctagatcagttgcgcccctacgaccacgatcccaggaaaaaacgcaacccggcctacgaggaaatcaaggcgtccatccgcgagcgcggtctggacgcagcgccggccatcactcgccgaccaggtgagtcccactacatcatccgcaacggtggaaatactcggctggcgatcctgcgcgaactatggtcagagaccaaggacgagcggtttttccgtgtatcgtgcctgttccggccgtggcccagccgcggcgaagtcgtcatgttgaccggccacttggccgagaacgaattgcgcgggtgcctcacgttcatcgagcgcgccctcggcgtcgagaaggcgcgcgagttctacgagcaagaaagcggcaccaccttgagccagtccgagctggcccgccgcctcgccgccgatggcttcccggtacaacagtcgcacatcagccgcatgaacgacgcggtgcagtatctcctgcccgcgatccccaccgtgctctatggcggtctcggtcgccatcaggtcgaacgcctgtcggtcatgcgcaaagcctgcatgctcgcgtgggagcgctacgccaagggtcgcccactggttcaggacttcgacgaatttttccaggaagtgctgtcgcaattcgacgtccaggccgacgagttctccgcgcagcgtgtacaggacgagctgatcggccagatggccgagatgctgggtgtcgattacgacgtgctcgccctggacatgaccgaatccgagagccggcagcgcgccttggtcagcgacccaacgccgccatcgacgccgcctgcgttgccggagccgggaaccatcgcgcgcccacctgccaacactgcgccacccatcgcaggggctgcatccgcagcgccgcctgcaggccgacctgcggcaacgccttcgacgcgcgagagcgacacggatgccagccaggcaagtccggccaaccctgcggtgggtggcgatctgcttcgggagcacatcgtctcgccggcaccgacgaccgaacggctccagtccattcagcgcatggtcgccgaccagttgggtgatgcgctgccgctcgacttctcggcgagtgtcttgcagtccatccctgtgcaggctggcgggctctatccgatctccgatgtctggtacatcgatcccggcgtggacacagccgagcgcctgcgcatccacatcgcacagttcgcccgcgaaatcgcgggcgaggcagacctggacgagtgcattgatgaccgtgcagagggtatcggtttcgtctgccgggcccgcacccaaagctcggcaccgctgggccgtgccgtcctcgcgctgttagcgtgcctggccggtcagcggcccgccgacgtcggcctgcacgacgggcaaatcgtcatcgaactgccggcgctgctgcacggccagggtgatgcggcccagcgattgagcgatacctcgctggtcaagctgttccggctgctgcggctggcccggcgcctgctcgaccttgaagccggcgctgaaggcgttggaatgtga

SEQ ID NO: 339017 - DNA, 876 bp, Pseudomonas aeruginosa
atgcaggtcgtatccatcatttcaaccaaaggtggcgtcggcaagaccaccacggccgcgaacctcggcgggcttgccgcggacgcggggctgcgtgtactgctgctcgacctcgacgtgcagcccaccttgtcctcgtactacgagctaggccaccgcgcacctggtggcatctacgagttgctggccttcaacgagcgcgacctcgggctgcttgtgtcccgcacgaacatcgagggcctggacttggtgctctccaacgaccaccgaggcgagctgaacactttgctgctgcacacgccggatgggcgcctacggttgcgccatctcttgccggtcctggcgcctctctatgacctggtgctgatcgacacccaaggtgcgcgctcggtgctgctggagatggcggtgctcgcctccaacctcgcgctgtcgcccgtgaccccggaaattctcgcggcgcgcgagctgcggcgcggcaccatgcagttgctcgaagacattgcgccctaccggcacctgggcatcgagcctccacctctgcatctgctcatcaatcgcgtccaccctgtgtcagccaatgcacggctgatccagcaggccctgcgcgatcttttccaggaccacgccggcatccgcgtgctggccaccgacgtgccggccatcgaggcgtatccgcgtgcagctacgcgcggattgccagtgcatcgggtcgaataccgccagccgccgggcagagtcgccctcgccgcgctcgacaccatgcgcggcctcgcagacgaactatttccgcaatggcggcaccgatttgccatggtgtccggccgtccgccacaccctcttgatgccgggaggtcccatggcgaacgcacatga

SEQ ID NO: 339018 - DNA, 213 bp, Pseudomonas aeruginosa; identical to SEQ ID NO: 292136

SEQ ID NO: 339019 - DNA, 753 bp, Pseudomonas aeruginosa
atgcacgagaacaagaatgatgcaccaacatcaaaggtgttctatcgcccgatcgaagcgtccatccgctgggccgggctgctgcgatacgagcaggtgatcctggcttcgatttcgtcgccaaggcgcctgccgcagtcgttggactgtccacgttgtgacgagctgcggctttgcaccgaacgcatcttcgacggcatcctcaatggagaactgcccttcggacggaacggcatcacgacgcgcgattccgcgctgatcgactcccctgatctgacggtgcgccacgtcgatctgaagcgctggatgcgccagcactatcccgagcaacgaccgtgcttccttttctcccggagcgagcgcatcgcccatcccttcatctcggtggaaactgggcaggcgatgctagtcgagcgcctggccctgaagtccaccttggaccagtacaaacgccaactgcatgagctgcaggaaaagcacggagcgcttctcaagcagatggcgccctctgctggcgcacagtgcctgatcagtgatcgcgccgaagccacctacctgaacatcatcggcagcatgctggacctgatgctcggccagtcgccttccggcgttccgtactccagcttcaagacgcaggaggcggtggtcagcgcgttggtcgcccatcacagcggcgcaatggggatcgcggagcggacgctaaacggcaagttcgccacggccagacgccggctgcgtagcgcaacagtctga

SEQ ID NO: 339020 - DNA, 552 bp, Pseudomonas aeruginosa
atgctgctccaaaacggaaagtggagtagctatggcaagcacagcgaagagctcttgagcacggagaaaggattcgtcgcggcattcgcccttcgtttcgtacgccgccaggtccttgaatggagagtagctaccgatcactgcgcggcctgggtaggaatgatccatggcgagcagttggattgtttcagggccatcgtagatcaggccatcagcacgggtgcccggcggcgagcggaaaattgcccagtccaggaaatcctggtcggggccggcggtcgcctcggcgtctcggtcgtagatgacctgatcgcctttggtgagtgtggcgatcgcgccggcaccgtgctgctggaccgccacgaggatgtcgatcttttcctggtagagcaggcgctggcggatgacgctctcacgctcgtcgaggacctcaacggccaggagcagagcggtcagttgttcatcatccatccgggctgccactgggcgcgcaagcgccttcagaagaacatcgcgccccagaacacacggccgatgatctcgatctcttga

SEQ ID NO: 339021 - DNA, 294 bp, Pseudomonas aeruginosa
atgatgaactcgatcctcatgggattggactccctgctgtgcattctggtggtacttgccgcgctagacttcctgcgctccgtccacctgttcgagcgtccgatcctgagcctgtcgttctacctggtcgccctaggagccttcggcttgctggtcgagctggcaaaaggctactgggtcagcccttgggcggtggtgatgcacttcggcatcgttggctacgcctggacgcgccggaagcagatcttccaccaggactggcggcgcgatggggcggaacgacgcaggtgctga

SEQ ID NO: 339022 - DNA, 219 bp, Pseudomonas aeruginosa
atgtcggagttagttaagggcgacgaggttcaactgaagagcggtgggccgaagatggttatctcggaacttggagacttcagtcccatgggccccagggaaggcgcacgatgcgtttggttcgacaagtccaagaagatggaggacgtgttcgatatcgctgtcctcaagaaatattctgatcccggaatcggcaccgtttctgtgcgtagaggctaa

SEQ ID NO: 339023 - DNA, 1206 bp, Pseudomonas aeruginosa
atgcgaacaggtattttaggatttcagtcagcacgcctaaaacaattgcgcgcgtctactgggatgactcaagccaagcttgccgagcttctttcttgctccaccagtaatatctcgaagtgggagaagggggatagctttcctgagtcttctagcttcaagaagatttgtgagacgtttggtgttccagaaaaatggctgcttgaatcgccaattaggtccggagttactagacctgggttcttccgatcccaagtatccacttgtcgaggagcaaaagattccgccgaagctaggcttgaatgggttgaagaagtttcatataaactccaagaaagccttgagttcccggatatcaatatccccgcctatgatggtggcgacgtccggctgatccaagattgcgagattgagcatttagcggaagagtgtcgagacaggtgggggctgggcagggggcctatctctgatgtagtccatgttctggagagctatggcgccgtagtagccagatcggaaatcggctacgtgaaaatggatggcgtttctcggtggtctgatgtagacaacaggccgtatattttgctggcttctgacaaggctgctccagctagaagcagatttgatgctgcgcatgagctaggtcacctggttcttcatcgaggaataggtgccgacgagtacaaggcaaattatcacctacttgaatctcaggcacatagatttgctagcgcatttctgatgccggccgagagcttttctaatgagataaagtggccaaccttggatgcttttctctctctcaagcctcgatggaaggtttccattgcagcgatgataaagagaagccaggacttggagatatcaagtcctgaagttactcttcggctgtggaaggctagatcggccagggggtgggttaaaaaagagccgttggacgaagagtttgagtttgagacccccaagcttcttaagaggagtgtcatgatgcttattgagcataagatactctctaaaaatgccttgagagacgttctaggagttccaactagtatccttgaagagctttgctgtttgccttcggggtatttttctgcagacgataaagatagggttgtagatattcgcctgaggcagaaggaacaaaataaatccacctccgacgaaaagaaaggctcggcagttttgcagttcccaagtcggtag

SEQ ID NO: 339024 - DNA, 663 bp, Pseudomonas aeruginosa
atgaagacgcaagatgagattttgacctttatccgcaaccaggtaccgcgcgggcattttgaagagatccttacgatcatcccgcaagcatttcagaaggctcaccaagctgctggcgagttggtcaacatacctaaaggtcgcaagcgcgcccaagaccgatatagttttcttcaagacgggttagcgggcctgtctaggacgtggtcttcctcagtgactactactcagcctgcgggtgagttttatactctcatgactatgggaaacataaaaatcactgctgccatcaagccatggaaaaagacagtcaggcctgcgaagtacagactgaataactctcgattaaataaatttctcacctcaccacaaatgagtctccttgatgagaattctgagcctctttcggcagacgatactttgaatgctgtaattattcctttttcaccctccccccacatggatcagtccaggccgttggatatattgattgctgttccttattacagcagcaccagccattatcatgtatggcaaagtatgagtgactttatggctggatataatgaagcggctagccccactgattttgatggagtatggcctaagcttcgtcagcgcatgcgcgaagatgagggcaatgaggcagataatcaagagtga

SEQ ID NO: 339025 - DNA, 675 bp, Pseudomonas aeruginosa
atgacccaacccaatctgaccttattcacatttcccggccaggccagggttgggcgcccggtgccgaaaaccaagatctacgagcacggcaagataggcagttcactgcgcgacaagtttgtcgcacaggttgagcaaatcacctgggcttacaagctcgcgccggagaccatcaacatgccggcgcgaccggaggtgccggagattcagattttcgatatcgagctgaaaggcgctgagctgggcgatgaagtcttgagcgccattgatcgagccattccgctacctattattttccagcttcaccgagatcaacagatctgcatggtggctgcccttaagcggcccagcccggtcgatgccggtagatgggtgcttggcgaatatctcactggcccttggctgcagggtgatagcgagcgacagcctctccctatagcgctggatctgcaggggctttacgaacaactactgcgtaacctgctgcctcaaaccgcccgtgttggcgaaagcctttccgagcagttggagcggatggcacggctgcgcagccgccagggcgagtacaacaagctggaggctcgcctgcataaagaaaagcagttcaaccgcaaggtggcgcttaatgcgcaattgcggggactgaagaacgaaatcgatcaactgagtacataa

SEQ ID NO: 339026 - DNA, 1851 bp, Pseudomonas aeruginosa
atggatattcagccggacaagcagaacctggatcgcacctttgcatcgacggtttactacatcgatttctatcagcgggactacaagtggacggaggagcccgtacggcgtctgattgacgatgtcttctaccagttcgatgaagcctattccaagcactcggctctggaaccgaactcggagagtatcaacgcccggtatccctggtactacctcaacacctatgtcaccaacaccgtacagggcaaggtgtttgtagttgacggccagcagcgcctgacaaccctgacgctttttctggttcagctgttccggatggccaaggtcttcgagtcgaagacctctggttggttggagcgcaaaatcgccggctattcgggggtggaatacgagttttggatgaaccacgtccgtcatatccatgttctcaaggccctgatggatggtgtcgctcccgaggctgtagatagatccacaggcttgacggctgcaaacatgctgaggaacttctcggtaatcgcggcggagctatctacccgtttgaacagcaagcacaagttcgagaccttcgttcactacttcctttaccgcctggtgctcatcaatctgtccgtcgattctacccatgtaccgatggtgttcgaggtcatcaatgaccgtggtgtacgactcaagccttacgagatattgaaaggaaagctcctggggcagatcgacaagcttgaacttgactctggtaactataacgagctctgggatacgcacgtgagggcggtgaacgcctatcgggaagatgaaatcgatagttttttccgttactggctgaagagcaagttctccgatagccgaaaggctggacagcgctttgatggcgactaccacagagaaatgttcaagagtgatatcaatcagcttctccagcttgagcatgattcctccaaggtcaaagcatttctcaaggaggatttttcgtactacacgaagctgtatgtacgactgctgcatgccagccagcacgagaatgaacagtacccagcggtcttcttcaacagcctgaacgagctggatagtcagcatctgcttattttgtcggcctgcaccgtgaatgatccggaggaagtcgccaagattcgtgtggtagcagaacaacttgatcgaatgttctcgcttcagcagctgcagggcgcttacgacagtaatgagtttgctgttaaattatttgagattagcgccgagatccgcgaaaagccagtggctcagatcccactggtgttcgagaagcatcttttgcaggaaattaccaggaagcgtgcgattgccgtctcatccgtctttagttatagcttattccgcaatatgactattgatcgcttgaatactcgcttcactcgatttttctttggtagggtagagcaatttctcgccgaaggtatgaagctaaaaatgaagcatcccttgcagaatcttgtcaccctcagaggcgccaagactggatttcatatcgaacatatattgtcacgcaatgcagaaagtcttgatgctttcgatggtgatgaagagcgctttgaggtcgagcgcaatcggcttggtggtgtgttgttgatgaaggggaaggataatatttcgagcggtaatgagctatatgcggacaagctgaagtcgtatgccaatacgctttattggaatgagacgctgcgcagtgactcttaccacagtaaattggactttcgcgattttactaagcaatctggactcggatttagggcgcttgatgagtttggtcccagtgagcttgaagaacggcaaaagctactctttgaggtcgcggctttaatttggaatgcaagttga

SEQ ID NO: 339027 - DNA, 1797 bp, Pseudomonas aeruginosa
atggcaaataataaaagtccaaaaagaattactctgaatgtttatttgcttaaagaaccccctgctggtgttcagtcttggactccaaaagacttcatcgccagtcccattggatcgggtggaaagccaaggcaaataggaacggataagtttcctctcggtccagatggtataagcggtactctatttgtgcgtaagccactggtggaaacctcgcctgagtggttgagctttgttcagtcagggcttgctgatgatgtaaatacttccagatggaagaacaagagtatctctgctattttggttgtgcagcagtctggtcgacaatttgctattgcatttggatatggtaggcacttgattgagcctagacttatcgaagaccgtttcggcattcgggtagttctcaatagtgttttgcctgataaaatagcgtcaattgatcgccagacatttgatgcatctccaagaataagtcgtacccagacagttaaagctgcagccgtatccgactatatgatcaatgctgagcaagacctgctcagagggttggttgggcacactaaaagtgattatctagagatttttggtagcgtcatagcgggaattgactcttttaaagcctccattccaatggagctttctggcctaggtggttttcttaaacttgccctggagcgatcggcttcaaaagactatttgaatcgagatgaagatgggcatcctagcgagttctcttgggttgagaatctgctgcctgtcaaggataaagatcttatttctacactcgaaaaccagctttgggaggcactaaattctacggaaaggaaaaatatgtggcttgcaattccagacataatcgactggtctgggattaccggctttgcctatagcaataatgctcaggatgatgaaattgatccagttcttgatctagatagatttctatcaacccttcgtagcgatgccacgcttgaaacacttaagcgacgagatatttttttagttctatctgatggttctcccttaaggtcttttagtgccttccggtgcttgtatgctgaggtgagaaataagttaggcttatttattttgaatgttggtagttggtttaaggtggagagctcttttcaaacagctgttgaggggtatttttcgagtcttccaagaaagaaatttgaagccccatttgttgaatatcaacatgatggcgaaggctcctataatgaagatgtatgcgctcgggcaggcggtgctttagcgatgctggacagaaaacttataaggtttggtggcagctacgacaaaattgaggtttgcgatatatataagcctaaaattggtaatgagagaggtgaatttattcatgttaagcgcggacgaggatcgtccacgttgagtcatctttttgctcaaggttttgttgcgtcgactcttatggtcagggaagctggttttattcaggatgtaaattcacaattaatagcgcagagcattaatcctgtcctgaatccatttgaggcacgtggtaatgatgttgtatacgccatcgttgatggtcctgcatcagagagtttagacattcctttctttagtaaggtcactttgcagaattatgggaagacaatttcctcttatggctttcaggtaaaattaatgcatattcctgagtctgcagtttatcttgcagatgtcgccaagaaagctgcagaaaaattggccaagaagaaagcttctgcagctaagtctaaaaaggctccaagcagggggagagcctcgaaaaagaaagttgattaa

SEQ ID NO: 339028 - DNA, 1110 bp, Pseudomonas aeruginosa
atgcacgaagccaagatccccttcggtgaacgtgacggcaccctctttcgcgcccacgaggtcgaaaacgggctgcgttgtggatgcatctgccccggatgtcagcaaccgctgaacgcagccaacaatggcgagaaggtcgtaccacacttccgccatgcgaaatcgaatgactgctttgatggattccgcgaaggagtcagacgtgctgcagtcgcgctgatcgcgaagcacaagcagctcatgctcccggcacttatagaaacaatccgagtggccacacaagacggccggctgctggaggaaaaggtcgaactgcaaccagtggtgatcactgccgataacgttgagcggtttgttgacctgggtagcttaagaggtcatgccgtcctgcaccaatctactcggcagctgatcgtccggatcaagctctcaacgcggatggagcatgagcgttatcgccagctcgaagccctggaacattccagcatggagattgatctccatcacctggcactggagcagatcaatgatccggccaagttcgagcacgcggttctgcatgactcggcaaaccgattttggattcgatcaattcgcggtgaaaggctcgcagcaaacgcgctgcaaaagcttcagtcagtggcggacgaaataaacgctcagtggcaactcgaacgggcagcgcgcgaggctgctgagcaagcccggcagattgagctagccaaggagaaagccgaactgcagcgcgcactagaagcccatagagccaagcagcttcagatggcggccaaacaatcagcctcagagcaagacaacacgacagaggacagagccgagttgatagcaggaaccatgctgaaggccttacaggcatggggaggacgagccattgagtgcactgcctgctacttgctcagcccacctgattcaaggttctgcctttactgcgatgcctctaccagcaaggtaaaccctgtaacgttatcaccggacataccctccacaattaatttgcgcatgcggtgttctgcaaagccaaatacgtcactgagaaacgctcccagtctcattgtccgaccatatttcgacgagactgaagaacactaa

SEQ ID NO: 339029 - DNA, 630 bp, Pseudomonas aeruginosa
atgaccttttcaagctgtctcattaatcagagaaatgccattgtcctggatgctagcgtaatcataaatctgctggcgacggggtatgcgaacactatcctgcgagcattggctacgcctctctatgtaaccgactacgtcgtgcgcgagatagagcaaggagcagtaaatggccgtccagaaccagcgctacttgcagagctgatcagtgaccaagtcttgatagtcgaggagttagcaggagccgccttggaggatttctttgggatggtatccggacatacctcaagctcacttggcgacggcgaggcggctactctagccctcgcatacagaaatgagttatctgccgccattgacgagaagaaagctaccagagtggctgctgagcgctttgaaagcttgaagctcattacaacagttgacatcctagcgtacgctcctgtgcggtcttcacttgggaatgaagtgctcgccaaggcgacgctacttgctctaaaacacgcgagaatgcaagttagagagcaccagtttgattggatagcccagctaattggcgtagaaaatgttgctgcctgcccgagtttgaaacgccatataagacgaggggcatttgcgcttagcccttaa

SEQ ID NO: 339030 - DNA, 615 bp, Pseudomonas aeruginosa
atgaaattactgacattgtcagagacggtgatcaccggaggctggacgatgagcgacggaccccacagaagcttgccgatgcgaaagccttggaaagagctggccatgcgcggcgacaaggctgcctacagcgccagcgaagtggcagaggccgcaaccaacgccctcgccagcgatttcaagatggaggtttcctgggaactgacccaagaactgaagtccatattttccggtcgtgacaattccctcatgctccctgaaattgcgcttgctcagctaaatgatgcaaccgctcttgctgctggatcagtgtttggcagaaatgtcgtggcatgcagcattgagctcatccatgaaggcaaattcggttcagatgcgtttcatgaagctgtaggccttgctgccaaaatgcgtggactagcaaccgtgcgctctgttgaagagcactacctgagagagtccaaccacaggcgagcggatcatgtgagcacgcgtatctccgacgcaatctgcggactctcagaaaaccaattgggcttgattctgttgggcccggcaccggtctctcagcgttcaagaaaaatgaccggcttggacgcgggagtatcgctttga

SEQ ID NO: 339031 - DNA, 702 bp, Pseudomonas aeruginosa
atgcccaaaaacaccgctaccgcccagcgctatccgctccggcatcccgataacaataacctcagcctgtactacgacgacacctatgtcggtttacccgtgatgatcgagaagggaccctttatccgggagtatttgtcggacctcaaacacaccatcgatctggccttggctgagtacccgagagtgtttgcattccgggtagatctcagattgcctaggggtatcgagctgcctgactacgcctacaccaaccaagtcattagcgagttcttcgagtccttcacaaagaaaatccgctacgaccaggaaagagtgcgtcagcgtgacggctacgctcgtggctgcaaggtccggtacgcatggtctagagaggttccacgaggagggcggccacattaccacgtattgatcctgttgaaccgggacgcctattacacgatagggaggctgcggtccgcgagagcgaacatgatcagccgcatgggggagtcctgggctggtgctctgggcatatcagtcgaccaagcgggaggcctagtgaatattccgaaaaatgccgagtatcgcgttgaccggtatgtccgtcgtggcgaagaagatgaactgccagtgctgttctatagggctagctacctgtgcaaggtggctacgaagtcctacgggaatcgtcagcgggggtttgatactagccggggatag

SEQ ID NO: 339032 - DNA, 1113 bp, Pseudomonas aeruginosa
atgaatacggcaacccccgacatccagcatcacattgatgacgccattagaagtgctgtaaaagggtcaggaaaagtgaacattattatttcaggaaaaactggtgttggcaaaagcacattaataaatagtgtattccgcggcgacctagccttgacaggttcaggaaagccagttactcagcgcaccgaagaaatatcaaaagaaggccacccgatcacgatccttgacactaaaggtctcgaacttcacgactacgaagaaatcattggcgaactaaccgaggtcatcaatgagcgatcagcagaacacgatgaaaacaagcatattcatgtagcctggctatgtattcacgaggatggtcggcgcatcgaagatgcggagcaaaagctctgtgagatgttcaaggaaaaggatatcccagtaatagtagttatcaccaagtctcggtcagataacgggtttcgcgaacaggtcacgaaagctctaccttctgctgcgatggtggtctcggtcagggcaattgcagaacagatcgacgatgacggtgagactattacccttaaggaaaagggtctaaatgagctgatcagcgaaacctcgaagttactacctgaagcgaagcaacgagcctacgccaatgcgctcaactctaaacatgctgctgcgactaaactgaaaatcgagcaagctgaaagagaagtcaatattgcgagtgttgcggcaggagctgctgccgccgtcccaattccgttctctgacgccatcgcactcgtccctatccaagtaggcatgctcgcaaaggttggcgtcacgttcggaatggaaaccagtacggcagcactcaccacactcgtgacatctgccctaggctccaccgcagcaactctagtcggacgcgctctagtaactggccttttgaagatggtcccagggctgggtagcgcagctggcggcgccattgcaagtactactgccataacactgaccaggacgctaggggccgcctatatttcaatcttgaccagcttcatcgaaaaaaacccagggaaagagttggatgtcgatctgatttctaacgagctaaagaaaaagctttcgatctctttctaa

SEQ ID NO: 339033 - DNA, 1005 bp, Pseudomonas aeruginosa
atgtcccaagcgaaggatacgctgctcaggctattcgccttgctgcgcctgatccctaccgccccccaacgaatcgcaactcctaccttactggaaaaactacgtgaccgcggtttctcagtgactttgaggtcgattcagcgcgacttaaaccgcttatctattcccttttctttacagtgcgatgacagcgaaattccattccgttggagcttcacccgagatgcgccactggatttagaggatatggatgcccccaccgcactagcgttgtacctgtcagaaagccatctgaatcccctgctgccgcaaacggtcttggaccagctcggtccgcagtttcgccgtgcccgcaacttcctcaacggccttggtggtaatgggttagcagattggtcgcgacgggttcgcgcaatccccaatggaaaaactctcctacccgcagcattagatctccaagtatggggacaagtgtctgctggcctgctggagcgtcgacagttacaggtcacttatcagagccgcagtaaaggtgcgatcaagcatcttcgcctacatccggcaggactagtgtcacgacacaccatcagctacctattggcatcggtggaaggctacaaagacctccgccagttcgctctacatcgcatcaaaaaagtcgaattgcttgatgagccagctaatcagcataccagcttcgatgttgatctatacatccgccaggatctcaatgcctcttcccccatccaacaagtagaactggtcgctgacatttccccacagattgcctggctgttgagcgaaacgccactcggtccgcagcaaagtatgagtccgctgcctaacaccgattggcaaaacctgcgcgtccctgtgccgaacgatcaggaaacactgtggtgggtttttgggctaggagaaaatgcgcgggtatataaaccagaaaaatggtcagaagagatcaagcagagagctgcaaggttggtagaactctataaaagctga

SEQ ID NO: 339034 - DNA, 213 bp, Pseudomonas aeruginosa
atgccaatcccccccgctcccttcaccctcatctgcgcatactgctcttggaaaaagactattttgccccggagcgatgtactggtaatcggccacgactggttcaccagttgccccaagtgccacaccccctcgcttgagcgtcgctatgcgactcacaaggaaattttcaaaacccgcctggaacaattcctaaagctcactgggtattaa

SEQ ID NO: 339035 - DNA, 891 bp, Pseudomonas aeruginosa
atgagccaccactacctttccggcctacctctgtgggccggttttcttcgagttatcccaacgctgctgctcggcgccctcctcaccggctgccagtcgcctcgcgaggcactgcagcagttggcggatgagcatgggcggcagctggagatacttccgggacagccgttcccactcgccatgctggcaccgcagggcacagcgacaaccacccgcctgcgtgtttacctggagggcgatggccatgcctgggcgacggcgacacagcccagcctggatccgagcccacacagcctgttggtggcacggctagcaatagatgatccgaagccgaatgcctacctggcacggccctgccagttcgtcatggcaccggcctgcgaacctaccctctggaccaatcggcgcttctctcaagaagtcattaccagcctaagccacgcactcgaccagctgaagcagcgctatggcaatcgagaattcgagctggtgggatattccggtggagcagcgctggcgctgttgttggccgctcagcgggatgacgtagctcaggtccaaactcttgctggcaacctcagcccacggctatgggcagaaatgaaagggctgtcccccctcagcggttccctggatccgctcgactatcgtcatcaactcgtgtcgttgcctcagcggcatttagttggacagcgagataccgtgatttcaagtcgcttgttagacctttatcagcgcgccctcggctctccctctcatatcgagtgcatccatataccaggagcaagccacgatgccggctgggaagccgcctggaggcgttgggtacagcccgctcacaccagcactacagccttcgccttgtgttcagccaagacccagatcaagtaa

SEQ ID NO: 339036 - DNA, 1005 bp, Pseudomonas aeruginosa
atgactcacgtccattccacgcccaatagggcacgacagcgccctgccctgcgcctggttggtaccaaggagctgtcccgtgacgactggctggcggtacgcaagcacgggatcggcagttcggacgcggcggccgcggtcggcctcaacccctacaagtcgcagctggagctgtggctggaaaagaccggccgcgatgccggactgcccaagagcgatccgaacgacgaggacagcccgacctactggggcaacatcctcgagcccatcgtcgccagccactacgcccggcgtaccggcaaccgagtgcggcggatcaacgccgtgctgcagcatccggatccgaagcaggattggatgctggccaacatcgaccgtgaggtgatcggcgccagcgacgtacagatcctcgaatgcaagaccgccggtatcaacggcgcgcgactgtggaaggaaggtgtaccggtctacgtgcagttgcaggtgatgcaccagttggcggtcaccggtaaacaggcagccgacgtagccgtgctgctcggtggccagcatctggagatccaccgcatcgagcgcgacgaggaactcattggtcggttgatcgagctggagagcgacttctggagctacgtgcaacgcgatacgcctccgccggcggatggctccgactcggcggagcaggccctgcgctgcctgtacccggaggaccagggtcacaccctggacctcacccagaacccgctgctgtcggctgccttcgatgaactgcaggtagtacgcgccgacctggagttgcagagcaagcgcgaagccgaactgaaacagcaactgcagcaggccatgggcgatgccaaccgagcgctgttcgccaatggctcggtgtcctggcgcaaggccaaggacagcgtagtgctcgatgtaccgcggctgctcaaggaaaagccctacctgctggcgcgctaccccaccaccaaggtcggcagccggcgcttcctgatcacctga

SEQ ID NO: 339037 - DNA, 330 bp, Pseudomonas aeruginosa
atgtcattgcagtgccctcgttgtcattccctgaaagtctcgtcttttcatcacgccatgaaagtcggcgcagctatcggcaccgtgggcggtgttgcgcgtggtgtgagtgctgccctagcaggtggccaggctggcgcagctatcggcgcgttcgccggccctgttggcatcaccctaggttctgtatcgggcgccatccttggcggcctgaccggcggggttggtggctgcgccctgggtgcacaggtcggcgagtcgcttgatcgccacgtcttggcccacaacctctgcctgctctgcgggcatcgtttcaacctgccgacctga

SEQ ID NO: 339038 - DNA, 1320 bp, Pseudomonas aeruginosa
atgaaatctcccagggagttaattttcttcggtgcattaacggcggtttctatcgccgtgcaagggctttttgatgttagaaaacctaccggtcagtgtgctcccgtttcgcttatgttgttggtattggctgactctggagaacgaaaaagttcttctggaaatattttcttggatcctgttcgtgagtttcagcgggaccaggatgttgcctggggggataaatttaataaatggatggttgaggagaggatctggggtacaaagaataaagagattttcaaatttatagctaaagccgctcgctcggggcagtcctctttatattgggaggacatggctcatgagcacgaaaaagcaaagcctgtgcgtccacggcgtttcaaaattctttatgatgatgcgacgtctgaggctttaatgtgggggatgtttcaagataccccggtggctggtttggtatcgactgagggggatctgagaaatagggcctttaatgacctttctaagcagaactcactgtggagtggtgatccgataactgttgatcggaaaactgcggagtgctttgagctgaaagatgcgcggttgactgtttcgttcatgacgcaaccgacttcgtttgagcgctatgtgcgtgctaatggtgagatgcttcgtggttctgggctgtgggcgcgctttttagtttgccagcctctttctacccaagggtgccgggagattgatagttctacggtttcgtgggagcacagaaaaagattttctgctcgaataaaagagctgctgcaagagaatgttgtaatgttggaaggcccagagcatacccgtcaacccataggcttctcgccaagtgctgctgatctgtgggttgaggtattcaatgaaatagagggggagattaaacagggaggacgatttgaaggggcaggggaccttgcttctaagttggccgataatatctccagggtggccgcgttagtgcatatttttgaaggggaaggcgatgaaatatcgttagaggcactgcgtttttctattgatttctgtgcttggtgttcggatgagttttatcgtatttttatgcctcctaaagagtcagagctcgatgcagaagagctgcttgattggttaaaagggcattgggataagggttttgatgaggtaagaaagaacacaattctccagtatgggcctcgtcgccttaggagcaaggaaaggctcgatgctgcattggctgaacttgagtcgactggagatgtttccgttttcaagcgtgataggtcttggattgttgatttttctggcgttgattactga

SEQ ID NO: 339039 - DNA, 690 bp, Pseudomonas aeruginosa
atgtcaaattttccagctccattgaagattaaagataagaaaatagaacgattactcgcttcaacaggaaaaatattgagggaaatactaaaggagaactggccgaaagagctgaacagccaaatagatcgcgacatcatcgatctagctgacacaaaaaacatcaagcggagcacaataaataaatgctggacacacacttacaatgaagaaaaaagaagcacactaagactacaattcttctatgcaaagctttactatctgtgcgcaaaagcagcactagatgaatacaaaaaagacgaagaaaaatacaaagaaaaaaaggaagaggcttggtcctacctcttccacgcatcaaacctcatcggactcttggacggctgcaagcaccaaaaagaagaagacaccttcagaaaaattcgtgcttcgaaaggaggaaacgagttaaaattgaagaaatctaaaataaaagataaaatccgagagctattagaaaaccctcccaaaggaggctggagaagcgaatcatccactatagacgaaatactttccagtcacgatctcaaagatttcatctccagcattgaggccgaaagaacaataggagacctgaaagagttcatcacatctgaaatagtactaaatcccgaaaaccaggagatataccaaagactccgctcaagaaaataa

SEQ ID NO: 339040 - DNA, 1266 bp, Pseudomonas aeruginosa
atggcaattgatgcgtatgtgggcaagcctgggcacggtaaaagttacggcgttgtcgagcacgtgattattccgtcgctgaaacaagaccggcatgttgtgacgaatatcccgctcgaagtcgatatgttgctgatggatttcggcgggactattgagcagctgccggaagactggtttgagcgtgaagacttggccgactttgcgccgcctggttctgtcctggtcctcgacgaactctggcggcgttggccgaaaggtcagaagaccaacgatgcgcccatggccgacaagaaactcttggccgagcatcggcaccgggttgacaagaaaaaccgctcgatgcgggttgtgatggtgacccaggacctcgaccagctcgcaagctgggccacgctactggtcgaaaccacgtaccggattgtcaagaagtcgaagaccatgttccgggttgatatctataacggcgtggccaagggcgacagtccgccgaagtcgaagctcctgcgcagcactgccgggcgtttcaagccggacgtttaccggtactacaagtctgctacgcagtccgaaacgggcgctgtcggcgatgagtcgaaggccgacacccgtggctcgttctggcgatcctggggcttctgggggctggttgggctgatcgtggtctgtttgtcggtcggcattcccggcgtcgtccggttcttcacgccaccgcagcccaagcaagcgtcgacgccgactccggcggctaaggtagctgaacaggcgcagccggtgacggctcccgcggggcgtgcgatgcaagcggtctacggcacgtcgtcgaatgggcctgtgccgtcagcgatctggcggatcgccggctatgtgcatgcgggcctgggcaaggctgatgcgtggccgtccaaggatggctacaacgccgagccggatcgaccgatcagcaagacgtcgcgtgtcgtgctggtgtccgaggctggccgtacacggttctggccgattgagaaatgccggttcttcgagaagacgcccgacctgtattgcgacatcgacggcgagcgtgtgacgttctggacgggccgaggggccgtatcgacggtgatggatgcgacaagcaccgcgagcggcggcagccagcgtagcgcagcgtccgccgcgaccggtgcgcaggtgcagaccccgcattcgtttcagccgccgcagccgtcccagggaacccgcgtgaccgtagtgtctgataacagccgttcgccccgcacgttgtga

SEQ ID NO: 339041 - DNA, 1251 bp, Pseudomonas aeruginosa
atgtttaggatgctagttctatttatggtttttttttgctgttctagcgccagtgctgatgctttttggtggcaggttaatggtattgatagtttgcgggacaagtcgttcgcttctcctggtgaggggtgttcggcggtgctggcctattttcagtctcagggcagcgggtacagtttttcgtttaattatttgaggcgtaattctgatgtggagtttagctgttctttgaagcgtttggatcaaggcgagtttgttggcgaggttggtgcttctataggtaggtatggtgatgcttgtccgattgatactcggtatgatgatcaaactggcgaatgcaagcctgagtccaagcagtgtgaggctgggcaaacagatttatttgcaagtgcgccgtctccagttgttcagatcagcgggcgaaatcaggttttaagcactccgccgactggttgcaagggtggctgtgcgtatacggcttcaagttcgaagacgcgcagttgttactttgttccagggtcgcaaacagacggtttctgtaactatctgcttacctctgatggtaattcgtgcgccgctgattcgggtaatcctggggcagttggcccgccgttgaatccgaccccgccgaccgatcctgatgagccgccatcggaccctaacgcccccggctgtccgaccggctacagctggtccgggaccacgtgcgtgaagtctgacggttcaggtggtccgggcggtgatggcggtacgggtggcggtggtgatggtggcggcgacggtggcactggcgggggtggtgatggtggtggcgatggtggaaccggtggcggtggcgatggtggtggcacgcccggtactggcggcgatggtggcggtacgggtggtggtggcgacggctcaggggagggcggtggtaccggtggcgggacgggtttgcaaggcggctgtaaggacgatagctgcgcgttcgtgaagaacaacccgttcggcaaggacaaggttccgggctttgacgaatcgctgcaaaaggcttggacggatatcaagaatgcgccgattgggcaggccctggccaagattacgttcccgaccgggggaagttgtccgactcagagtgttgagctgttcggtaagagtgtgatgttcagttcgcattgtgacttgtgggctcagattgaaccgatcttgaaagcggtattcctggcgttttgggcgctgctgtctgtgcgcgtattcttgtcggcatga

SEQ ID NO: 339042 - DNA, 231 bp, Pseudomonas aeruginosa
atgaaaaacctgaaaaaactgttcgttcgtggtggttccgccgttgcagtaggcgctgccctggtcgtctcgcaatccgcctcggccgctggctgggattacagcggcctgacctccggtatcgatttctcgaccatcgcgaccggcgtgctggccgtcgctacgctgctggccgctgtgtatgccggcatcaagggcgctcgcgtggtcctgggcttcctgcggagctga

SEQ ID NO: 339043 - DNA, 1020 bp, Pseudomonas aeruginosa
atgatcgaactgcaccacgcgcctttgagcagtggggcggtggtctgtatcgaggctgacggcacggttgcttgggaaaccccgcgcaagatgctggtccgtggttcccatgactcgacgatccatatccggagcgtaggaggggacgggcagggcaacgcgactcatctgtacatcgacggcaacccaagcaagtggttgcaaggacataaccttgttggttcctgtgatctcgttgccctcgtctgggatgcttttcaacgcctctgcgccctggtgggcattgagccgactgactttgagcgtcagaaggtcagggcagggcagtaccgcgtcactcgcgtcgattacaaccgaatgttcgaacttccaagccgggccgatgttcgagcctggctgcgtgcgggcgagttcaaatgtaagtctcgtcatggtcgtccggtaaacaatcgcgggactctaactttcggcaaaggctcaagtcattggtcgattgtttgttattgcaaggccgatgaaataacttccggtggttcgcataagttgccagaagagttccaccagcaccctgaaatctatcagtggatagataacaagctccgcgttgaacttcggttgcgctcaaagaaactcaaggcgctgaaccttgaatatgcctctcaactcacccccacggttctttggaagctctaccgtgacttcattggggaactggatatgtcagagcaaatagaactcaagtccgatgaggtgatgaacctcccgaactggcttcgtggcacgtatatgctttggaagcaaggtcatgatctgcgcgatagtttgtccaaggctacttattatcgtcaccgcactgagcttcttgcgcttgggattgacataaatatccgctgtgatcgccgcgacgatagcaatgttgtgccgatgattcggattcttgaggctaagcctgcggccattccggacttcttctttgaaagggggctgattcataaatcggcccgtcaggtggctgtatga

SEQ ID NO: 339044 - DNA, 360 bp, Pseudomonas aeruginosa
atggacggtattcttagtgcgattaagcagcttattcagactgcaacagacttctttcagcgtgcacttaaagctatcgaggatttctttaagtgggctcaggatgcgttcgattatttctgggagttgctaccggttctgcctgagtatgtattccataggcttgtgtcaggcattgtgaagttctttcagtggctgccggtgccggagttctttacgcaggcaggcaatgcgttccaggcgataccgccgtcggtggtgtatttcgccaatgcgtttcagattggccctggcgtgacgatggtcctgggcgcgtatctgctgcgattcattctccggcgcattccaattattggttga

SEQ ID NO: 339045 - DNA, 1251 bp, Pseudomonas aeruginosa; identical to SEQ ID NO: 339041

SEQ ID NO: 339046 - DNA, 231 bp, Pseudomonas aeruginosa; identical to SEQ ID NO: 339042

SEQ ID NO: 339047 - DNA, 237 bp, Pseudomonas aeruginosa
atgaagtccggcttcgacttttactttggcggtcgagttagctcccgccaggaaatgcaaaagcgcctgcgcaatctcagaactgagggcagcgttatggatgatctggagaaagttctttcgtccaggactccggctgaacaagttcaggccgctgaggatttcaataaggcgaatcgttctaagttgatcagcaacaagaaaggcactctttatttgggggatgtattcgaatga

SEQ ID NO: 339048 - DNA, 1020 bp, Pseudomonas aeruginosa; identical to SEQ ID NO: 339043

SEQ ID NO: 339049 - DNA, 375 bp, Pseudomonas aeruginosa
ttgaacgacaccacagacagcactctgcgagacgacatgaacatcccacagaccttgaggaccgccagaaagaacagggggttgacgcaacgagaagtggccgagcttgtgggggtatctatcgaggcctacaagggctgggagggtggaagacaccaccctagatcggaaaacgtcgcaccccttgcccaggcgctaggaatatccaccgacgaactgatgatggaagcccagcagcgctcaatatcggaagacctcagagcgctattcaacgccgccgacaagctgccggacgacaagaagcggcaactcagaacggcaatcaaagggatgttgctggccatcagccaagagcagctagacgagggggagtag

SEQ ID NO: 339050 - DNA, 3255 bp, Pseudomonas aeruginosa
atgtccgactatgaagtccaggggatgctgattcagctggaggccaccactgcgcaactgcgtcgggaactggccggtgcggacagtgtggtcgccaggacaacgcagagcatcgaccgcaacctggctcaggtcgattccgcgtttgaccggacggctcagggcgcccagcaagctggcacgctgatccgtggcgccttcgctgcgatcgccggtgccggcctggtgggcagcatcatccaccaggtggacgcctacggtcagattgccgaccgcctgaagatggccaccggcagtaccgaggagtacaacgaggtccagcagcacctgctgcgcactgcgcaggaaacctaccggccgttggctgaggcgcaggagctgtacatccgcacggcggacgtcatgcgctcgctgggcttcaacacccagcagaccctagacatcaccgacagcttcagcttcctgctggtgaccaacgccgcgtcggccgacaaggccagctcggcgcttggcgcctactcgaaggccctgcaaaccggcaaggtcgaggctgatggttgggtatcgattcaggacgcgatgccgaccatcgtcgatgcgatcgccagcgcgaccggcaagagcgcggaggagatccgcaagctgggcgtacagggcaagctgtcgctggacgatatcaacaccggcttgctgcgtactgtggaggtcaaccgcaaggctgccgccgacatgtcggtgagcgtgcaagatgctctggtcaacatccagaacgccctcggcgatttcttcggtcgtatggaggagagcactggcgttgtggctggcctggccagcgtcatcagcgtggtgggcgacaacatcagcagcgtggccgctgtgatggcgggggctggggttgctgcgctgaccgtgtacaccgctcgtggcgcactggcgatcaagaccgccctggctgatcgtgcggcccggatcgcccaggctgaggccgtcatgcaggcggcgattgccgaccagcgcaaggccgagaccttgaccgtactggcggcccgcgaagcggctgcggcgcgcggtaccgccgttcagaccgagatgtcactggcactcgcacaggctcggcagcgagaggccgctgctaccgcgtctgtggccacggcacaggctgggctgcgagctgcctcggctggcctgctgacagtgctgggcggcccgatgggccttgcactgctggccggcacggcggcggccagcttcctgctgcttcgagacaatgcgggccaggcgagcgttaccctggaggaaatggcgaagccggttgcgcaactccgcgaagagtttgtgaagctaaaccgggcccagcgtgaaggtgctttgcttgattggaaggacaaggagctcactgccactgagcaggtcaatcaagcctacggcgagttggctcagtccatccgttccgccaccgtaacggcgcctgcgcgggattcaagcggtcgctataaccagcagcttgctgagtatcagtccgtcattgagcgcctgaacgaggctcgtgatagcggtgcggacctgaccgacatacttcgcgatgtcgggcagaggctcaacatcccgcaagaaactgttaacggatggctaaggcagtcgagcgcggtcagcaaggctgacgacgtgctgtcggcggttgtcgagcgggtgcggacactgacaggcgccctggacgaaaataccgcctcgaccaacgccaacaacgctgccaagaccggcatgagcagcgccgggcagacctacctcgatgctctgcagaaacagcttggtgctctgcaggacaatggcgatgcgatcaaggaggcggagcgctggattcgtgagcatgaagatgcaaccgaggccgataaggttgcgatcctttccgccgcttacgccaagaaagcgcaggcagatgccaacaaaaaggcaacggaatctgagaaggcgcataccaagtcgatcaatgatgaggtcaaggcgctggatgcgctgatcgacaaggcgctgccggagaagaagcgcctggaggacctggccgagggcgtggagaagctgcgcaaggcgcaggccgccggcaagatcaccagcgccgagatggaactcggcatcaagaacctgaacgaggcctatgccgacggctcgatccagaagcgcatccagcaggaacagaagctggcggagcagcggcgcaacagcgccgatgcctatcgaaaggcgatggaggtggtgctgcaggcgcgccaggatgcgatcaactctgacgtggccggcatcggcctcggagacgatgagcgcgaccaggcgcagcggctagacgccgtgcggaagaagtacgccgaccttcggcgcgagttggaggcgcagcaggaggacgccagccggcgccttggcccggcggcctacgagcagcggctggcggatctggcggacttccaggcgcgcgagttgcagatggaggtcgacggttatggcgcgcggctcgatgctcagcgggactaccgcaacggcgcacgccgggcgtggcagaacatccaggccgacgcggcggacgtcgcttcggccaccgatgacatgctcaccactggcttcaacaccgctagcaacgccctggccgacttcgccaccaccggcaaattcaagttccgcgacttcgccagtagcgtgatcaacgacatggcgcggattgccagtcagcaggcggcgacggggcttctcagtggtgtgctgggcgcgggtgtctcggctttcagcggatggatggggggctctgccacggccggggcctcggcttccggctacaccggcaacgcttacgcgaactgggccgccgcccaggcagacggcggcgcctgggccaatggcgtgcagttcttcgccaacggcgcggccttcaccaactccatcgtcagccggcctaccgcgttcggcatggcgggcgggcgcacaggagtcatgggcgaggctgggccggaggcgatcctgccgctggctcgcggcgctgatggctcgctgggcgttcgctcggtgggtggcggcggtggtaccgctctgcaggtgaatgcgcctgtcgcggtcactgttgaagaccgcagttcggaaggtatggagctggaccaggaggcgctgcagcagaacatgcaactgcagatgaaggcggcggcagagcgcgccgtcgctgattcgtggcgccctggcggcgtcagctaccgcaacgcggccgggaggggctga

SEQ ID NO: 339051 - DNA, 330 bp, Pseudomonas aeruginosa
atgggaaggctgaagtctctcgggttccgtgtgagggcccaaggcgagcggctgaagacggccgcgccaggttcgtggcggaccggcaagacctcaaccgagcgaggctatgactaccgttggcagcaggcccgtgcgcagtaccttcgcgatcatccgttgtgcgtgtactgcgagcgcaagggcttggtcaccgcggccaacaccgttgaccacatcgtggctcaccgaggcgatcaggacctgttctgggaccaggacaactggcagccgctatgcggaccctgtcactcctcggtcaagcaggccgaggagtccgccggcggctga

SEQ ID NO: 339052 - DNA, 273 bp, Pseudomonas aeruginosa; identical to SEQ ID NO: 327139

SEQ ID NO: 339053 - DNA, 339 bp, Pseudomonas aeruginosa
atgatcgaagagctgcaagtcggcgcccgcgaggcggtggccaccatgaccgagagccagcgctacagcctggagagcgtggagatcgccaaccgtgccggcgaaagcctgagcagcgtgacccggcggatcggcgagatcgacgggatgaaccagtcggtggccaccgccaccgaggagcagaccgcggtggtcgactcgctgaacatggacatcaccgagatcaacaccctcaaccaggaaggcgtggagaacctccaggccaccctgcgcgcctgcggcgagctggaaacccaggccgggcgcctgcgccaactggtggacagcttcaagatctga

SEQ ID NO: 339054 - DNA, 540 bp, Pseudomonas aeruginosa; identical to SEQ ID NO: 332562

SEQ ID NO: 339055 - DNA, 192 bp, Pseudomonas aeruginosa
atgcgcgctgtcgtcgaactgctcgccggcgcccgccgcctggtgatcttcactggcgccggggtgtcggcggaaagcgggattcccaccttccgcgatgcccttggcggtctctgggcgcgctacgatccggcggccctggctacgcccgcggccttcgccgacgatcccgcgctggtctggggctggtaa

SEQ ID NO: 339056 - DNA, 609 bp, Pseudomonas aeruginosa
atgaacttcttgcacaactcggccatcgtgggcgccttgcgcgcctcggccttggcgccgccggggtcgccgccccggcgaacctcggccagccagtcctgtgccttgactcgtgcctgttcgacggtcagctccccgtacagccccagcgagggcttgcggggctggccggagttcgtgcggtactggagcatgaacacccggcggcccgtcggggtaatcttgcacaggaagccaggcaccacggtatcccgcagttcaatatccttggcctggggctgggccgcctccacggcggtcttggtgagcttgatctttgccatgatgactccttggaacgacccggattccaagagccagataggagcggcgcgagggaaaaccgggtcaagtttcagaaagcaccggcatatgatggacgcgcgtaagctattgataaacctgctgtatcgagctacggcgcagtccagcgaactaccgggctggagtcatcgtgaaacaaaaaaagggcctcgtccgaggcccttcttcctttccggcgctacaccgctcaggacgccgcgcggcttaccgcgccggcgccggcaggctccttcggcgccaggttga

SEQ ID NO: 339057 - DNA, 1806 bp, Pseudomonas aeruginosa
atgactcacatggcacaggcaaaacaggcacggcaggcagacccagtggctgcggaatccccgagccagatactggcctcagccagagtcatggcccgcgccctggcaactactttcccagtagatcatcagttggccctggcgcgtgcgttcggcgttcggctgatcgaggcttggtggcgtggccttaccagcgtcgatatcgttccccaggaactgcgctcgccactccagccgttcccgatcgagccgcttccagaggcggccgctgcgcttgcggaaaccatcggccacactgcagcgagttttgatgccgagacagctgcctatcagatcggcctgacttacaccagcatgctcccggctgaacatcgcggggagtacggcattttctacaccccgcccgtcctgaccgcccgcctcatcgaccaggtaacggccgccaatgtcgactgggcgaggtgccgtgtgcttgatccagcttgcggggggggggccttcctagcacccatcgcccagcggatcatggacgaacagaaggattgcagcccgaagctgctgatgcagagcatcggtaatcgcttacgtggctacgagatcgatcccttcggagcctggcttagccaggtcacgctggatgccgtggtgctgccgatcagtcgactggccgggcgcaagctgcccgtcatagtgacggtttgcgactcgctgcgccgcagcccgcctaaagaccgtttcgatctggtgattggcaatcctccatatggacgggccaagctcgatgtagagacacgcgaacgctacaagcgctcgctgtatggtcatgcaaacctgtatgggctgttcaccgatctggcactgcgccataccaaattgggcggcctgatcgcttacgtgacgccgacctccttcctggccggcgtctacttcaagaatctacgggccttgttggggcgctcagcgccgccgttgaccatcgatttcgttaccgcccgtaagggcgtttttgatgacgtgctgcaagaaaccgctctgacgacttatcgtcgaggtgcggacagtgccccggtcgtagtttccgagattgctcccaccaagggcgagcttgaggttcagcagacgggcgagattgccctccctgctgacccatcgcaaccctggctcttgccgcgcacgactgagcaaagcgccttggtcgaatgcctgacgcacatgccccatcgtctggctgactggggctatggcgtgagcactggcccgctggtatggaaccgtttcaagagccagctcgcgcagcgtccaagcagcaagcgtctaccactgatctgggctgaggcaattacagccgatggacgttttgtgtttcgcgcggacaagaagaatcacgcaccgtacttcgagctgaaagccggggacggctggcttgtgaccactaagccctgtgtcctgctgcaacgaaccacagccaaggagcagagccgccgcctaattgccgctgcgctccccgccgagtttctggagacgcatggcggcgtcgtcgtcgaaaaccacataaacatgattcgtccgatcaacgaagcgcctcaggttagtgccgaggttctgggggcattcatcaacagcgcggctgcagaccgcgcatttcgttgcgtcagcggctcggttgcagtctcggcctacgagttggagtcgctgccgctgcctgcgcctgaggacctcgtggagctaactagattggtcgatgctggtgccgaccgagaagccattgaggccgcatgtagtcgattgtttgaaggggatatgtag

SEQ ID NO: 339058 - DNA, 963 bp, Pseudomonas aeruginosa
atgctgtatatcggtgcagttgagcacacggacgttcgactggggccggtgcatgtctatcgcatgaccgatttgcaagccgtgaatagcagcgatgagcaacgccttagctacagatcgaatctgcgcaagaaatcgttcgaggttccaggcaagcgctggtatgcggataacacccgcgaacccatccgcgatgagaccctacgagaaggtctggttgccgttggcgctgtcatggaagacaaggacgtacccaccacatccggtaagccgcgttatgcactcaagtctgatctggcgaccttgttcgaccctgagctccaaggcgaagagttggcagccgccatcctcaaatggcaagacgaacacctgaataaaggcgcgcttgcccgcatttcgttgatgcgcttgggcgcggtagatcaagaaggcgtacttgttcacttccccaacggtgaaacgcgcaccctgtctcatggccctagttcgctgatttctcgtgctgttattgaggtcttcgccaagcagttcttggagaagcctgctgtgctctggctcagtgagtcgagcaacaaggtagccatgcaggatttgcgcatggcatcgaccattggcctagatatagaggctcagaaaaacctgcctgacctgatcttggtagatatcgggccgaaacatcccctgattgtatttatcgaggtggttgcaaccgatggtgcgatcaatcctcgtaggcaagaagcgctatttgagctgacagacaaaggtggttttaagcgttcgcaagtagcctttgtaactgcttatgcggatcggcaatcggcggggttcaaaaaaaccatcacgtctctggcctgggggtcgtttgcctggtttatgagcgagccagacaaagtaatggtgctgcgtgatggtttggttcgtctttcaagtttgaatgattttttcgtgtttccggattaa

SEQ ID NO: 339059 - DNA, 873 bp, Pseudomonas aeruginosa
atgtcaaattacaagactacagttattactgatctggataatacattgttcgactgggttgagctctggttgaattgcttttcagcgatgcttgatgaaatagtccgtataagcggggtgccaaaagaagttcttattccagagattgctgcggtacatcaaaagcatgggacttcggaatattctatgctgattgaagagttgccatctttagagaaggtgttgagcgggcggcctgctgttgatgtatttgctagtgcagtgcaagcttatcgtgatcagcgtcgaaagtatctagtgctatatccaggcgttgctgaaactcttcaggagttgaaagcgcgtggcacaagaatcattgggtacacagagtccatggcgttctattctaactatcgtgttaaacgtttagggctggatggggttttggattttatcttctgtccggcagatcacgtactaccagaaggggtttctgtcgatgatcttcgctattatccggctgagcactactcgctacagtacactgtacagcactttacgcccaagggctcaaaaaagcctgatgccaaagttttggaggcgatagtcaacgatcttggtctgacaaaatcggaatgcatatacatcggcgatagcctcatgaaagacattgctatggcagcagactgcgggattgagaatgcttgggctaaatatgggcaagcgcatagtaggaaagagtatcgtttgcttcaggatgttacacactggactccagaagaggtagcgagagaacagagaattcgtgcacgtgtggatgtccatccagaccatactctggaggtagggttctctgagttgttggatatattcgttttccgtaaattttga

SEQ ID NO: 339060 - DNA, 816 bp, Pseudomonas aeruginosa
atggcgaatattgatagcaaggagattgtcgagatctggaaggcggttgttggtgttcagatgcatttcaatgacatcagcatgcgaattagaagtatgtttgttactatcctgctggcattgtttgcatctcttggtttcttgctggataaaaatcttggattgcaggtggcggattactatgtccagtttgctacgatcttgcctgtatttggaatcctaggtgcttatcttttctattttatagatcgctattggtatcatcgcttgttagtaggatctgttaagcaagggctttctattgagtctaagtttagatcagagcttcccgagctttccttgacagatgcgataggtaaagaaagcccatatgagccgcgcggatttgcacgaattcttgcaaagttaattgttagtgatgatcgctttcctcaaaccgggaaattgcattccgatggaaaggttgagtttttttataaatcggtaatggttgctcttctcgggactgttattcttgttgcaatttttggtggtgtagcccataaacctgttttgatcgagccgggtgcagagcggccaattggtgaggcttccacagaaaaacagtttaagcgcattgaatcttcagcccaagatgagctgaaagcgctaggtgggcagcaagaggagccaaaacaaatatcttctgcgggggttgttgttcatgagggcgcatcaaataaaattaatgaacctcaaccagtccaggcatctaaaactagtccgaaggtgagtccggtcgaagtagaagtaaataatcctccgaataataaatag

SEQ ID NO: 339061 - DNA, 315 bp, Pseudomonas aeruginosa
atgcagatcagccgaagcggtgccagacttgatccctttctgcgagctggcatcgtccttttttttggttcgttactctgccctttcgatgacggtaaccgtcgcctgacgcgcgtcattaccgggcttggattggcccagaggagacagcaggccattctcttatatgccatgaccgctaccatcctcgacgaccgagccggttaccaccgtatcctcgaagccatccagaaaggcaccctagatatctccgcctggctgcaatggtttctcgcgacgctgctcaatagtctggacaggcccttgagcgagtag

SEQ ID NO: 339062 - DNA, 2148 bp, Pseudomonas aeruginosa
atggatattagttatattgtgggtgtgctgagttgtaatatattgtctaggaagcttgttgaaagtttgaggtcagagctggcgactgcaaaacttggaagaaaaagattaaagtccgaagtagagagcggcgttgcagagttgctagccttaatgggcggaaataacgtaaaagctgcgaagctacttgctcgtgcgctgattgtattttcaccagaaaaatctcttctcgagatgcgaagtgttggtgtgtttagatgctcgaaatacaagtttaaaacgggggttgtgaaggccgttgttcgcgactatatagagaacagggatgctttgggacttgactctgaacagcttgaatactttgagtcagttcagcgcctgcttggtctgggctcgagggcctgtcagattaatgctgggctcttagatgttataaagagtaggaagaagctcattataaagaccttgctggctaatctggaaatgatattcgctacgcgcatgccggggtttgataagagtctgtcatcaaacggaatagagcactatagtaatgaggacttggctgaggctttcagttacatattaaagatgtatcgcgatgagtttggtgttgtcaatgaatatttccagcacgtcgatgagtcagcaaatagtacggatctatattggcgcttactaatagatgctgcaaaaatatgtaactataaagaggcggagcttctgttagatgcctttccataccaagtgactcagcgcgccgcagggttagtggtcgaggctattgatcctagactggaacagtcaatgaggctgggctacatacaggcagtgcagcaaatgattattaggcgaattggcttggagaaatatgtttttaatgagcagaattcgcgtaggccagcctctattaaaaaatttgcagaggaagtctatcaggcaggaaaagatcagatcatttttgtgaactccaagccaattccccgatacgttcttggattcataatgaggccagaactttttgagcctttctctacgaacgatctctttgaggaggagatagaagcgcttgttcagctcgggttggagaattatgagtatggtgctctgaaggacgttgagattcgcgacggtataacagctctcgatattatgaaggttcaacggctatttagattcgtgagcacagtttatcagtgcgcattggccgatcatcaagagattgatcaacacgccattgcgttaaggtctgtattacctatatttagcgaggaccggctcggacagtttctcgagttgattcttccaggtcgcgactataagaaagttttagggctaatttctctggatatttcgagtgccgaccatgttgatatacaatatgcgcctcttataaagttaaacggccactacctgacggctcctgcaattgtggctaattctaatctcacaagaaatatattctgtgggcacagaataaagcagccatttgtcggtgatgtagatccgatgcagtccaaaattgcagagactttagagtctcaaggattttcagttgcgcaagaagtaaaaatatctttccaaaagaaagaaatggaaacggatatagtcgctttcaaagatggaaggctttttttaattgagtgcaaaaacccgtatcatccctgcaatgttcatgaaatgcgcaatagttacgatcatatatcatatggcgcatatcagttggatgttcgtacagactggcttctgtctgtagatgagcaaaaaaggcttttcgcagcggcaggcttaaagtatgaggtcattaaagaaattcacacctgtatagcggtggcaaacagagtgttcaatgggtatgtcgcaaacggtcacccagtccgtcaggggcacgagctgataaatatgataggttctggtgtaattaatattgcaggactgcctaggcgggtctgggctgcaaaagagtttgctgttgaagatcttgtatcctatttgcatggagaaactacgataaaagactgcatggactcgcttgtcaatgtagatattaagtacgaattgaaagatagggcgcttatattttcaacgtatatccttgatatggagcgtttatccgaactctccaatagataccctgagatggtttga

SEQ ID NO: 339063 - DNA, 435 bp, Pseudomonas aeruginosa
atgaaactcaagcccttagctcccctgctctgcctattcatcgccgtaccaggcctgagcgtagccgccgaaaagacggtctacggcctgaacgaatacgcgcgcatcaacgacccggacatccagctggccgccaagctcgacaccggcgccaagaccgcctccctcagcgcccgcgacatcaagcgtttcaagcgcgacggcgaaacctgggtgcgcttctacctggccaccgacaacgcgatcgagctgcaggtctgcatgggcaaggcgattcgcaccatcgaagtgaacctgaccgaccgaagtgcattccaatacccgcttttgatcggctcggaggccttgaagaaattcgacgcactggtcgatccgagtttgaaatactcggccgggaaacccggctgcaaacctgatgcaaaacctgctgagtaa

SEQ ID NO: 339064 - DNA, 264 bp, Pseudomonas aeruginosa
atggccgcgagcaatgccaggcccacccagatcccgcacggggcgatggtcgccgcctcccccaggcagaacgccttcgacaggacgagggtagcggagacggtaagggcggccagtacgctgctcagcgtcaccgtagcggcctggaatcggacggcgaacatccgccggcaaagcgccccgacccacgaaaaccggggtggctggccagctttctctcggtctgtcatatacttggccgagtttttttccttttcttcatga

SEQ ID NO: 339065 - DNA, 456 bp, Pseudomonas aeruginosa
atgcagcaggccaccccgaccaaccccagggccatcgcccgcggcagggtccgcgaagcgtggcgcacctccggcgccagcggcgtgacgaattcgcaaccgacgaacatgaacatcgccatgcccaccagcgacagcagggtcggcaggtcgtcgccgaccatcgaggccccgaaccagccctgcaactccaccgcgggcaggcgcaacaggccggccacggcgaagatcatcagggtgctccacatgccgaaggtgaggatcacttcggcgcgaccgaaggcggtgatccccagcgcattcagcaggccgaagcagagcaccatgccgacgcccaccagccaggcgccgccgcccggctcggtaagggtattcagcgactcgaagttgaccagcgccatggtgccgctgagcatggtctcggcggtgccggcgaacacatggacgatcaggtag

SEQ ID NO: 339066 - DNA, 213 bp, Pseudomonas aeruginosa
atgggcatagtgaacatcgacgacgatctgcacgatcaactgcgcaaagcaagcgccgtgtcgtgtcggtcgatcaacgcgcaggcggccttctggatcaagatcggcatactgtgcgaaatgaatccgacgcagagcttcaacgagatcgttgctcgtgaactgcgggccgcaggcgttgtggcacaacctgtcaagatgggatcggcatga

SEQ ID NO: 339067 - DNA, 768 bp, Pseudomonas aeruginosa
atgaccaagcgaccggaagaaatcgcgcttctggcagattcgggccagttgttggcgcaggtgttcggccatctcgatcggttggatctgatcggcatgtccaccatgcagatcaacgatctggtagatggcctcatcgtccatgaactcaatgcacgtccagccagcaaaggccagtacggctacgcctatgcgctcaacgcctcccgcaacaacgtggtctgccacggtgtgccttccgctgcggacatcctgcaagatggggacatcgtgaacttcgacatcacgctggagaagaatggctacatcgccgattccagcaagacctatctggtgggcgaggtggcgctaccggccaggcggctcgtgcagacggcctatgaggcgatgtggaaaggcattcaagccgtccgcccaggtgccacgctcggtgacgtggggcatgccatcgagcggcacgcccgcaggaatggatattcggtggtcagagagtattgcggccacggcatcggccgtgaaatgcacgaggagccccaggtgctgcactggggcaagccacgaaccggcttggtattgcgcgaaggcatggtgttcaccatagagcctatggtgaatcaaggccggcgggccgttcggacggaagacgatggctggacggtcgtcacgtgcgacgggcaactgtccgctcagtttgagcacactgtggccgtcaccgcgagcggtatgcgagtcttgaccttgcgctctggcgagaagaagccgcattga

SEQ ID NO: 339068 - DNA, 303 bp, Pseudomonas aeruginosa
atgaacaacgcactcatcactgacgagcagcgcatcgtgctgctggccaacggccgcgcatccttggagaacgcggacttcgatccggcgcccgtggtcaagctgttcacgccggacgccggcgcgacctggctgctgaccgagattgatcccgacgaccacgaccgcgccttcggtctttgcgacccgggcctgggagagccggaaatcggctgggtcagcctgggcgagctggcgacggtgcgcggctggctgggcctgcgatcgagcgtgacctgtcgttccgcgccgagaagcggttga

SEQ ID NO: 339069 - DNA, 510 bp, Pseudomonas aeruginosa
atgtcgcaactgtccttttcctcgttcgatgcctcgctgatggtgcgcgatgcacaaggccgctacctgctggcgacggcagaccagattctggaggccgcgcgccaggccatcgagcacaagatgcagcgcggtacctcgttcagttcgccggcggcagtcaaggagtacctgcgcgccaagctggctggcttcgagcacgaagtgttcgcggtgctgttcctcgatacgcagcatcgcctgatcgagtacgcggagatgttccgcggcaccatcgacagcgcatcggtgtatccgcgcgagttggtcaaggaggcgctgcggctcaatgcggcggcggtcatcgtttcgcacaaccacccgagcggaaatcccgagccgagcggcgccgacaaggtgttgacccagcgactcaaggaggcgctggcgttggtggatgtccgcacgctggatcacatcgtcgtggcgggcggcagcaccatgtccttcgccgaacgcggcctgatctga

SEQ ID NO: 339070 - DNA, 1095 bp, Pseudomonas aeruginosa
atgtttgagtccagcctgaccgaacaacagttgattgcgcgcttccttgacgccctgcgggagcttccggaggtggaggccgacttcgaccattgggaacccgtcggcacgcacgatgaccgtgggtacgatgctcaggtcgatctgcacgtcgccggcaagtccttcgtcctactgcttgaagccaagaaggccgtctttccccgagatgtgcgccaggtgatctggcagcttcgggcggcgagccacgagaggcctgctgggcacggggaaaagcctttgtcgttcctcgtcgccgaatccatctccccaggcgcgaaggaactactccgaagtgagcgcgtcggctactacgacagcggcggtagcctgtacttgcctgcgccaggtgcatacctctatatcgacaaaccgccacccaaggccctggcgaagtcggtgcgcacgctgtttaccggacggcgcgcccaagtgcttcacgccctgttggtccagcatcaaagctggttcggcgtcaccgagttggcacagcaagccatggtgtcgcccgccaccgcctcgcaagtgctgaccgagttggaacgctttgactggctggaagcgcgtgggcagggtccgagcaaggagcgctacctacgggagccggcagccttgctggacgcatgggccaaggaacttgcaactatccgtcagccgaccctgcgccggtactacgtgccaggcgcgaaggccgatacgctgatggcgcaaatcggccaagtcttcgacgcgcacgacgtccagtacgcagtcagccacgaggccgccgcgcagcgctatgcaccattcctttccagcgtctcccaggttcgtatgcgggtgctaatcggtgcgagcgccgatgcctcgatcggcgacctcgatgcgcgcgtcgtcaacgaaggcgccaacttggccgtcatcgaggccaagtcgccgggagaactgctgtttcgcgagaaggtcgatggcctgtggctggcgagccccattcaaatctatctcgacctgttgcgcggcgaaggccgctccaaggaaatggccggacacttccgcaaggaaaggatcggcttctga

SEQ ID NO: 339071 - DNA, 897 bp, Pseudomonas aeruginosa
atggccaagcctgcaacgttcgacggctacagcgaccaatacacggcggactgcgagcgtgtccttgtaacgctgctgcgcggtctcgggccgtggaaggattcggtctacctggtcggcgggctcacgccgcggtatctcgtcgccgcgcgaccgcctgtggtgccggcgcacgcaggcacgctggacgttgacatcgtaatcgacctgcagatcctggccgacaccgaggcgtatcacacgctggaggacaacctcaaaaagatgggcttcgaacgcgccgaaaacgacgtggggaagaagctctcgtggcgttggcagacccgcaccgaacatggcgcgctgatggtgctggaactgctcgcggacgcgccggacatcgccggcggcaaggtgcaaccgctgccgaccgaaggcacgatctcagccttgaacataccgcattcgtccatcgtcttcgacctgcaccagatcaccgaaatccaggccgagttgctgggtggcaacggcgtcgctaccgagaagatcaagcatgccagccttgtcagcttcacctgcttgaagtccttcgcgttcgaccagcgtttcgagcgcaaggatgcgcacgatctgatttattgcatcgagcacgaacccgaaggcatggacgctgtagccgaagccttccataacgagcgaagtggcaaacatggcgccgtcatcgaggctgcgctgacgatcctgcgcagccgtttcacgagcgacgataagaccgagggctatcgcaaggatggcccggtgtcggttgccaaattcgagctgggcgaaggcgatgaatctgagcagcgcgaagcgcgggcgttgcggcagcggcaggccagcgacgtaatcgaacaactccttgcgcggatcgaataa

SEQ ID NO: 339072 - DNA, 3039 bp, Pseudomonas aeruginosa
atggcgatcaaagcaatcttcgtaggcatcaacaagcacctcgatagctccatacccgaattgagcggagcgcgccgtgacgccactgcgttgtgggcattgttcaccgacacggtcgaaggtctgagtgcccgtctactggtggacgaagccgcgacacacgcggaagtttcggattccatgctcggcaccttggccgccgcgagcgcggatgacgtggtggtcatcgcgttcgctgggcatggttctccagacggcaatctggtgttgttcgacacggacgccagcgacctcgcaggaacagccttgtcgatggctggcttggcggataccttcaagacgacgaaggcccgcgcggtcctgtgcattctcgattgctgtttcagcggccaggcgcccgcgcgcgtgctggagacagcagcgcgtccacgcaatgcattcgcgctcaccggcatctacggagaggggcgcatcctcctagccgcctgcgcaaccaacgaatcagcatgggaacaaccgggcaccgggcacgggctgctcacccacgccgtgatcgaggccttgactggcgcagcaggcgaatcagtcagctttcctgagatcgcaggagagatcatccggctcgcgcgcgtcgaagcggagcgcatcagcgtcacgcaaacgcccgtgttcctgggcagcgtgcggggtggactgacgttcccgacgctcaagcgcggcgacaactacgccgcggccttccccgcaagagccgtgcagcagatgtcgggaccgttcgcggagttttctgcccacggcttccctccagagattgtcgagaagtgggcagcggatttcccgcaaggcctcaacgcgttgcaactcagggcggtcaacgagttcggcgtgctcggtggcaactctctcttggtcgtcgcgcccacaagctccggcaagacattgatcggcgaagtggcggcgattcaagccgtcacctccggcaagaaggcggcgttcctattaccctaccgcgcactggtcaacgaaaagttcgaggagttcaccgagcgttatgcggccgccggtttgcgtgtggcccgttgcagcggagacgctaccgatggcatcggacccgtcctggccggacgctacgacttgggattcttcacctacgaaaccttcctcaacctcgcactcggctcccctcgccttctgaatcaactcggtctcgtcgtgctggacgaagggcagttcatcaccgacccgcagcgcggcatcacggttgaactgatcttctcgctgctcttgcgggcgcgccaacgaggcatcgagccacagctcgtaatcctctcggcggtcatcggcaatctgaacagctttgaccgctggctcggcgttcctctcctactgtcgcgcgagcggcctgtgccgctggtcgaaggcgtgctcgaccggcgcggtacattccagcacatcgataccgatgggagcacgaagaccgaggccttgctgccttcacaccgcatcgtgcaacgccgggacaagcccagttcccaggacgtgatcgtgcctctggcacaacaactggtgggacagggcgagaagctgttgatcttccgtaacatgcgcggtccggcccaaggttgcgcgaagtaccttgccaaggaactgggtctgccaccggctaccgccatcctcgacgttctgccgacccaggacctgaccggcgcctcacaggacttgcgggaatgcctagccggcggcaccgcttttcacaacaccaacttgctgcgcgcagagcgcgaggcggtcgagaaggggtatcgcagcgccacgggtggtattcacgcacttgtcgccacgacgaccttggcggccggcatcaacaccccggcatcgacggtcgtgctcgccgagaacgaattcgtcggtgaagatggccgacagttcaccgtggccgagtacaagaacatggcgggtcgtgccggccggctgggcttcaacgagactggcaaggcaatcatcttggcgaatacgccgatggaacgtgcgcagctttttcagcgctacgtgctcggcgtacccgaggacgtgaagtcctccttccagcagcgcgacctgccgacatgggcattgcgcctgcttagtcaagtgcgcggcgttcgcgccgatgagatcccggggttgctggtcaatacgttcggaggatattcggcgtcgcgtgcgaatccgcaatgggtcgcgatggtggagcgagacgtgaccacgctggtcgatcgcctcctgcaggcgggactagccgagcgcgaaggcaatctcattcacttgacgctgcttggccgtgcctgcggttcttcgtccttgtcattcgagtcgagcttgcgcctagtcgagttgatgggacgcctgaatgtggcgcagacgccgcccagtcacatcttggcaatggtgcaggtgttggatgaactggacgccatctacacgccggtcatgaagaaaggccagtcagagagtgtgcgcgctggcgaggtagcgcagcgcttcgggcatcaaatgcctcaaatgctgcaacggtattgccgcgaccagatcgagttctgggctcgctgcaagcgagctgcgctgctgtatgactggattgagggaacgcccgttgacgtactggagaagcactactccacgaccccatttggcggtgccatcggatacggcaacatcatcggcatcgccgatgcgacgcgctttcacttgcgctccgcgcatcagattctcgcggcactcttccccgatcagcccgatttcctcaagagcttggacgagattcttcagcggctcgaattcgggttgccctccaccgccctgctcctcacgagagtctcggtgcggctgacgcggggccaatgcctggcactgttgtccatcggtgtccacaacgcggacggcctggagaacctggacgatgatcggctgcgccgctgcgtcggagcaggcacggccgcactattgcgctctcagagtaacgtgctggcgatgctggatgaacagggaggagacgagtga

SEQ ID NO: 339073 - DNA, 1935 bp, Pseudomonas aeruginosa
gtgattctgaccgataacgaaaccaaagtcgatctgctgaacaacgaggcgattgccagcacgatcatcgagctgcttcgtgctaagcccgaccatccagtgacgatcggcgtgcacggcgactggggtgcgggtaagtccagcgtgctcgagatgatcgaggccggcttcgctgaccaggacgatgtcctgtgcctcaagttcaatggatggcgcttccagggcttcgaggatgcgaagatcgccttgatcgaggggatcgttacgggcttggtcgagaaacgtccagccctaaagaaggcggcagtagccgtcaaggatgtcttccgtcgcatcgattggctgaaggtcgccaagcgggccggtggcttggcgctaaccgcatttacaggcattccgacgcccgaacaaatcggagccatcgtcggctcgctcgaagcgttgatggcagacccttccaagctcgtcactaaagaaaacctctcgacagccatcgacgaggtgaaggccgtgttgaagccgggtgagtccaagaatgtgccggaggaagtggaggctttccgaaaggcgttcgaccagcttttgaaagatgcaggtatcaaacagctcgttgtcctgattgacgacctcgatcgctgcctgcccgacacagccattgaaaccctcgaagcgatccggctgttcgtgttcactgcacagacggcattcgtcgtcgcagccgacgaggcgatgatcgaatacgcggtgcgcaagcactttcccgatctacccgacagcaccggaccgagagactacgcccgcaactacctcgaaaagctcatccaggttccgttccgcattccggccttgggagagaccgagacgcgaatctacgtgacgttgttgctggctggcgccgaggtcggcgagaacaacgcggactatgaaaagctgatcgccgtggcacgggagaatctgaaacggccttggaccagcggtggtctggatgccgcgacggtcaagacagcgctcggcaagcaggccgagaaggcgaacaatgcacttgcactcagcgaccagatcggccccatcctggcgagcggaaccaagggcaacccgcgccagatcaagcgcttcctcaacacgctgttgttgcgcgagcgcaccgcgaacgcgcgcggttttggcgacgacatcaaactacccgtgctcgcgaagttgatgctcgcggaacgcttcatcccaaggttgttcgagcaaattgcgttcgttgcggcaatccatccgcaaggcctgtgcgaagaccttgaagcactggagaaaagccttgcgatagctaacgataaagatggtgagcccaaggggcagaaagccgccgagcccgcccctgcatccgacaacgccgtgttgactgagtggaaggcgtcggagacggtacgcgactggtcgcgcctctcgccgaagctgtctggactcgatctgcgcccctacctgttcgtgacaaaagacaagaaggattacttcggcccggtgtcggtgttgggtcacttggctggcgtggtcgagaagctgttcggcggcaagatgaccgtccaaggctacgaagccgaattgaagcaactcgtgcaacccgaagccgagaaggtgttcgaggctgtgcgcagcaagatcatgggcacgggcgctttcgacaccagaccggcaggtgtcgatggtctcgccgtccttgtgagggcgcagcccggcctccagagccggttgatggacttcctggaggcactgccaagtggcaagtgcgggccttgggtcgtcagcggctggcaaggcgtcatcaaagacaccgaatgcgcgactcgcctgacgaagctgctcggagactggagcaaagtcaccggcaatcccggcctcaaagccagcgccgaagcggcactcaaggatatgaagggagggcgctga

SEQ ID NO: 339074 - DNA, 552 bp, Pseudomonas aeruginosa
atgggtgcatctcggggagcgggcgcgcggctccttggcttcttggccgatgcgcaagcgcggggggtgcgtgaggccttgcgcgccctggatctggaatcattggcaggccgcccgatcactgagattttcgtgggcctggccgactacgtctgcccaggtgcgggcacggttgatgaaggcattgcccgcgaggcttacatcgaaaccatcgttgaactggcgagcgaaggactcaccgatctgaccacgtttacccccgatcaaatgcagacggtattcgagctgtatgccacccatgcgatcgaggcgcgcatctgcaacgacatcggaaccaaagccgtaaccatgccaaccgatgcgcaggctgcgcatcgcgtcgagcaacagttgcgcgacttcatccgaggcggagtgagcgatgcactgacgcgagcacgggcggagacacccaatctcactccagaacggattcaaggcttcgtggacgctgtgtacgagtccgcatttgcaatcttgcagaccctcggcgacgcagaggccaatcaatga

SEQ ID NO: 339075 - DNA, 1368 bp, Pseudomonas aeruginosa
atgaagcgacaactcctggcgggccgctttggcccagacgaccgctttgatgtgacggcgggcgtcgatgaacagacgacttacctgcaactcgtcgctggcgagaaatccttagaccacggtatcggaggcgcgctcacgagtctgaagaagatcggcgtgtttccttcggaaatcggcatcgacctgatggtactggccgcccatgtccatgcggccgatactcgcatctctcgcactgaacagtcccaagattcgtggacgcgcgagatacggttggtcgtgccggtcagcgacccggctcgctggagcgcagcagcgcctatcctcaagaagtctctggacttcttgacgggcgatcgctggacgatcggcttcagggcacgtccagatcgattcgcggcaatcgcccaagcggcgcccccgagtttgatcgctcctcccttcgattccgtcagtctgttctcgggtggactggatagcttgatcggagccatcgacctgttggaagacgacgccactcccctcctggtcagtcacttcggtgaaggtgcaatcagcgacgcgcagggcaagctgttcactgatttgagaaagcactacgcaaagtcctcttttgagcggctgcgtgtaggcatgaccttcaagaagggcctggtggcggatgttggttccgaggacagcacgcgtggcaggtcgttcctgttcttcgcactcggcgtgtttgcgggcactggacttgggcaccgtttcgtcctgcgcgtccccgagaatgggctgatcgcgctgaatgtgcctttggaccccctgcggttggggtcaaacagtacccgcaccacgcacccgtactacatggcaaggtggaacgacctgcttgtcgcactcaacatagatggagaggttcgaaacccgtactgggacaagacgaagggcgagatggccgcagcttgccgcaactcaaccctcttgaaagagttggtgacggattcgttgtcgtgctcatcccccgccaaagcacgatggctcggacatggcattgagcactgtggctattgcttgccatgtctgatccgccgcgcggcgttgatggcggcatggggtactggatacgacccgacaacgtacaccgttcccgatcttcatgcgcagcccttggacacgcgccaagcgaccggagtacaggtcaggtcgtttcagtacgcgatcgagcgcttgagaggcaagccgcagctcgcgaacctcttaatccacaagcctggctcgcttgcggatgaagccgcgcacctagatcagcttgccgatgtttaccggcgtggcctcggcgaagtcgcacggctcatcgacggtgccgaggcgagaccgaattga

SEQ ID NO: 339076 - DNA, 750 bp, Pseudomonas aeruginosa
gtgatcgccactgcggggctcgtggacttccactgccatcttgacctctacccgaaccatgccgcggcggtccaagacgcggaggcatccggcgtgttcactctgacggtgacgacgacacctcgcgcctggcctcgcaatcacgaactagcgcagcgcacgaagcatgttcgcgcggcactagggctgcatccgcaattggtcgcggaacgtgaaagcgagatcgagctatgggatcaataccttggggagacacgctatatcggcgaagtcgggttggacgccggcccccggtacttcaagtcgctcgatgcgcagaagcgagtgttccagcacgtgttgcagcgctgcgcgcaggccggtgacaaaattatcacagtccacagcattagatcggccaaggcggtactcgatcttgtcgaggcacatctaccgcccgagcgcggaaaaatcgttctccactggttcacgggaacaaagagcgaggcgaatcgcgcgttggagttgggctgctacttctcgatcaatgcgggaatgctgggcaacgagaggcacgcaccgatggtgcaggctatccctctagatcggatgctgacggaaaccgatggccccttcactcgcactggcgatagaccttcgcagccaagcgatgtagcgagcgtcgtcgaggaactggggcggttgcataggctacctgcgagcgacgtggccagtctcattcgtgacaacctacgagcgattctcgtatag

SEQ ID NO: 339077 - DNA, 1269 bp, Pseudomonas aeruginosa
atgcccgacattcccattgccgacgctctgttctccgctctcctcagtcgtgacgcggatgcactcgatgcgatcgaggcaaatcacgccgccgaatgcgcattcattcgcactgtcatctgcaccgatgcttcgggtgccgttgacttagacctcgggctcagcgtgtcctccagcgactacgtgacctcgttttttgaagggccgcgtgcgttcttcatgtcggccggaaccagcgtccatgcccgtctcacaggtggtaggtcgaacgtgctgatcgacttctctctcagcttcgactcgaatttcgcagagaagctgcgtgcagtcatcgccggcgagaacattcagcgggctgatcgcgatagggtcatcgaaattctcatgctgaaggctcgaaaccgccatgtgcagttcgatgtgatgccgtttctcatcgagaacacgcgcatggcccgtaacgagccctcaaacgagcgccccctgaatacgctgatcgctttccgcatgctcgaccacctgaattggcatgcctttcaggatgatcccagccgcttcgctttcgatgcttcatacgaggacctgaaagccctgctccggcccgatgccgaagccttcctggcggagtttcaagccagtgagcatatcgatcatcacgaagcaaagagcgctggagcgcaggcgctgctactgcggttcgctcgactttggcatgaggaacgcaaacgggacaagaatcgcatcctgcgtgaattgctccgtttcagcatccataaactagggtcgatcccgcttaccgaattgcggctgatctggagtagcatgacctctagccagggatcgccattcttcggccccatcatgggcagttcccctgagatgttgcagaagattcgcggcatggcctgggacatgacattgctccgcgttatggagcaaatcgccacagctagccaggccggctccttcttcatcccctatttcgtgtcaatggatcgccgctggcgccatctccttagcttaaatcctgtgaggttgatgctgatcgacgacgcgcatcgacgcgtgcttttcgcacggaccgatgaactagagttccagcgcgtgctgggagagtgcatgcagaccgcatttcagttggagatggcacctgaaagggtcgaggctcgccgcagggcggcgcagaccgttgaattgaacgcaatgaagcagctcgtcgccgaagaagagccattggctcgaacaagagctgcagtagccgtcgagtga

SEQ ID NO: 339078 - DNA, 348 bp, Pseudomonas aeruginosa
gtggaacagctatcgcaaacatccaacgcgctccccttgccgggaacggaagcctacgaggcgctgccgcagttcccgaagcaaagcccccttcccttccggcgcaccattcgccgccaagaactgcggcagatcgtccctctggccgaaacgacgatctacgaaatggagcgccgcggtgagttcccgcgccgcttcaacctgacaccgcgctgcgtcgtgtgggacttggccgaagtggaagcgtgggtcgagcagcgcaagcaagctcctcgcagcggcgtctcgaagcccgatgtccatctacggaaaatccgccctgttcgggcgggttcgagagaggaatga

SEQ ID NO: 339079 - DNA, 1260 bp, Pseudomonas aeruginosa
atgcttaccgacaccgcactgcgcaacctcaagcctaagcccaagacttataaggcttttgaccgcgatggcatgtacgtgacggtatcgcccgtcggtaccgtcaccttccgctacgattaccgtctcaacggtcgccgtgagacgctgaccatcggccgctacgggccggcaggcatctcgctggccctggcccgcgaaaagctgatcgacgccaagaaggccgtcgcccagggtaaatcccccgcgctggagaagcagcgcgagaagcgccgactgaccgccgccaagacctttggcgacatgaccgaaaagtggctggcgggcgcccggatggccgacagcacgaaggcgatgcgcaagagcatcatcgatcgggacatcctgccggcgttccagaaccggcagctcaacgaaatcgcggccgatgacctgcgcgccctctgcaacaaggtgaaggcgcgcggcgcgcctgccaccgcggtccacatccgcgacatcgtgaagcaggtctacgccttcgccatcctgcacggcgagaaggtggacaacccggccgacgacgtgggcgcggcgtcgatcgcgaccttcgtgccgaaggatcgtgccttgtcaccgctggaaatccggttgatgtcgcggcagatggagtcggtggccacctatccgaccatccggctggcgttgcggatgatcgtcctgacgctggtgcgcaaaagcgagctgatcgaggccacgtgggacgaggtcgattttgagagcgccacctggacgatcccgaaacagcgcatgaaagggcgcaatccgcacgtggtctatctgtcgcgccaggcgctcgacatcttcgtggcgctgcatacctgcgcagccggctcgaaattcgtgctgccgtcgcgctacgactccgaccgctgcatgtcccatgcgaccttgaaccgggtcacgcagatcgtggcagagcgggccaaggccgccggcctgccgctggaaccgttcaccgtgcacgatctgcgtcgcaccggctcgacgctgctgaacgaggtgggcttcaaccgcgactggatcgagaagtgcctagcgcatgaggaaagcgggcgctcctcgcgctcggtctacaacaaggccgagtacgccgagcagcggcgtcacatgctgcaggagtgggccaacatggttgatgcctggatcgacgggcagacctacgtgccgaggctgatgccggagcatgtggtcgtgccggtgttgagcgcgacggtctga

SEQ ID NO: 339080 - DNA, 369 bp, Pseudomonas aeruginosa
atgaagcagagttcgattctggcggaaactcgccatgagctgctggacgacattgctgcacatactgcaacagtactgtctgaacatggtattgacgctggcctggctgaacaggccggccacgcggtagctgatcatctggcgaaccagtggcgtggtgcgacgctatacatcccctccgactatcgccaccaggttaccaagcgtgatctccagatcctctccgagttcaacggtcgtaaccatcatgccctggcccggaagtacggactgacgcccagttctatatataagctgttaaagcgtattcaggatcggaagttcgaacatgaccagggcaaactggacctcggcgacggcctggcctga

SEQ ID NO: 339081 - DNA, 921 bp, Pseudomonas aeruginosa
atgagcgaagcccggctccactcgcccgaccccaggacaccgcgacccatggccggttgggcggcaagcctgcgcgacagtggactgctggcgctggcagtgccgcgcgtgttcgccggcatggagcggggctggggggaaatcttcgctggcgtccgccacctggccgagcaggaactcgagctggcacggcgcctggccctgcatcatctgcagatcgcttccattcgcctgctgggtagtcctgaacagcagtgccgcctgttgccggccagcgtcgagcgccgctggctgtggagcgaggcggtcgatctgcggcgcgcccagcccgaagcgcaggagcactggcggggcggtttcctggtgggtggacggggtagcgattgcttcgccgtggaagacgtggatcgcttgctgatctcagcctggcacgcgccctcccgcgctcacctgatcgctgtcgccgaaacggggcgggcaggcatcgacatctccggcctcgccgatggctcggggctgttcctgcccgccgggcagcggctgcattaccagcggctgcggctgcatcccgaggacatcctggtgccgcccggcctgccgccgaccccgtgcgggcaactgcgcgaaggcttgacccgattggcccaggccaacctcgacctgggccaggctgcgcgggtgccgggcgacgtggcggggcagggagaggcgccgcgtctcctcgccctcgcgctgcgtcttgtcgaactggcggcggagtccttccaggcggcattcgcccgcggcggcgcgctgacattccgcgaaagcgcggcggcgtcgctgctggcgagcgaggcggaggcggtggcccgcgccgggctgctcgcctgcctgcgccgacaggccctggaagcccgtttgctgggcgcggccctgtag

SEQ ID NO: 339082 - DNA, 504 bp, Pseudomonas aeruginosa
atgggcgacggcggcggcgaggtactctcctaccatcgcctcagtatgcatcgcccggagcgctacgcacccggtcccggcggactggactgggcgacccagccggcgccgttccgccagtaccggggctgccggcaaatcgaactgctgcatcggccgctggaggagtcgccaccctacgacggggtgttttccgggccggcggccgcgccctctcggctcgatcgccgcagcctctcgcagatgctctacgacggattggcgctgtcggcctggaaggaggccggcggcactcgctgggcgctgcgggtcaatccgtcgagcggcaacctgcatcccaccgaagcctacctgctgcttcccggcggtaccctggagccggcgccgctgctcgcccattaccgtcccgacaagcatgccctggaggtgcgcggcgaactgccggcgccgctggcttcgctgctggatgactgcttgccggccggcggctgcctctggcattga

SEQ ID NO: 339083 - DNA, 579 bp, Pseudomonas aeruginosa
atgaacgcgaaccttcccccttccgccatttccgaactgcatggcccgcgcctgctgctgcgcgcctggcgcgacagcgaccgcgaggcgttcgccgagatgtgcgccgacccgcaggtaatggagttcttccccagtgtgctcgaccgcgcgcagagcgacgccttggtcgatcgcgtccaggcgcattttgccgagcgtggctacgggccctgggctctggagctgccgggtgaggcggcgttcatcggattcaccggcctgttcgacgtgaccatggacgtgcacttcgccccgaccgtggagatcggctggcgcctggcgcccgcctactggggccgtggattcgcccgcgaagcggcggaaaccgccttggacttcgccttcgagcggctgcgcctgcccgaggtggtggccttcaccacgccgcccaaccgccgctcctggggcttgatggagcgcctgggcatgcgtcgcgatccggccgaggatttcgaccacccactcctggcagcggatcacccgatgcgccggcatatcctctatcgcgtcgacgcggcccgctgggcggagcggtga

SEQ ID NO: 339084 - DNA, 732 bp, Pseudomonas aeruginosa
atgaacgaagctcgctacgcgctggtggccaaggacttgagggacaagatcgccaacggaggctacccggtgggatcgctgctaccgaccgaactggagctgtgcgagctctacgaggtgagccggcacacggtgcgcgcggccatcacccagttgcagaaccagggcctggtgtccaggcgcaagcgagtcggtacgcgggtagagtcatcggcgccaagtgggggctatcggcattcgctggagtcggtggaagacttggtgcacctggcggagacacaggtgcgcagcattcaaaaggtgcgtcatttcgtggcagacattgccgaggccgagcgccttgaactgcagccgggcggtcactacttctgcgtctccagcattcgcatcgaccagggccgtgaaagtgcccccatgtgctggaccgacgtttatgcagatgaagcctatgccgacgtgatcccgctggcggaacagcacccggatgaattgatctctgcgctgatcgaacgcagcttcggccggcgcatcgatgtcatcgaccagcaggttaaggcggtgctgatttcgcccgaactggcgcagaagcttgtggccgagcccggtacgcccggactgaagatcatccgtcactaccgtgatgaacaaggcaagctggtcgtggcttcagaaacggtgcacccagatgatcgcttcacactggttatgcatatgaagcgggaaaagttgtaa

SEQ ID NO: 339085 - DNA, 1356 bp, Pseudomonas aeruginosa
atgtctactaccgtcttcgactctgccctgttccgcgatatgttcggcaccgccgaaatgcgtgctgtgttctccgacaaggagctcatcgagcgctacatcgaggttgagatcgccctggccaaggctgaagcgcgctgtggcgtgattcccgccgtcgctgccgaacagatcgcggacctcgcccgttacgaagcactcgatctgcaactgttgcagcacgagaccgagatcgtcggctacccgatcctaccgctggtggagcagctgtcgaaaatctgcggcgaatccggcggctatgtgcattggggcgccactacccaggacattatggataccgccgtggtgctccaggttcgcgccgccctggcgatcgtcgagcgtgacgtccaggccgtgcgtggtctgctggccgatctcgccaagcgttatcgcgacacgcccatggccggccgcacccacctgcagcatgcgttgcccatcaccttcggctacaagtgcgccgtatggctgagcatgttcgaccgccatgccgagcgcctagtggaactccgtccgcgggtagaagtgggccagttcgccggtgccgccggcaccctcgcctctcttggcgacaagggccttgaggtgcaggaagcactcatggatgaactgggcctcggcgtaccgcaggccacttggcatgtcgcccgcgatggcctggccgagaccctcaactacctcggtctggtcaccggatccctgggcaagatcgctctcgacgtaatgatgatgatgaccagcgagcttggtgaggcatacgagcccttcgtgaaaggccgcggtgccagcagcaccatgccgcagaagcgcaacccgatctcctgcgagttgatgtacgccgccgccaagggcgttcgtcagcaggccggcctgatgctcgacgcgatgattcaggacttcgaacgctccaccggcccctggcaggccgagtgggtggcaattccagaagccttcgcactgtccgccgcttccctgagccaggcgaagttcatgctcgccggcttggaagtgaaaaccgaacgtatgcgccagaacctcgacatgacccgcggattgatcgtcgccgaggcggtgatgatgggcctggccccggctctgggccgccaggtcgcccatgacgtggtctacggtgcctgccgagccgcgaacgaggacggcatcagcctgctggacgctctacaggcacactccgaggtcactgaccgcttgagccacgctgaattggagcgcctcaccgatccggccaactacctgggcctggcgccgcagatggtggaccgcgccctggcccgcgaaggcgcggtcaagcgctga

SEQ ID NO: 339086 - DNA, 1299 bp, Pseudomonas aeruginosa
atgactgcttccccgaaaaagcccttctaccgggacctgacctttcaggtcatcgctgccatggccctgggcatcgccttcggcttcgtcgctccggaactggccgcgcagttcaagatcctaggtgacatcttcctcaagctgatcaagaccgccgtcgcgcccctggtgttcttcacagtggtccatggcatcgcctctgccggcgatatcaagcgcgttggcaaggtgggctggcgtgcgctggtctatttcgaagtggtgtctaccatcgcgctggccatcggcttggcctgggccaacctgctggacatcggctccggcatgcacgacgcccaccccaatagcgccacctcagccgccaccgccgccgccctggccaagggccacgcgccttcctccacaatggagttcatctacggcattttccccgacaacttcgtcggcgccttcgctggcggccagttgcttcaggtgctggtgatttcagtgctgttcggtttcgccctgctggcgttgaaggaagaccgccgtgcggcgatcgaggatggcctgaaccgtgtgtccgagtgcttcttcgagttcatcaatctgatcatgaagttcgccccactgggcgcgttcggttcggtggcctatgcagtgggcagcaatggaaccgccgtgctgatgtccctggcaaacctggtgctgatgttctacgtcgccgtgatcctgttcattgtcgtagtcctgggcgcagtctgccgtctctcgggcttcagcctgtggcgcttcctcaaatacatcaaggacgagattttcatcgtgatcggcaccgcctcctccgagagcgctctgccacgtctgctgctcaaactggagaagcttggttgctccaagcaaagtgtcggcctggtcctgccgaccggctacgccttcaacctcgacggcacctcaatctacatgtcgttgtgcgtgctgttcatcgccaacgcctacggcgtgccgctgtcctgggaacagcaactgggcatcgtcgccattatgctggtgacgtccaagggggcggcggcggtatcgggcggaagcttcgtagtcttcgctgccaccgtcaccgccatcggcgtcctgccggtggaaggtcttgccctgctgttcggtgtctaccgcttcatgtccatggccattgccacctgcaacacaattggcaacagcgttgcaacggtggtagtcgccaaatgggcaggcgaattctccgaggaaaccgcgcggggggagtatgaaagagcgcagcggggaagccctgctgcagtctga

SEQ ID NO: 339087 - DNA, 924 bp, Pseudomonas aeruginosa
gtgatttttctttacgacgcggagccggaacacgcggatcaatggcgcgccttgctggcggctcagttgccggatgtggcgttcgtcgagggcttcgaggcggtcgatccagcccgcgtgcactacctgctgacctggcagccggtcgccgatatcgagcgctacacaagcctacgcatcattttctcggctggcgccggggtggaccagtttgacctctcggcgatccccgagtcggtggcgctggtgcgcatggtcgatgagtcgctggcggacatcatggccgagttcgtggtgctttctgcactagcgatccaccgcgatctgccggcctaccgtgaggaccaggtgcagcaggtctggtcgccccgcaccattttgccggcgtcggcccgccgcatagggatcatgggccttggccaactgggcatggcgtgcctggcacagttgcgccacctgcgcttccaactgctgggttggaaccgctccgtgagaaaactcgacggggttaagagctatacaggtcccgaggagctcgcgagctttctgtctcagtgtgacatcctggtcaacctgctgccgttgaccgacagcacgcgcggcatactcaaccgcgaaacgctggcgcaattacccaagggcgctggcctgatcaacgtcggacgtggcgaacacgtggtggaaacggacctgatcgttgcgctggactcggggcagatcggcgcggcgatccttgacgtcttccagcaggagccgatgcccgaagcccacctgctgtggtcgcatcccaaggtctgggtcactccgcatattgctagcaccatgcaggtggatggtggagcggaggtagtggcccagaacatcctgcgcgacctggacggcagagagctcctctataccgtggatcgccaagcgggctactga

SEQ ID NO: 339088 - DNA, 960 bp, Pseudomonas aeruginosa
atgaccggcctgcgtcatctgccccctctgaacgccctgaagaccttcgaagccgccgcccgccaggccagcttcaagcgcgcggcggaagagctctgcgtgacccaggcggcggttagccggcagatccaggtgctggaggacttctacggcctgaagctcttcgtgcgcggcaaccggcgggtcgagctgaccagtgaagggcaggcgctttacctcgcggcctcgtcggcgctgcagcatctggccaacgcttcccacaacctgttgcgcagcaacgaccaggactacctgccgctgaccaccactagcgcctttgcccaactgtggctgatgccgcggctgcgtcgcttgcgcctggcgcatccggaaatccgtttgcacctgatcagcggcgagggcaacccggactaccgcgaaggcttccacgccgccgtgaccctggggctggaagagaacccgcagtacgtggcgcagtatctgttctccgaggaagtattcccggtctgcacgccacgcttccttgaacggcatccccagatcgcgacgctcgaaggcatgcttggcgtgccgttgctgaatctcagcgcgagccactggaaggcgcggctgtgggagccggtggactgggccttctggcttagacagattggcgtagagactgcgcccgcgcgcgaagcgatgagtttcagtcatttctccatgttgatcgacgcggtgcaccaggaagagggtgtgggcattgcctggcgccatctggtgcagcaccagctagatgcgggaactctcgtccggccgctctcgcaaagctggcgggtggatgagcgcaagcactacttcgtctgccgtcgggacctggcaaagggcggtcaggtccagctgctgcagaattggctgctggaggaaaccagaccgctgcgcgaggccagcgacgggcaggcaggcgagagcgccggctga

SEQ ID NO: 339089 - DNA, 768 bp, Pseudomonas aeruginosa
atgagattccagaacaaggtggtcgtggtaaccggaggcgccggtggcgttggccaggcgctggtccggctgttcgcgaaggaaggcgcgaagctgatgatttccgacctcaacgccgagggctgccaggccatggtcgccgaggcgcagcgcctgggcgccgaggcagagttcctggccggcaacctgcgcgagaaggagtactgcgaggcgctgatcgcccgcgcagcggagcgcttcggcggcctcgacatcctgctcaacaacgccggcatcatcccgcgcggcaccatcgaggagaccactgacgacatgtggttcaccgcgctggacgtgaacctcaccgccgtgttcttcctctgccgggcagccatcccgcacatgaagcagcgcggcggcggcgctatcgtcaatacctcctcggtgtggggcgtctaccctggtcctggccacgtcgcctactgcaccagcaagggcgcggtggcggcgctgaccaagaacatgggccgagacgccgcgccattcggcatccgcgtcaacgccgtgtgcccccacgagatcaacacgccgatgatccgcaccggcttcgcacgccgtgggctggacccggacaaggccatcgaggaactgaacaggaccgtgccactgggccgtatcgccgagccggaggacatcgccgacgtgatcgccttcctggcttccaacgaggcgcgctacatcgccgcggaaacccttgaagtgaccggcgccaagccggtgtcgggctga

SEQ ID NO: 339090 - DNA, 759 bp, Pseudomonas aeruginosa
atgaatctgatgaacaaggtggccgtggtcactggcggcggacgcggtatcggccggggcatcaccgaaaaactgctgctggccggcgcccaggtactgatcgctcagcgccaggcgttggatgaagaactgcgcacgcacccaaacgtggcctggtgcgaagccgacctcgccgaccgcgaggcgccctatctcgtcgcccgtgcagttaagcagcgtttcggtggcgccgacatcctggtgaacaacgccggtttcatgttcgagcagtccctggacgaaatgagcgaggacgactgggaccgcatgatggcggtgaacatgcgtgccccggtattcctcgccaaggcactgttgccgcagatgcgggagcgcggcggtggcagcatcatcaacatcggctccatcgaaggcatcggcgccaacccctggcacaccgcctactgcggctccaaagccggcgtgcacggcttcacccgcgccatggcggtggacctgggccgcgacggcgtacgctgcaacgccatcgcgccggggtggatcaattccgacctgagcaatgcctacatcgacggccaggccgatccggatcaggcacggcgtgatctgctcaagttgcacccggtaggtcgcaccggcgagccacaggacatcggcaatgcggtggtgttcctgggcagcgaggagtcggctttcatcaccgggcaagtgatcgtcatcgatggcgggcgcacggcgaagttgccgttgcccttctaa

SEQ ID NO: 339091 - DNA, 1044 bp, Pseudomonas aeruginosa
atgagtggccctgtgaggacctccttcgaaagtgtgctgcgcagccgaaacctggcccatctggatcaggtcaagcatgtgctcgccgcgccgcaatcggcgcggcgggtcattttcgtgctgcgcgagcatttttccatgctggcgttctccgcggccatggatgcgttgctcaccgcgaacatcatgaccgccacgccactgttcaaggtgcaggtcgccggaagcgaacgcagcgtgaccagcgacctggggctttctgttgccaccggtattaccctcgttgaactgcacgcgcagccgcaggacattctcatcgtctgtggcggatttcgtgtgaggttggcgcccgatccactgctgcgcggccgtttgcgccaggccgatgctgccggggcggtgctcggtgggctctggaatggtgcctactttctggccgaagcggggctgctcgacggccacgaatgcgccttccaccccgacggccgggcggtgctcgccgaggttttcccgaacgtcaaggtttctgccagcacacgtgtcgtcgatcgtcggcgcattacctgcgcggggcccaacagtgcgctcggcatgatgctggacgtggtatgcgaggcgggcgggcaggagttgctcagcgccgtggaggaagtcctcaactccgacaagctgccggacgcgactgccgccccggtgtcatcggtcgcagctaacccgagcctgccgcgtaccttgcgcttggcgctggagctgatgagcagcaacatcgaggacccgatgggtcacgaggacatcgcacgttacgtgcgcatttcgcgccggcacctggagcgcctgttccgccgccacgtcggcacaacgcccgagcgctactacctggagctgcgcctgacccacgctcgtcagctgctgcagcatacccagcggccgctgatcgaagtggcgctggccagcggcttctgcagtctgccgcatttccaccgttgcttccgcgagctgttcaacatcacaccggggcagttccgtgcacggggtgggtggtag

SEQ ID NO: 339092 - DNA, 1347 bp, Pseudomonas aeruginosa
atgtcgctctattcgttcgtccgcgagtttcacttcgaacaggcgcccgcgcgcacccgcgagctgatgcagatctgcctgctggacatcctcggtgtcgctgccggcgctcgagacaacgccaccagccaagcgctcaggcgctatgcgctgaatcactacccggcgggcgtactgtccagccgcctgctgttcgacggccgccccgtacaccctctgggcgccgcctgggccggtggtttctgtgtcgacagcctggacgcccacgaaggccacttcacctccaagggccatgccggcgccaccgtggtaccggcacttctcgccctggccgatgcctgccggcagaagggtcgcaccatcagcggcgcggaactgatgagcgcattgaccctgggctatgaaactgccttgcgtgccggtgccgcgttgatggccaccgcaccgcaataccacgcctccggtgccttctccggcatcggcgtggtgtgcggcggcgcgcgcctgctcggctttgacgaacagcagttccgccatgccctgggtatcgccgagtactttggcccgcgctgcccgatgatgcgcctggtggaccatccctccatgcttcgagatgcccatggcgccggcgcccatgccggcctcaacgcgctgctgctggccgaggccggcgtcaccggcgcgccggcggaaaccatcgagtttcctgaagtcgccgaacactggtgcgatctcggcgctcgctgggagatcgatgcgcagtacttcaagccctggccggtatgccgctgggcgcagccggcgctgaccgcgttgaccgcgctgatggtcgagcacccgtcgatccgtggcgaaagcatcgagcagatccgcgtcgaaaccttccatgaatcggtgcgcctgcagggccatcgcccggccaatgccgacgaagcgcagtacgcgctggccttcccattggcggcgctggcggtgcgcgggcaggtcgggccgctggaagtgaccggcgaggcggtgcacgcggcagacatcctcgccgtcagcgagcgggtgcagatcgtcgaaagcgacgagctgtcggcgcgcttcccggaggaaatcctctcccgtgtctcggtactgctcaaggacggcagccgcttcaccagccccgtgactcaggccaagggcgacccgcagaccgccatgagtcgcgaagaattccgtgccaagttcgacctgctggccggcatctcactgagtccgtcgctgcgcgacgagatcgacgccgcaatcgccgagctgccagccagcgcgaactgcgggcggctgttcgggctgatcctcaacgcaccccagggtgaatga

SEQ ID NO: 339093 - DNA, 1023 bp, Pseudomonas aeruginosa
atgcaatttcagaacatcaagaacaaagtcctgcgctgcgcttcggtgctttcgctgagcctgctgtcgctctacgtgctggccgcatcaccggagaaaccgggggagggcgtgaaggtcacgccgatcttcccgccgatcgccgaggaacgcttccggggtgaactggccatggccggcctgcgccagctgggctacgacgttcaggagccgaaggagaccgaatacgccgcgatgatggtcgcgctgtcctacggcgacgcggacttcactgtgcatttctgggacaagctgcacgacgccttctaccagaaggtcgatggccccaacacgttggtgaaggccggcgacgtgatccccggcgtgctgcagggttacctgatcgacaagaagactgccgaccagtatcacatcaagtacatcactgacctgaagaaaccggagctggccaagctgtttgacaccgacggcgacggcaaggccaacctgaccggctgcaatccgggctggggctgcgaactggtgatttcccaccacatgaaggcctacgacctggacaagaccgtcaacgtcaaccaaggctcctacttcgccctgatggctgacaccatcacccgctacaagcagggccagccgatcctctacttcacctgggtgccgcagtggatcgccggcgtactggtggaaggccgtgatgtggtctggctggaggtgccgaaaaccgatctgccggacggcaagaacgacgtgaacacgacctacgagggcaagaacctgggcttcgccatcgacaaggtcgaggcgctgctgaacaaggacttcgccgaaaagaacccggcggcgctgaagttcctctcgcagctgcagatcaaggctgacgacgagagccagcagaacttgcggatgcagaagggcgagaacaagccggctgacattcgccgtcatgcagatgagtggatcgccgcccaccgccagcagtgggacgcctggctgcaggcctcgcgcgacgccgccaaacagtga

SEQ ID NO: 339094 - DNA, 948 bp, Pseudomonas aeruginosa
atgtccgagtccagtttcctcgatcccttccagagcgcggtcatcccgctgggcgagtgggtcgaatccagcctgaatttcctggtgcgtcatttccgcgatgtcttccatgccattcgctggcccatcgaccaggtactcaacggttccgaacacgtgttgcagagcgtgccgccgaccatcgccatcattctcgccgcgctgtttggctggcagctcgccggcccgcgcatgggcgttctgtgcgccgtcaccctgaccctgctggggctgatcggcgtgtggtcagagtccatgaccaccctgtcgttggtgctgacctcggtgttcttctgcgcgctgatcggcattccgctgggcatcctctccgcccgcagcgaccgcgttgagcgcgtcctgcgtccgctgctggacgccatgcagaccctgccggcgttcgtctacctggtgccggtagtgatgctgttcggcatcggcaacgtgcccggcgtgctggtcaccatcgtcttcgccgtgccgccgttggtgcgcctgaccagcctgggcatccgccaggtacccgaagacaagatcgaagctgcccgcgccttcggttgcaccccgcggcagatgctgatgcgcgtgcaactgccgctggctacaccgaccatcatggccggggtgaaccagaccctgatgctctcgctgtccatggtcgtgatcgcctcgatgatctccgtcggcggcctcggccagatggtcctgcgcggcatcggccgcctggacatgggcctggccactgtcggtggcgtgggcctggtgctgctggcgatcttcctcgaccgcctgactcaggccatgggcgagcgcacccgttccgatccgagccgccgctggtaccacagcggccccatgggcctggtcctgcgcctgttcagcagcccgccggtgccgcgcaaggcggtctga

SEQ ID NO: 339095 - DNA, 1164 bp, Pseudomonas aeruginosa
atgagccagaccgacgatatcctttcggtgagcaacatcttcaaggtcttcggaccgcgcccgaacgaggtgatggagatgctgcgcaagggcgctgacaaggacgagatcttccgcaagaccgggcatgtcgtcggcgtatttgacgccagtttctcggtcaagcgcggcgagatcttcgtcattatgggcctgtccggctccggtaaatccaccatggtccgcctgttcaaccggctgatcgaacccacctcgggcagcattcacctgaacggccgggaaattacaggtctgtcagacaaggatctgctggacgtgcggcgcaaggaaatgggcatggtcttccagtccttcgccttgatgccgcacatgagcgtgctggagaacgttgccttcggccttgagatcgccggagtcggggagaaggaacgccacgcccgtgccgccgaggcgctcaagcaggtcggcctggcgggacatgagcacagctacccgcaccagctctccggcggcatgcagcagcgcgtaggcttggctcgcgcactggccaacgaccctaccatcctgctgatggacgaagccttctcggcgctcgatccgctgatccgccacgagatgcagggcgaactgatgcgcctgcaggacgagcagcagcgcaccatcatcttcatctcccacgacatcgaggaagccattcgcatcggccaccgcattgccatcatggaaggcggtcgtgtggtgcagattggcactccacaggagctgctcaataaccccgccaccgagtacgtcgagaccttcttccggggcttcgacagctcccgcgtgctcaaggctggcgatgtagcgaagctcgaccagacagtgctctgccgggtcaacggcaagggcccgcagcccatggccggcgtcccctacagctacctgatcaacgagcgtgaccaattcatgggcgtgatgtcggcggacgcgggatcgaacgacctcaccgccgggccctgcacccgccacgaggagcatccggtctacatcgatacgccgctgcacgacgtactgaatatcgtcgccgagctgccgtacccggtgccggtgctggatcgggcgggtgcgctcaagggcaccatctcgaagaaccagctgctgcagaccctgagccggcattaa

SEQ ID NO: 339096 - DNA, 927 bp, Pseudomonas aeruginosa
atgcgcatcgctcgttccttaaccctgacccatcactccaggggctttttgctcgtcctgctggccgccttctgctatggcctgcaaccgctgttcgccagttatgcatactccggcggcgccaatccggtgggcctgctgctggcgcgtttctccatcgccgcagggctgctgatgatgttcctgaaccgtcggcgaattgccttgccttgcgcacgcctggccagacagaacctgatcctcggcgtgggctatggcttggccgcgttgggttactacagcgcctgccggaccacctcggtgagcctggcaatcatcctcgtctacaccttccctgccttcgtcacgctggtgtccataacctggctgggggagcgcaccagcctgctgaagctgctcagcttgctgctggcgctgggcggcgtgaccctggcgaccgggctgagccttacggggatgtcggtgggcgcgctgtgggcgctgttcgcggcgatgacctatggcgcggcgatcatctacggcactcattgcgttagccatgagcacccgctggcctcggcggccatcgtgctgctgggctgcgccgcgaccttcgccattgctgctctgttccaggaggcgcgcttccctgcaactggccaggcctggctggcgacactgggactgtcgttgttcgcaacgctgataccggtggccgcgtttctcgcaggatcccctgccataggcccttcggcggcggccacgctgtctacggtcgagccgctggtggcggtggcgatcgccgtgctgctgatgggcgagcgaatgaccgggctgatgctcggcggcggcctgttggtgttgttggctgccgtctgcctggctcgtccggccaaaccaagcgttcccagaaaccccatgggggaaggtgttggtgccgatcaataa

SEQ ID NO: 339097 - DNA, 1212 bp, Pseudomonas aeruginosa
atggataagaaagccgcagttctcgacctgattcgccaacgcaaggctcgccacgcgctgccccgcgccgtctacagcgaccctgatgtctatcgccaggacctcgaacagctctggcacaaggaatggattttcgccgggcacaccttcgagctggaaaaacctggccagtacttcaccctgcagattggagactatccgatcgccgtggtgcgcggcggcgacggccaggtccgcgccttccacaatgcctgccggcaccgtggctcgaaggtctgcaccgagagcagcggtaaggtcgcgaagctggtttgcccgtaccacaagtgggtgttcgacttggacggcaagctgctcttcgccggtaatatgggccctgaattcaatcccgccgagtacggcctgaagctcgcccattgcgaggtggtgaacacctacatctacatttgcgtggctgagtccgcaccggacttctcgcgcttccgcaatgccgtgtcgcccttcatcgggccgcacaacctggaagattgcaaggtcgccttcgaatccaacctgatcgagcgcggcaactggaagctggtgttcgagaacaaccgcgagtgctaccactgtgacggcacccatccggagttgctcaactccttcgtcgagaacctctccgttgctggcgtcggcggtgatgacgaccctgaactgaccgcccactgggatcgctgcgaggctgccggcctacccagtcgcctggtgatggacgaggacggccagtaccgcatgacgcgcatcccactgtcggccaacgcggtgagctacaccatggacggcaagccggcggtatcgcgccgcctggaccgcagcggcgagccgaacattggcgcgttgctgtacttcaactatccctccacctggaaccatttcctcggggatcatgcactgagcttccgcatcctcccacagggccccaacgagaccctggtgaccaccaagtggctggtacccaaggacgcccaagagggtatcgactacgatctggagcatctgacccgcgtgtggattgctaccaacgaccaggaccgccgcctggtggaaggtgcgcagatgggggtgaactcgccggcctatgaaccgggcccgtattcctccatcgccgagaacggcgtgtgccagttcgtcgactggtactgcgagcgcatgacccgtcgcctcaccgactga

SEQ ID NO: 339098 - DNA, 951 bp, Pseudomonas aeruginosa
atggtcaaacacaccgaaccggatcagacgctgatcaagatgccctcgctgcgcgcagtgaagtccttcgtcgccgccgccaagtaccagaacttcacccgtgcggccgaagcgctgtgcgtcacccaggcggcaatcagccgacagatccgcgaactagaaacctacttgggcgccgacctgttcaagcgcgtgggccgcgccgtggagctgaccccggccggctcaatcttcttcgacgcggtgcagctgtccttcgtcaacatctcccaggccgcggagcgtatccgcaacaacagcgtgtccaagcgcatcgtcaccctgtgctgctcaccagcgttttccgcactatggctgtcacaccggctgccgagcttcttcgacgccaaccccgatgtggaactgaacctgatcaccacgcagaatttcctttccatggagccgggcgtgcgaccggacatcttcgtcaccaagatggctaaggtccgcgagggctaccacagccatccgctgatgcacgacgtcatctacccagtatgcacgccgcactatctccagcagcacccggagatcgatagcctcgacggcctgcgtgagggcacgctgctcaacctcagcccctacgggcgctcgcaggtggccgaacacgtggactggaacgtatggatggccttccacgacatcgacatagatgccggcccaggcaagcgcccacacttcttcaatgccaacgactacaacctgctcgttcagatggtcctgagccatcagggagtagcgctgggttggagccacctggtgagccatctggtggccgacgggtcgctggtgcgcccggtggagcaggaactggtactgcacgacacccaccattacctggccttcaacgaagacaaggaagaggacgacgcctgctgccgcctgcgcaactggcttctcgcgcaactctga

SEQ ID NO: 339099 - DNA, 1026 bp, Pseudomonas aeruginosa
gtggtggaaagaagacagtttagcgactccatgcagggccagaacctgcgcttcgtgggtgaccggaaagccgatccgcagcgccagcggaaagtgggtttcgtactgctggaacacttctccctgcctgccttcacccaggcgctggacacgcttgtcactgcgaacctgatccgcgaaggcaccttctcgacccgcaccttcagcctcgatggtgagtcggtcaccagcgacctcggactggtgatctgcccggccgcggtgctggagagcaagtacttggacatggacctgctggtggtctgcggcggtctgcgtacgccgctcagggatttgcccgcgctcagccgcctgctgcatcaggccgacgagcgcggcatcgccctggccggcttgtggaacggtgcctggttccttggcaaggcagggctgctggatggtcacaagtgtgcggtgcatccggagaaccgcgccaccctggcggaggtcgcccagggcagtgtggtcaccgccgagagttatatcctagaccgcaaccgcctcaccgccggaagccccactggcgccttcaacctggtgctggagtggattcaccaactgcacgggcgcgagttggtggacggtatcgtagacatcctggcgttcgaggaggcgcgctaccggcggacccgtccggcgctgcacgagaagatgacgcaaccgctgcgcgacgtgctgaccctgatgagcgcgaacatcgaggagccgctgagcaccgagcagttgtcgaagtgcgtcggccgctccaagcgccaactcgaacggctattccaggaacaactgggcacctcgccgattcgctattacctggagctgcgcatcaccgagagccgacgcttgttacagcactctgacctttcccaggtcgaggtggccgtggcctgcggcttcgtttcacccagccatttcagtcgctgctacacctcgttctttgggcatgcgccgtccaaggaagtgcgctacggctgcgtgcgttcggccaaatga

SEQ ID NO: 339100 - DNA, 1320 bp, Pseudomonas aeruginosa
atgacgaagattacctatctgcccgccgacgataagagttgcggctggtatcacctgagcccggccagacacgtcaagccgcggcactgcggccacacgtcggcgcgctgggtcgttgtcggcgcgggctttaccggcctcgccgccgcgcggcaactggcactgcactaccccaatgaagagataatcctggtcgaagcgcaggaggttggattcggaacttccggacgcaatgccgggttcgccatcgacctgccccacgatatcggcgccgacgactacatcggtgatatcaacaccgctaggaccagtctcaagctcaacctcatgggccaggacttgctcaaggagcaggtgcgccagcacgacatcgactgccagatgaaggcctgcggcaagtaccaggccgccatcgagaaccgcggtatcgccgtgctcgaagcctaccggcgcggcctcgataagctgggtcaggaataccagatgatcgaggagcaggacctgccctcgcacatcggcacccacttctatcgcaaggcactgttcaccccgggcactgtgctaatccagccggcagcgctggtgaagggcctggccgactcactgccggccaacgtgacgctctacgaaaacaccccgatcaccgaggtcgactacggtgcgcaggtcgtgttgcgccatgaccggggcagcatcagcgcgcagcggctgatcctcaccaacaacgccttcggcatgagcttcggcttcctcaaggggcgcatgctcccggtgttcacctacgccagcctgacacgagcgctgaccgaggaagaacagtcgcgcctgggtggcaaaccctactggggcgtgatcccggcagaccccttcggcaccacggtgcggcgtacgccggacaaccgcctgctgattcgcaacagcttcagcttcaatccggatggacgcagcaatccgcgttacctcgcccgcatcgtcggccgccaccgcgagtccttcgcccggcgcttcccgatgctccccggggtggacttcgagttcacctggggcgggtcgctggcgctgtcgcgcaaccacctgggctacttcggccaactcgcgcccaacgtcttcggcgcgctgtgctgcaacggcctgggcgtcacccgcggcaccgtcaccggcaagctgctggcggactggctggccgggcagaagagcgagctgatcgactacctgctcgcctcccccggccccaacgccaacccgcccgaacccttcctctcggcgggcgtgaatatgaacctgagctggggccagtaccgcgccggccgggaaagctga

SEQ ID NO: 339101 - DNA, 900 bp, Pseudomonas aeruginosa
gtgaaatttgaaggtatctataccccggccatcacccccctgaaggatgacggctcaattgataaccaggccttcgccgacgtactggaaagcctgatcgaagccaaggtccacggcataatcatcggcggctccaccggcgagtactacgcccataccgcccaggagcgcctggacctggccgccaaggccaaggacgtgatcgctggccgcctgccactgatcgtcggcaccggcgccattcgcaccgaggactcggtggcctacgctcgcgccgccaaggagatcaaggccgacgccctgctggtcggctcgccgccctacgccctgccgacccaacaggaaatcgccgagcacgtgatggcggtggacgatgccgccggcctgccggtcatgctctacaactaccccggccgcatgagcgtggaaatgggcgaggaattcttcgccgccgtcgccgcgcgcaagaatatctgcgccatcaaggaaagctccggcgacatgggccagctgcaccgcctggcctgccgtcacccgcacatccagatgtcctgcggctgggacgaccaggccctggagttcttcgcctggggcgcacgcagctgggtctgcgccggctccaacttcatcccccgcgaacacatcgcgctgtacgaggcctgcgtggtccagggcgacttcgccaaaggccgcaggatcatggccgcgatgatgccgctgatggacttcctcgaaagcggcaagttcgtccagtccatcaagtacggctgcgagctgaacggcctgcgcaccggcggcgtgcgcgcgccgctcaagggcatgaccgaggccgagaaggccgcgctgaaggatgtcgtcggcacgctcaagcgcaccgtcgcccagatcacccaggcataa

SEQ ID NO: 339102 - DNA, 1491 bp, Pseudomonas aeruginosa
atggctgacctgctaaccaaggccgaatacgcggccatcgccgccgagctgcagttccctacccgcgccttcatcaacgggtgctaccaggacgccgcttcgggcaagaccttcgccaccaccaatccggccaccggcgcgctgctggcgaacatcgccgcgtgtgatgccgaagacgttgacctggccgtggccagcgcccgcgaagccttcgaccaaggcgtgtggagcaagcgctcgccagccgagcgcaaatccgtgttgctgaatttcgcccggttgctggaagaacacgcccacgaactggccgtaatggaaagcctcgacagcggtaaaccggtgcgcgagtgccagaccatcgacgtgcccgagaccatccatacgctgcgctggcacgccgagctgatcgacaaaatctacgacgccaccgccccggtaggttccaacaccgtgaccatggtggtacgcgagccgatcggcgtggtcggcctggtgctgccatggaacttcccgctgctgatgctggcctggaagatcggcccgtccctggccgccggctgctccatcgtggtcaagccggctaaggaaaccactctcacagccctgcgtgtcgccgaactggcgcaccaggctggcgtaccggctggcgtgttcaatgtcgtgcctggcggcggcaaggacgccggcgaacccatcggccgccacccggacgtggccatggtcagcttcaccggctccaccgagaccggccggctgttcctcaagtacgccgcagagtcgaacctcaagcgcgtcgtactggagtgcggcggcaagaacccggcggtggtgatgaacgatgtcgaggacctcgaccaggtcgcccagcacgtggttaacggtgcattctggaacatgggcgagaactgctcggcctcctcgcgtctgatcgtccacgcggacatccgcgatgccctgctcgaacgcatcggcgtgcacctgcgcgactggcaactgggtgacccaatggacccggaaaaccgcctcggcgccatggtcagcaaggtgcattttgacaaggtgcgctcctacctcgactacgcccaggacgagaagctgtcgttcgtctacggcggcgacaccgaccagggcgtgttcatccgccccacggtggtcaacgacgtttccccgcagagcagactgttccgcgaggaaatcttcggcccagtactggcggtcaccaccttccgcgaaatcgacgaagccatccgcctagccaacgacaccgtttacggcctcgccgcctcggcctacaccggcagcctgcgcaatgcgctacgcctctcacgggaaatccgcgccggtattgtcacggtgaactgcttcggcgaaggcgacgcctcgacgccgttcggcggctacaaggagtccggcttcggcggccgagacaagtccgcctgggcgcacgaccagtacaccgagctcaagaccatctggatcgacgcgtcctga

SEQ ID NO: 339103 - DNA, 780 bp, Pseudomonas aeruginosa
atgagcagtacagccaagcgcacgaaggctaagtccggcctggccatcggtgcgctgagtgccgcactggggcttggtgagctgagccagacagccattgcccaggagaaagcgaacatgagcgaatccgccgctgccagtgtcagcgaagccctcaacgtccgacagcaggccatcgtgccggttgcggcgttcgccgcagccggagatatcgccgggctcagcacggccctcaaccaagggttggatgccgggatgaccatcagcgatgcccgcgaggtactggtgcagctgtatgcctacgcgggtttcccgcgcagcctcaatgcgctggccgagctgatgaagatggtcgatgcgcgcaaggccaagggaattcaggatgcaccgggcagcgagcccagccatccggtgcccaagggcgatgcgctgctggccgccggcaccgagaaccagaccaagctggccggtgcagtggtcgccggcccattgttcgacttcgcaccgatggccaacgagtacctgcgtcgccacctgttcggtgacatcttcgagcgtgacaacctcgactggcagagccgtgagctagccactgtgagcatgcttgcggcgctgcccggtaccgaggcgcagttgcaggcgcacatgcgcatgagcatgaacaccggcgtcagtaccgcacagttgcgccagttgacccaggtgctgggcgagcgcgtcaacgacgaaacctccgaacgtgcacgccaggcgctggagcggcatctggccagtcagtaa

SEQ ID NO: 339104 - DNA, 495 bp, Pseudomonas aeruginosa
atgtacaagcatatcttcaaattagcactctgtgcggtggccctgcgggccggcctggccggtgccggagatgccaccaagggcgggcagcagatcgttcgtgccggcgagcaggcatcgattgccggtcatgagcagttcttctccgggcgggtgcgcatcgacccgatctggcctgccgatgagcacatcaacacctccggtgcgctggtcaccttcgagccgggtgcgcgctccgcctggcacacccacccggccggtcagcgcctggtggttacctccggcgtcggccttacccaggaatggggcaagccgatccgggtgatccggtccggcgacgtggtctggtgcccgccgggcgtcaagcactggcacggcgccgcgccgagcacggcgatgatgcacatagccgtcaccgcaactctggatggcaagaacgtcaactggatggagaaggtgagcgatgagcagtacagccaagcgcacgaaggctaa

SEQ ID NO: 339105 - DNA, 771 bp, Pseudomonas aeruginosa
atgaaccccattcaatatgacttcagcggccaagtggccctggtcaccggtgccgcttccggtatgggcctggccaccgcgcgcgccttcgccgaagctggcgccgccgtggcactggctgacattcgcaaggacgcattgcaggcagtggccgatgaactgagcgcagccggccacaaggtcatggccttcgccggcgacatcgccgacgaaacctacgtcaaggcgctggtggagaagaccgtggccaccttcggccgtctggatgccgcattcaacaacgccggcattcagagcccggcagtggaaaccgccgacgtacccagcaaggtgttcgaccgcatcaccgacatcaacatgcgtggtgtatggctgtgcatgaagtaccaactgatccaaatgcgcgcccagggcagcggcgccattgttaacaactcctcgctgggcggcctggtcggcgtgccaggccgtgttgcttaccacgccgctaagcacgcgctggtcggtatgaccaagagcgcagcgctggagtacgccgaccagggcatccgcattaacgcgatctgtcctggcatcatcgatacgcctatggttgccggcatgctcgaaggcgaagccgaagtgatgaacgaaatgatgaaggacgtgcccatccgtcgtctgggcaaggtgcaggaaatagccgacgcagtgctctggctgtgcagcccgggatcgaccttcgtggtgggcgttgcgctgccgatcgatggcggttacaccgcacgttag

SEQ ID NO: 339106 - DNA, 945 bp, Pseudomonas aeruginosa
atggacaattacattttccagctcagcgaccaggtgacccgtcagccggtcagctaccgcaatcgctttggtatcgaactggccggcgacctctacatgccggctgactttgccagccgcaacaattggccggcgctgatcatcggcgcaccttacggcggagtgaaggaacagggccccggcgtgtacgccaatgaactggcccagcgcggtttcgtcgccctgaccttcgatgcctcgcacaacggtgagtccagcggcttaccgcgccgcctgtcttcaccggagttgttcgtcgaagactttcacgccagtgtcgacttccttggcaatcagtcgggtatcgaccgcaacgccatcggcgtgattggtatctgcggctccggcggcttcggcctcagcgccgcacaggtcgactcgcgcatcaaagcagtggccaccgtgagcctgtacgacatttcgcgcatgcatgccgaaggctttgccggcagtctcgacgaagatgcgcgcaaggccacattgcaggccctggccgagcagcgctggaacgacttcgcatcggggcgcgaggcgctggctccacgcggtgcaccactgcagatcgatgaggacatccatccgatcggccgcgagtttggcgaattctactcgcggccgcgtggctatcaccccaactccagcacccagttcactcagacctcggcgctgccgttcatgaacttcccgctgctggacaagctgcagtggatttcgccgcgaccgattctgttgattatcggcgagtacgcacattcgcgcttctacagcgaagacatctacgtcgccgcccacgagccgaaggaactgcatgtagtacccggctctaaccatgtcgacctgtacgaccgcaccgatgtaatccccttcgacaaactgcagacgttcttccgcgccgcactgcgataa

SEQ ID NO: 339107 - DNA, 444 bp, Pseudomonas aeruginosa
atgagcgacaatgatctggccaatgccgatatgcaagttcaccgcgcaggctcgaccaaggctattgaggggccgcgcgagtggtttaccggtcgcgtgcgcatcgaccgcattttcaacgctccggcaccggcgcgggtcggtgtcgccatcgtcaacttcgagcctggtgcgcgcaccaactggcacacccacccactgggccaggcgctgctggtcaccgacggcgtgggctggacccagtgcgaaggtggaccaaagaccgagatccgtgctggcgatctgatctggtgcaactgcggccgtcgccactggcacggcgccaccgacaccacttccatgcagcacgtggcgatcaacgagtttctcgacggcaagccggtcgactggctggaaccggtgactgacgaggtgtacctcgccggcccggtgaaaagggactga

SEQ ID NO: 339108 - DNA, 894 bp, Pseudomonas aeruginosa
atgttcgtaagcgggatggacgacctggtggtcttcgtaacggtggcgcgagaaggtaacttcacccgtgcggcggctcgcctgaatgtctctccctcagcggtgagccagacaattcgaagcttggaggaacgattgggggtgcgactgctgacacgcaccacccgcagcgtgacccgcacagaggcgggtgaaaaactgctgaatgagatcgcacctctgctggaccagatagacgaccatctcactgccatctctgacttgcgtcagcgcccatctggtaccgtgcgaattaccgccgacgagttcgccgcccgctatgtgctatggccgaagctgctacccatactgaatgcctacccggacgtgacggtggagttgatcaccgactacgggcttaccgatatcgtcgccgaacgcttcgacgcgggtgtgcgcctcggcggcatcatcgatgctgacatggtggccatgcccataggtccggaaatgcgcatggtcaccgtggcctcaccggagtatctggctaagcatggctcgccgtcgagaccggaagatttgactgcccaccgctgtatcaacctgcgcctgccgacgcatggaggcctttatccctgggagttcggcagcggcgagaacgagtttcgtgtccgggtcaatggcccattgatcatgaacagcgtgctgcaaattctcgacgcatgccttactggcgttgggattgcacagttgcccgatgcccaagtgaaacctcacttggaagacggtaccttgcaagagattcttgcggattggtccgaccctttccccggctaccacctctattatccaagccgccggcaacagacggcggcatttcgcgtggtactggatcagttgcgtcttgagatgtga

SEQ ID NO: 339109 - DNA, 177 bp, Pseudomonas aeruginosa
atgctgaagacgctgcacacactcgagcagcgcctggcgatcaaccccagcctgtacttgtccatcgagactgtcagtagccaacgggtggacactggtagcgtctgcggcgcctatgtgctctacctacccgcggggttggacgaacgcgcgctgacgctgttatgcaacgagtaa

SEQ ID NO: 339110 - DNA, 381 bp, Pseudomonas aeruginosa
atgacgcgcgccataaagcttgtggaggaactgctcaacctggtcaatacaggcacagtgcaaaaggatgcccgctccaacgacaccaagccggcttcgccgcgtctatggaccaccggtatcgaacagatgatcaccggccgcgagcgcctgcaactgccgcttgagaaccacaactacctgcgcgcggtggtgtggggcctggccagtgatccagcgcaggctctggccgcttcctcaaagcggccgcaggccggtggacccagcacccagcaattgctccaagaccaagtcggtcgaattcagtccgatatcgtgttggggctgattactaaagaggatggagagcgccagatcgcggcgctgaaggggggagcatga

SEQ ID NO: 339111 - DNA, 321 bp, Pseudomonas aeruginosa
atgaacgaccgcgaactactcgaactggcggcgcgggcggcggggtatgcagttgattgtggattcgcagattgcccgctgatctatggcgaggatgccggtacggacggaccgcgtgagtggaacccacgtaatgacgatggcgacgcgctgaggctggcagtagacgcaggcatcctagacggtaacgccttttccgtctggctgaactaccgaaatggcgcaatggccatcgaggggcttggcgctcgcgaagcaactcggcgagcaatcgtccgcgccgccgccgagatcggcaagtctatgggaggtggggagtga

SEQ ID NO: 339112 - DNA, 213 bp, Pseudomonas aeruginosa; identical to SEQ ID NO: 337056

SEQ ID NO: 339113 - DNA, 333 bp, Pseudomonas aeruginosa
atgagagaagagtttgaagcgtgggtctgggacatttacgaagaaacgctctggtttgacatgaacagagagttcgttctgaagcgcaatggcgacgagtacttcggcaacttcctgaatgatcgatgggaagcctggaaagccagccgcgcggctctgagggtggagttgccgccgacgatcaccgccgaagaggttgttgagcatttcaacatcgacgaggaaggcatcgacatggccgctggtattgcgcacatggtcaacggcgccatctggtcctgcgcagcgttcatcaagcaagccggaatcgaggtgaagcatggaactgcatga

SEQ ID NO: 339114 - DNA, 150 bp, Pseudomonas aeruginosa
gtggacaacgaaaacaaaaccttaatcgcccaggcgctggtcatcgcgctgatcgtcttcggcctcttctggatagtcggtagcctccagaacctctacgagcagacagaacagaaaggacaggaactgagcagatggagcaagcaatga

SEQ ID NO: 339115 - DNA, 228 bp, Pseudomonas aeruginosa
atgagcatcgagaacgcaaagcacctcctgcgttgcagtcatgttcttgggtcgaatcggcgggagtttcacatgcgcgcagaattgctcggaactatgccggatgggcgtttgaagttgcgtgtcttcgggcgtctgttctggaagaacaccgagcacatcagccgaatccgctatgtcgaagcatggcgggtaagtgaagcgcctcagccgaagcagggagagtga

SEQ ID NO: 339116 - DNA, 492 bp, Pseudomonas aeruginosa
atggatcagaagttgcaccagagccagctagcgcctcaggacaacaagttccacaagggcaatatcggcgacggcaagcattactggctcactccgccggcattgttgcaaaagttggatgccgagttccgtttcaatttcgatccatgcccctacccgaagcctgatggtttcgacggccttacgtgcgaatggggggcatccaactacgtgaacccgcccttcggctcaatcattcacgaaggcaaaaagaaggggccgactgcctgggctcggaaagccatcgctgagcatcagaaagggaaaacggtagttcttgtataccccgtcgacaaatggattctcatgctgatggaggctggcgcacaggttcgaaacctgggcgatgttcgctggctggcaaccgaggatggatccgagggaaaagggacagggcgccacatcgcgtgcttcgtgctggacgccgccgcgcccggcaaggaggggttgtga

SEQ ID NO: 339117 - DNA, 336 bp, Pseudomonas aeruginosa
atgagaaccgtactcaaagccacatgcggcaaacattccaaggaaatcccagttgagcagatcaccaacttcgtcgccgaggataagtacgtcatcgcgtactacgcggatgggttcctgctgctgcgcgacacgatcagggaactggaaacagagttctccgacgagttcatccgcacccaccgtaaggccctggtccgacgctcgctgatcagcatgttcaagcgcaggcccgacgacgcccaggccggggaagtgcttctgctcggaacagaggattggattcccgtcagccgcagtcactcggcacagatcatatcggcgatgggtgcatga

SEQ ID NO: 339118 - DNA, 138 bp, Pseudomonas aeruginosa
atgaacaccagacgcacagcaatctggctaggcagccttttcggaggactgctgtacctcttcattctcgcagccggcccgatctggggcggcatcatcaccgcagaagctacgcacctgtccgcagcaggccggtaa

SEQ ID NO: 339119 - DNA, 171 bp, Pseudomonas aeruginosa
atgacgaaggatgaaatgcgtgaaatcttcgagcgagaactaaccatctacaagaagaagcgccataaccatggggaaggtgaatataccgatttcctaactttgtgcgttttcgagggattctgcaaagggattgagattgggatgaagatcaaggagcgcacgccatga

SEQ ID NO: 339120 - DNA, 291 bp, Pseudomonas aeruginosa
atgacaacccctatcgtgcaatcgatcagtgatgaacagttggcggaggttgaggaaatcgcatttcgagacacggccacccgagtgactgttaaagcaagtgaactgcgcggtctgatcgcccgcctgcgcgctgctgaggctgagctttccttatggcgcccaataatggacgaggttgagcgccgcgcagagaaagaatggtgcctgcaagacaagcgcgactttacggtaactattcagtacgacgaatatgtggccatcgactccgccatggagagcacgccatga

SEQ ID NO: 339121 - DNA, 432 bp, Pseudomonas aeruginosa
atgaagaaagaaggggattactggttttattggagcgaaggaaccaacaaatggttccgcgggccttcatgcaatgtatccgcagagcgtgaggcgacattcgaggctagaccgcaagaggcctgggacggccagggcctgccgccggtgggcgtggaatgcgaatacaggcacatgatctggccggagtatcggcgctgtgaaattcggtacatcagcgacgagtcgttagttgcgtacgacaacggccaagaacagtactaccgcacgcacgacatgctgttccgcccgctccgcacccccagcagatcgctcgccgaggagcgggagaaggcgattgaggaaatgtgcttcgcagtagagacgctgacggttaagcaagccaaagcgctatttgacgccggctaccgccgccaggaggaagggaaatga

SEQ ID NO: 339122 - DNA, 195 bp, Pseudomonas aeruginosa
atgaatctcaccgaccctaagcaagatgaccgcattcgagcggcacttcgcaacgcggataagcgcggtcagctccaagtggttgccgcaataaccggtatcgccggcggcgtacaggaactccgcaagatcatgaatagcactggcgagctgagcatcatggacagaggaatgctcgcactgcatctctcctga

SEQ ID NO: 339123 - DNA, 312 bp, Pseudomonas aeruginosa
atgagcaagcacacaccgggaccgtgggagattgcacgaagcccacatggaataacgatcttcgagattggaccgtgtaagcccgatgagtatgcaggtgctgtttggctttcagtctctgaggctgacgcccgcctgatcgccgccgcgcccgagctgcttgaggcgtgccaagccttcaagcgtctgtacgctcgtttgtgggatgtcgtcgagccaagcggatcgggcttcctctcgcctgaatcggttaaggagtacgacgccattcatgaactgatgaatgccgcaatcgccaaggccaccgcctaa

SEQ ID NO: 339124 - DNA, 663 bp, Pseudomonas aeruginosa
atgcccgatctgcgcgcgacgaggcctatgagcggcacggatatcacccgaaccacggggcgaagccacctgccgcataaaccccgatttcactggctggccctcgaccgagggccagacgggaagtcaacacgcgaggtacttatgaagacgtccaagcccatgccttccatcgatcggcttcgtgagcttctggaagtaagtgaggattcagcaagcggccttcgatggctgacaacatcaaagaaggtgagggccggcgccacggctggctctgttcggagtgatggctattggcgggtgttcatcgacggacagcgctacatgacccatcgaatcgtctatgcgatgtcagtcggcgaaataccttacgggatgcaggttgatcatgcagacatgaatccaggcaacaaccggcctgagaatcttcgcctcgtatccgcgtcggaaaaccaatggaacaccggcggaagccgcgtaaaggcttcaggccttccaaaaaacatctcaaggcacgcagcaggctaccaggtgcagatcaagcggtttgggaagtcgtacaacttctggtcaagagatcttgccgagtgtgtttcctggcttgagaaaaaacgggacgaactgcatgggcaattctccagaccttgcaggccaaccatttga

SEQ ID NO: 339125 - DNA, 144 bp, Pseudomonas aeruginosa
atgctgattgatatgcccatcagcagtgatcccggcggccagtcccgcgagtgcatcgacagaccttcggtctatgcgtttctcgtggaaaatccgactctccccaaactcagcatgcaaatcgaccattgcttctctccttga

SEQ ID NO: 339126 - DNA, 636 bp, Pseudomonas aeruginosa
atgtctcttcttaagcgctgcacgggctgtggagagcatttgccgcagtcatgcttttacaagaacagatcaaagagtgatggcctggctacggagtgcaagtcttgtgacaagagtaggcttgcaaatagatataagaataaccgtgaagcagagcaggtgaaaaggaaagaaaactaccaggcaaatatccagagatacaaggaaagagccagggcttgggaaagaaataatcctgatagaaagcgattgctgcgagctaaatatcgggagaggaacagagaaaaaatatcagaatttagcaagagggattgggctctccacaacgagaagaggcttgcgaaaaagaaagagtatcgcgccatgcacccagagaaggtggcagctttagttaggaaaaggcaggccagaaagataaatgctacgccaaagtgggcggacatggaggttgtggaaggattttatgccgaggccagaagaaggacgattgaaacaggaattgcccatcatgttgatcatatttatcctctacagagtcctatagtttgcgggcttcataatgagtttaatctaagggttattccagcaagagaaaatcaatcaaagtctaataaattgatcggcatcgaatcctga

SEQ ID NO: 339127 - DNA, 321 bp, Pseudomonas aeruginosa
atgagcctgatcccgcttgatacggcaaagtcctttcttgatgtgatccacgatttggatgacgccaagctccagttgctgctggatggagcggaggacgaggcctgccagttcatgtggcgccagtcccttgatggcctttgcaactgcgaagagagcagtgaggctgtcagtagcgagccgggccttccgcctagcgtggtcgtcggagtgcttcttttgcttcaggccaactaccaggccgctcccgatgaaatcgcgacgctgcgcaaggcggccgaggtgaagctgatgccgtaccgatgcggcttgggggtttga

SEQ ID NO: 339128 - DNA, 213 bp, Pseudomonas aeruginosa
atgtacagcaactactacgtcaatcgtcaggcgcagtccaatggcgatcacgaggtgcatcgtgatgactgtcgctacctaccttctgtgttgaaccgccatcacttgggggcgtttctcaactgcggaggtgcagtcgctgaggcgcgtcgcttaggcttctatcgcgccaatggatgtcgtttctgctcaatcgcgtgccatacgagctaa

SEQ ID NO: 339129 - DNA, 336 bp, Pseudomonas aeruginosa
atgaagcaagccctcaccagcaccgcggtcagcctgctgatcagcgcgtgcctgtacttcggacatggctccatccaccagttcgccttctatgtgtcggcggcactaaacgtcctctgctggctgctgatattcgccggcggcatcaaggggcaaggagccgcgaacctgctcgcccgtccgtggctctccatccctaccggcgctctgcacgtggcggccctggccctcacggatcaccccgcactcgcggcttcgagcctgctggtgcaaatggcttgctacgccctcgcctaccaggcagtgcgcagcgccgagcaagggggtgacctatga

SEQ ID NO: 339130 - DNA, 405 bp, Pseudomonas aeruginosa
atggctctatcagatgagcgccgcggcatcggcgcaaggaacgaagcgatccgccgcgccggcggccagcgggtcgaagcggagcgacgcggtgaccagggcttgacggcggcgctcaaccggctgatcgagccggagcgtcaggcgcgcgcactgcgcaagatcgatccgcgcggcgctctggatgccgcgcgcggcagggccgactacaaccccgcaggcaagcagatcggcgggggcggtgtgtcctggccgttggccgaaaccgacaagtcgaagcgcacggtggccgatgaagagatcgtgagcaccgatggcctggttgtcgttgtgttcaagcgcgtcaccagcttcgagatgcaggatggcggcgagaatatcggccgcatggagttcaaggcatga

SEQ ID NO: 339131 - DNA, 192 bp, Pseudomonas aeruginosa
atggatgacgccgccgagccctgggcgctggcgatcgaggttgattgcgagccgcttgtgctcagcgagatgcaggaatacgcagtcaccgtgacgccgccggccgatgtgcttgtggttgttgcgggtgaccaagggcctcccgggagggatggcgtagacggtgcccaatggggcgcgactgattggtga

SEQ ID NO: 339132 - DNA, 315 bp, Pseudomonas aeruginosa
atgaacttcttgctggttctttcgccgcagtatggcccggcggaattcggcgactacaccaccgtctcggtttccggcggcgtgctgactgttgaggggcgcgactatgcgttcgccgacctcgccgccggcgccgaactcatgatggaggacttcgccgatccatatcccgtctaccaggttcggcggcgaggcgacacgatttcggtgtggatcatctacagatatccggcaggtgcgacccatgctgccaagtaccctgagccggttactgtccctgctgaattcgacgggcctgttgatctgccgatgtga

SEQ ID NO: 339133 - DNA, 2070 bp, Pseudomonas aeruginosa
atgcctgacagcctagtggtgtttacccccaaggcggagcgagatgctacggaaaacctgagcgagtttatcgcgatgagccggtctcaactgagcatcttcggtgccgatcttcgttttgacgatatggcctgggacgttaccaataccactcagcagaaggcgcttgggagcaagcgggtccgcatctatttctctactcaagaaacggtagacgacaggttgccgactcagatggctgagccgtttgtatcctttgcaaaggcttacattcgctacatgcaggggatgcggccaacgaagaatcctgcttttcgtgtcactgcgttacgtgcccttgatgctgctcatcggcagagcggtcgcttggggccggtgatgatggatggtggcacgttcaatcgagcggcgcgagttgtcgctgagcggcttacaggatctacggcctatcgagtgggtgctcagcttgagctcattgctaagttcatgtccgaacaccgtttgaccgctgttccactcgcgtggcgaagccctattaaacgaccaattgacacgacccgtgttgggccagagtttgacaagcgccgtagcgagaaaatgccgtctcaagctgcattggaagcgcttccaaaggcgtttcacattgcgacccaacccaatgacgttctgttctcgtcgattgccgcgatcctatgctctgcgcctgaccgcattaatgaggtgttactgcttgccgagaactgtgaggttcatgaaaaaacttcaggcggtaaagatgcttatggcctgcgctggcactcagctaagggggctgatccaatggtcaaatggattattccctcgatggctcccgttgtcgctgaggccattgccaaaatcaggaatttgactgcggacgctcgacgtattgcgcagtggtacgagattaatccagaaaggctttatttacctcagaattttgaatatttgaggagtcaggaacttctgacattggatgagattcagcgggcgattttactggaggaaggcgcttcctcatttgcgaggctatggtgctccgcaaataacgtgttgttgaataagagagggaatcgtgtgtacgcgcgattcgccgatgttgaaagagcggcaatagcgcttcttccggccggatttccactgttaaacgcggaggtgaatcttaagttttcggaggcgctcattgtagtgcggcgtaatgagctgcactctgcaaaaggtacatttcgctgtgtcattgagcctgtcaacatcaaccaggtcaatacagcactcggaacgagaagcaagcatggttttgagtcgatatttgatcgccttggcttcaccgagccagacggcagtccaatcggagtttctactcaccagttccgtcactacctgaacaccctggctcagataggggggatgagtcagttggacattgcgaagtggtcgggtcgcctggatgtccgccaaaacgaggcgtatgaccacgtgagcgcagatcaaatggtggcgaagattcgtgaatccattggtgaccagactctgatgtttggccctctggcaaagctgccaaagaagatcccgatttcacgagatgagtttgcacggcttaagattccgacggcccatacgactgatttcggcttctgcgtgcatgactacacgatgacaccatgtgaacggcatgccgactgtgtcaactgcaatgagcatgtatgcgtgaagggtgatgaaggcaaggccatgatggtgaagcaccggctacaggacgcgcaagaattgctggagcgtgctgaagctgcgaccgcgaaaggctactacggagcggatcgatggatggatcaccacaagaaaacggttctacgtctgacacagcttacagagattctcgataacccagcggttccagtcggcgctgtaattcagttggctgatgttcccgatgtctcatggggtgagcacgctttagaggatggggttgcactggacggtcgttcggcgaaaacccacttggaggcttcgaacccccgccacttgaaaggaatagacaatggcaatgactaa

SEQ ID NO: 339134 - DNA, 1563 bp, Pseudomonas aeruginosa
atgactgagaaccgagcgattacctctcaatcgtcgttttgtttgagcctcccaaccactgtgaggacgctcagcggagccgttttcgatccaaatgccaagcgttggacgttccatgatggcctccattcaatcagtgtgaatttcgaaaggttgagtggctgtgcaacagatcagttgatcgcagcagcgaaatttcccttgatttggtatgccgaaaacgcccaggcagtaactattgtcaacctgtttgacaacttgcgacgattactggcatcggtatcggcggcacagggcaagcccgtcggcatcatcgatgcaccagagctcgccagttatcgagcttctctgacatgggaaaccgagtggaagctgggagggttaagtgcctttttcaaaaagtgggagagtttaggtatcccgggcgtaacgaaggctgccgtgcgcttgctaaaaagccatcgcctcaaggggaaccgcaaggggacggcagtcctcacgatggatccgctcacgggaccgctgactgatatcgagcgttcagctacgcaagcagcacttaacgatgcctttgccgccaagaagattgcactggatgactatcttttggcctggctttgtctgctgttgggacagcggaacatccaatacgcaatgctgaaggttggcgatgtcagggaaattacgaaggctgacggggctactgagtatgtactccgtgtgcctagggtcaagcaagggagagcggaggcgcgacgggaacagttcaaggagcggctgatcacccccggtatcgggaaaatgctcatcaactacgcgagcagtctccgcacccgattcagcggggaaggcaaattagccatcccagcatcgcaagtgccgctgtttcctcaaaggaagtcgacgaagaaggttcgtccagactttcatcatcacatgtcaccagagggtatcggtaagagaatcagctcggtatttgaagctttgcaggtgtactccgagcggactggtgaacccatccaggtgacctcgaaacggctccgacatacggtcgctacgtccgcggcaagagaagggcatggtgagctgatcattgctgagttgctcgaccacagcgacacccaaaatgttggaatctatgtaaaggccacgcctgaaatcatcgagcggatcgatcgtgccgtggcgcttggaatggccccgcttgcccacgcctttgccggtgtcgtcattggtaacgagtcagcggcaacccgtggcgatgacccaacaagtcgcattgtcgatccccgcttcgacgaagcgatgaaaccgatgggaagttgtggtcgtgacgggccgtgtagttttatggctcctatcgcttgctacacctgtaaaagcttccaggcctggggcgatggccctcatgaagcggtgctggactacttgctggccgagcgtggacgtctgatcgcagcgacagatatgcgcattgccacagtgaatgaccggacgattctggccgttgccgaggtggttcagctcgctcgagagaggcgcaaggagatgaaggatgcctga

SEQ ID NO: 339135 - DNA, 1287 bp, Pseudomonas aeruginosa
atggccctcaatccctatgcggtgaagacgctcgtgctgagttccggggagcgcttgccggtgctgattgcactggccacgggtgcccccctttttgagccgtctgtttacgtgctcagcgagattcgggctaccaaccgagcgagcaatacaattgaccaggtcctgcggtcgatcatggtgttgcagctattcctcgactcgagcgggatcgatcttgagcagcgaatccgactgggttcagttttttgcctgagtgagctcgatgagcttgtccggcactgcaggcggcctgttgccgatcaattgaagtgcacatcaactctcccttcccggcagtccgtacgtagaggaaccgctgaaagtgtgcgccttgttcaacgagatacggcaccagctgaggtggcaggccataccgcagccaaccgtattcggttcatccgcgactatcttgattggctcgtgagataccacatggctcgttatcactcaggtgcagctgagaaagagcgactttggaacgaatggacgtcttgcaaggatgcgctggaggcgcgactgccgcgtcgcaaagggcggaataccgttggacagcgggaagggcttcagccagaggtggtggagaagcttctcactgtcacgtcgccaacatcgtcggagaacccttggaaagggagaggcacatgcattcgaaatgctctcctggtccgctggttctacgagcttggcctgcgtcgtggcgaagtgttgaacgtaaaaatttccgacattaactttcagtcggaggagctgacggtggtcaggcgagcagacgatcctgaggatccccgtaaggaccagccactggtcaagacgcgcgaccgaaagattccgttatccccagggctgtgcaagctgacgcacgaatacatcacgaagacacgccgagccactgagggcgcaagacgtcacccatttctgttcatcgccatgggcaccggggcacctctgtcgctcagtgccgtaaatgtgatcttcgccgagctgcggaatgcttttaatggcgagttcgatgctgtaactccgcatgtgcttcgccacacttggaatgatcgtttctcggacgtaatggacaagttgaaggtttccgaagccgaagaagagcgcatgcgttcgttcctcatggggtgggcaccgacctcgaagacctctgctagttacacccgtcggcacatccgactgaaagctcagcaagtgtccttggcaatgcaaagcaagcaagcagaaggtgtgctgagtgatgactga

SEQ ID NO: 339136 - DNA, 534 bp, Pseudomonas aeruginosa
atgagcgccatcatcagtgaatgcggccagtaccgttaccttctgactcgccctggcgactgcctggccgacaagggcacagcggtcttcctaatgctcaatccgagcaccgccgatgccgcgctcgacgatccaacgatccggcgctgccgcaacttcgcctcggcctggggctgcaacgggatcgccgtcgtcaatctgtacgccttgcgcgcgacgaaccctgccgacctctggaagcacgacgacccaataggcccagacaacgactggcacctgcgcgcgatcgcccgagagtacaccgacatcgtgtgcgcctggggcgccaatgcgaagcccgagcgagtagaagccgtaaccagcatcctgaccgccgccggcgggcgcctctggtgtcttggcacgacgaaggatggccacccgcgccaccctctgtacgtgcgtggaaatcaggcgctcctgccttgggcgccgagggtaacgccatgtcacggggcgtatctggatacctctagtgatctgcgcccgcgctga

SEQ ID NO: 339137 - DNA, 471 bp, Pseudomonas aeruginosa
atgaacaccgaacagttcatccgtgattcggccgcgcgcgggctttcccgccgcgcaacgatgcacgcgctcggcatgggcccctggaagttccgggaactgctgagcctgatgccggagatcaagtggccagcacgcggatgctcagccgaccaccagcgtgcgaacgagcagaagcgagggcgctgcacgccggcgcaggccgcagcgctggagcgcgcgcacgaacgctggagcgagagccgacgattcaccgtcgacggcgtgaccgggaccatcgccgagctggtggagcacttccaaagcccggtccacgcaacaaccgtccgccgccgcgtcgccgccggcatgagcctgcgcgacgcactcctcaccccgcgccagcagcccaagcccgggcgccggcatccctggaacaggccaacttgcgattttgcgcaagttgccgtgtcgcagcaggtgcagccatga

SEQ ID NO: 339138 - DNA, 447 bp, Pseudomonas aeruginosa
atgagccgcctcgaggtgtgtccgctgaccctggccgaggcgaatgcgttcgtagagcagcaccaccgccaccacggcccggtccagggccataagttcagcctgggcctcgccgccgatggacgcatcgtaggggtcgccatcgttggacgcccggtagcgcgccacctcgacgacgggatgacgctcgaggtgacccgctgttgcaccgacggcgcgcgcaacggttgctcgaagctgtacggcgcggcctggcgtgcaacacgcgccctcggctaccgcaggctccttacctacatcctcgccagcgaggccggcgcaagcctgcgtgccagcggttggcacctggtgggcatccgcggcggaggcagttggaactgcccaagccgccctcgcgtggaaacgcccaaccaaggacagaaactgctctgggagatgtattcatga

SEQ ID NO: 339139 - DNA, 501 bp, Pseudomonas aeruginosa
atgtctaacgttattcccttcaactatcagggtcaggctgttcgattcaattccgatggctggatcaatgccacggatgtggccaagcgtttcggcaaaaaaccggtggaatggctgcgcctgccggatacggtgaaatacacggacgcactggcgcgccatttaaatgtgggggaatcccaccttttagttaagacttcgaaggggcgtgccggtggcacttggctgcatccgaagttggctgtggcattcgctcgctggctcgatgtcgactttgctgtttggtgcgacctacacattgatgctctcttgcggggcgaactgaccgaaaagcgccagttcgaccgtgcgtgccgcgaactgcgtgatgctcgagagttggccagtctcaacggtcgtgagctagcccggtggaagcagaagaagccgggactgattcaccaggtcgagtactggcgtgaccagttgcagatgacgctcggcttggatagcgccgcgtag

SEQ ID NO: 339140 - DNA, 717 bp, Pseudomonas aeruginosa
atgggtcacctacgacatcagtaccaatgcgcgcttcggcctgggcaagcggatcaagccctggatggtggacaagtgggagatgtacaagatcgcccagtattgcgaccagttggtgccagacgggaagggcggccaggagccgcgctttctgtgcgatctgaacctgcagtctcgcgcccaagcctggacactgctgagggacattgcggcgatctaccgggggatgacctattgggcgcagggccagcttgtgtcgcaggccgacatgccgcgcactgccgacttcgactacgtgttcacccgggcgaatgcgatcgatgggaaaatgtcctacggcgctgcctccgcgcgatcgagatacagccgcgctttggtcagctacgacaatccggcgaacaactacgacaccgacgtgacgggctattccgacacgacgttgctacgccgctatggcgacaacccggtggaaatttctgccattggatgcactcgcgagagcgaggcgcagcgccgcgcgaagtgggtggtgctgacaagcgtgcaggatcggacaatctccttcaccactgggacggagggccggatacccctgccgggttacatcatcccggtggccgattcgctgctggctggtcgcgagatcggcgggcggatctccggtgtcgcggggcgagtgctgacgctcgatcgcgtcactcaagccaaggccggtga

SEQ ID NO: 339141 - DNA, 1044 bp, Pseudomonas aeruginosa
atgcctgtcaattcagttggtatcgtcacggcgcgcgacaagctgacgattgattatcgccgcgaggatctatggaagcggatacaggattttgctttaattgacccagaaactgcgcgcaaaaaatacgaccttggcaatgatgcaagtcactggcacgtacaatgggcgcaaagcgatgtaaatagtaatcatgatcaaagcttactgacctccattgcttatcgtccttttgactttcgctggacatactatacagggaccaatcaggggcttatggcgagacccatgtctcgaattatgcgtcatatgcttaaggaaaatattgggattgcgttcactagaaaaatcgaaggagctcggaaatttgctgacgctctagtttttgatcgtccgatcacgcaccattctttaagtattaaagaagtaaatattttctgcccgttatatctttattcggaggatggcgacctacataaaactggtcgaagcgtgaactttgagccccagatctacgcccggttacaaaagctcgcaacttcctcaaaatacggtactcctgatgaattagccgtcttcgactatatctacggcatactatattgcccgaattatcgtgacgcttatgctagcttcctgaaatcggattttccacgcatcccttggccggccaatcccgaggaattttggtatgtatcttccaaaggtacagttctacgaagactgcacctgatggaaccagcaactgtgggagctacggagtatcctttcaaaggggagggtgaaaacgtggtggatagcattaataaaaaatcctaccgagacaacaaagtatggataaataacacgcaatatttttccggcatcacggcagctgcctgggacttctttatcggtggctttcaacctgcacaaaaatggctcaaagatcgcatggggcatgtcctgacatttgatgatgttcgacattatcagcgcataattaaagtgttggtcgagactgatcgcatcatgaatgaaatagatctcaaatttaaaaaatag

SEQ ID NO: 339142 - DNA, 129 bp, Pseudomonas aeruginosa
atgagcatcaaaccaggccctaagcgaaccaacgaagacggcactccggacaaaaggcagcgagtcacgcctgaaaagcaaaaggagcatcccgacctcaaaccccataagcataaaaaaggggaatag

SEQ ID NO: 339143 - DNA, 1185 bp, Pseudomonas aeruginosa
atgaaaactactgtcgcgatcatcggcgcgggcccctcggggcttttgctgggtcaactacttcataaagctggcatcgacaacgtcattatcgaaagacaaagccctgactatgtattgggccgaattcgtgccggggttcttgagcaaggaatggtggaccttctccgcgaagctggcgtggcagagcgaatggagcgtgagggccttgttcatgacggcttcgagttggcattcaacaacaagcgcgtccatgtcgacctgaaagcgttaaccggcggtaagaccgtcacgatctacggccaaacagaagtaacaagagacctcatggcggctcggctcaagagcggtgccaccacgctttactccgtgccggacgttgagcttcacgaactgaaatccgactcaccctatgtgacgtttacctataacggtgagaacgtacgccttgactgcgcgtacgtggctggatgtgacggttatcacggcatctcccgtaaatccattccagagggtgtgctcaaagaattcgaacgtgtctatccgttcggttggctaggcgtgttggcagatacgcctccagtgaacgatgagctgatttacgccaagcatgaacgtggatttgccttgtgcagcatgcgatcacccactcgcacacgctactacgttcaagttggttcggaagagaaagtcgaaaactggtccgatgagcgcttctgggatgagctaaagagccggcttcccagcgaaacggctgccaaactgatcacaggtccctccatcgaaaagagcatcgcgcccctgcgtagctttgtcgttgagccaatgcagtacgggaacctcttcttggtcggtgacgcggcgcacattgttccacccaccggggcgaaaggactcaacttggcggccagcgatgtgagcactctgtactcaatcctcgtgaaggccgttatggagggacgcaaggatttgatagagcgttactccgaggtgtgcctcaagcgtatctggaaagcggagcgcttctcctggtggctgacgtcgatgctgcataaatttccgggcactgacgagttcacgcagcgaatggttcagaccgaactggactactttgtcgagtccgaggcagggctgaagacgatcgctgaaaactacgtagggcttccctacgaagttattaattaa

SEQ ID NO: 339144 - DNA, 570 bp, Pseudomonas aeruginosa
atggacgcagtacagaggaagatgaaggccatcaagcgtggcaaccctctggacactgaaaccatggtaggtgctcaggcgtcgcaacagcagtttgaaaaaatcctgagctacctggacattgctcaagaggaaggggccgaactactcgcaggtggcgcctccgaagccttggatggtgatctctccagcgggtactacatacagcctacgctgctcaagggtcacaataaaatgcgagtcttccaggaggagatcttcggacctgtagttggggtgaccaccttcaaagatgaagctgaagcgttggccatcgcgaatgacaccgaatttggcctcggcgccggcctgtggacgcgcgacatcaaccgtgcgtacagaatgggtcgtgctatcaaggctggccgagtatggaccaattgctaccacctctatcccgcacacgcggcattcggcggctacaaaaagtctggtgtaggtcgtgaaacccacaaaatgatgctcgaccattatcagcagaccaaaaacttgctgatcagctacgacatcaaccctttgggcttcttctaa

SEQ ID NO: 339145 - DNA, 231 bp, Pseudomonas aeruginosa
atgaaaatggtaggccgcagtgtgttcattgatctcagctgctccgccctcctgggcacggatgcagcctgcaaagtatcggaagtgatctgcagccagtgggacatcagcattaagggtttcacgtaccgccttaccgttgtcccacgtttcactcactgcgagaatctcaagattggcctcgatccgatccgcgattttcaacaggattcgcgcacgatcctgaactga

SEQ ID NO: 339146 - DNA, 1473 bp, Pseudomonas aeruginosa
atgagcaagccagagcattacagccagttgcaccttcaaccgatcggtggtgtcagccgcgccggtagttcggatcgtgcgctgaccgtactgaacccgttcaccgagtcccccctcattgagatcccgatggccaccaaggctgatctggatgaggcctacctggttgctgaaatagctcagctggcctgggcatcgttggggccttctgcacgctccgccgttctgctgcgcgcagcacaaattctcgacgagcgccacgacgaggtggtcagctggctggtgaaagaatcaggcagtaccgtggtcaaggcggagtttgaatggatggcggcgaaagccatcacccttgaggctgcatcattccccaaccgcgttcacgggcgcattgtagagacggacatacctgacaaggaaagccgtatctaccgcagaccgcttggagtggtgggcgtcatcagcccttggaacttccctctgcatttgacccaacgctctgtagcgcccgcattggcactcggcaacgctgtggttattaaaccagcaagcgacactcccgtaacaggcggtctgctactggcccgcatctttgaagaagctggacttccacctggcgttctgagtgtcgtggtcggcgctggagctgaaatcggtgatccgtttgtccagcacaaagtcccgggtttgatctccttcacagggtctacaccggtaggccagaacatcgctaaacaggtgggcagtggaaaatacctcaagcacgtcgcccttgagcttggtggtaacaaccccttcgttgtgttggctgatgccgatcttgaacaagcctcacatgcagctgttgtaggcaagttccttcaccagggtcaaatctgcatggcggtaaaccgcttcatcgtcgaggacgctgtgtacgaccgcttcgtcgagctgttcattcagcgtgtgcgtggtttggcactgggtgatcctgctgatccgaagaccgctgtaggaccggtgatcaaccgcaaacagtttggaggcctgcaaaagaaagtggagcaggcaaaagccgagggtgcgcacctggcttatgccggtgaatcttctggtttggtattcgctccgcacgtgttcactgaagtgcagccctcgatggaattggcatacgacgaaatcttcgggccgattgcagggatcatgcgtgcccgcgacgctgaacatgccctcgctctcgccaacgacacctgctacggactatcggccgccgtgttctgccaagacctggagcgtggcgcgcaattcgctcgccgtattcactctggaatggctcatgtgaacgatatcccagtcgccgacgctccaaatattccgttcggcggggaaaagaattcagggctcggccgcttcaacggtgactgggcgattgaagaatttaccaccacccagtgggtatcgattcaggtgaagccacgcccttacccgttctga

SEQ ID NO: 339147 - DNA, 1035 bp, Pseudomonas aeruginosa
atgcaaggcaccaacgcagcggttagcgacaaccgcggatacaaatggatagccagggaaatagagcggctggaccctgaaaaggactttgccgaaatctggcggctgtccacaacgtactatgtgaacgactttgtgatgaacctggtttacacgctgggcatccctgcttttacccaaccgccggcgggcagcgtcgtgatgggagtaacgacagaaaaagccatcaaaaaaccgcagaagcgtaccgacgacaccttgcagcatttttggacctggttcgaatacgggccggatgatccgaggatgcaagcttcattggcgcatgtgaatcgcgggcatgcagcacttgccaagcgttcccctggtacattcccggctcgcgatgtgatctataccacagcctggatcggggccaacctgcaccgcttgcgcctgagcgtcggtcttccgggttttaccaaaaatcagcaaatcgcttcgcagcgctactgggccgctatctgccggcaattctggagtgaagacggtttagtcactgagtatccggaaagcttcgaggccatgctgcagtacatcgaggattacgaagcccagccatgggaacaggttgaatccgggcgagtgctgaccgaggccatcatcaagcaattcgtggatgcctacttcccaggcccattagggtggattggccgtcaactctatctctcgttccagcttcccaccatcaacggcttgatgcagtccgggaaacctaacccgatcatgaagtgggtgatgcgaaagggcctgtggttcggcttaacgcttcaggagcgtgtcttccccgacccgaaattatcaactccagaaaaggcgcgcaggaaaccggtacgcccaggccaacacattgatccgcctacagccgaggtgaaatgtcctttccctggagcgactagccaaccctccataccgtccgccgattcatctggttgccctttccacgctggcaaagcgaacggggaagccaacaattccgacttgaggactaactga

SEQ ID NO: 339148 - DNA, 675 bp, Pseudomonas aeruginosa
atgagtaatctgtcccgttacagcctgtcgtttaagagaacggccgcgacactctgcgcttcggtgttaactgcctacggttcaatggcacacgctgcagatgaatctaactggtggctgcgaatcggccctggctacattcagttcgacgaggacgtcacattgaaggcattcggcaacaccattccaggtgccggtgccgacatgaagaataacgctgcactcatcggtgagttgggctaccgcttcgcgccgaactggtctgtcgcgttgacgttgggcaaccctccgaagactaagctgactggtaagggcacagctgacggactagggacgttgggtaaagcgaaatacgggcccgccggtatttcgttgcagtaccagttcaacgagaaaggcgccttccgcccgtatctgggcgctggcctgagctacctgaaaatattcagctctgaggacggtgctgtccaggatctggaaatcgacgatacctggggtccgtacttccaagccggtgccgaatactggtttggcgagggctacggcgtcttcctggacgtgaagaagctgtatttggagaccgatgcgaagggcaacctcggtggcgcgcccgcaaaggctgaagtcactctcgacccgctggtcttccagacgggcttggtcttcaaattctaa

SEQ ID NO: 339149 - DNA, 1074 bp, Pseudomonas aeruginosa
atgagcacttctgctgctgaacaactcgcctatgaggttgcgccaacgcctaaagccacagcctttccactaaaccagtggtatgtcgctgcgctgagctgggagctcaaggacaaacctgtagggcgtacattgctcaacaagcctgttgtcctgttccgcatgggcgatggccaagtcgctgccttggaagaccgctgctgtcatcgagcgctgcctctgtctaacgggacgttggaagaagccggggttcgctgtgggtatcacggtttgctgttcaaccaagccggcaaatgcgttgagatccctggccaggacaagatcccaagtaaggcaaaagtacccgcttaccatgtgcgtgagcgtgatcagatcgtgtggatctggtttggagctgacgcagcatccgagcctgattgcgagccaccagcatacgaggtccacagtagcggaaagtatgtttttgatggttccgtctaccactacgacgcgccgtatcagctcattcacgacaacctgatggacctgagccatctgggttatgtgcacttgaaaactattggcgggaatgcgcggattcacatgaacgccgagatgaaggttgaaagtgaaggtgacatggtccgggttgtacgctacatgcctgactcagtcccaccgcccacttacactgccgctttccctttcaagggcaatgtcgatcgttggcaggaaattgaatttcatgtatcgcatctccgaatctggaccggcgcggtcgatgtcggaactgactcgatggatgatccggagcgtggcgggttccatatgcgtggcttccacggagtaacgccagagacggataccacaagccattatttctggacgatggcaactaacccagtgagtgatcctgagctcatcaaggccaaagtgattgaacaaacagtcctgaccttcgatgaagacaaagaagtcattgaagcgcagtaccagaacatgcgtcgcttcggtgaaaaacccatgatcgatattcatgttgatgttggagcgaaccgcgctcgacgaatcatcgaccagctcaagctccaatag

SEQ ID NO: 339150 - DNA, 954 bp, Pseudomonas aeruginosa
atgttgaaagttcaggttttccgaaagaaagttgaagcgaccgatattctcagctttgaattacgggcggtcggcactgaagagcttcctgcgtttagcgcaggtgctcatatcgatgtccatatgccaaatggcattgttcgccaatactcactgtgcaactccccagctgagcgtcaccgctacgtcatcggtgttttgaaagatccagcttcacgcggcgggtcgatttcgatgcatagcgaaatcgatgtaggtgggcttatttcaattagtgaaccgcgaaatcttttcccgcttgatgatggcggcgacaagcatttgctatttgctggtggtattggcatcacgccgatcctggcaatggcacatgcgctgcatgagcggggagctaatttcgagcttcactactgctacaggacctccgatcgggcggcgttcgtcgattatctcaaagcctctgacttcaaggatcgtgtctatctgcacgacgacagtggtgccgaggaacagcggatcagcgcccatgatttgcttgggcttccgcaacccggctcgcacctctatgtgtgcggtcccggtggttttatgaattacatcttggaaaccgctgcggaacaccgctggccggagtctcaggttcacagggagttcttcgccgccgccccagtgagccacgagggcgaccaaccattcgaagttgaacttgcgaaatcagggcaagtgatccaaatccctgctgaccgcaccgtgttcgaggtgcttgacgactgtggcatcgaaatccccagttcttgtgaacaaggtgtctgtggctcttgtatcacacgagttctgaagggtacccccgatcatcgtgatcagttcatgaccgcagctgagcatgccgctaacgaccaatttacaccttgctgctcccgctcgaaatcgccacgcctggttctcgatttgtga

SEQ ID NO: 339151 - DNA, 1278 bp, Pseudomonas aeruginosa
atgtccgaccaaatcaaatgcccatggctctttagcttgggcatcgcgggagctattgcctcgaatccggcaatggccgatttaactgacggagcaagtgtgacagtgactgctcggaatttttaccttgaccgtgattacaagggtgaatctcctcaatcagctgctcgcgagtgggcccaaggcttcatccttcgagcaaactcaggtttcacggagggtccagtcggatttggcctggatctgactggcatgatcggcgtaaagcttgactcatcgccggacagaacaggcacgcagttgctcgcctacgacccacaagatcgcgaagcgcgagacgaatattcagagatgggcgtggctttgaaggcgaaagtctcggagacaaaactggctgtgggcacgcattttccgagccttccggtcatcaccgcgagcccagctcgacttctcccacagtcgttcttgggggcataccttacttcccaggacatcagtcaactgagtctgcacgctggccgtatgactcgaatcaacctgcgcgactcgacagacaatcaacccatcgcaattgcatcacccaacggtcgattccgcccaggagctagctctgagcgattcgatttcatcggtggggactacaaatggtcggatgctctgaccctgcgctactaccatgctcgacttgaggacatttacgagcaggattttgccggcgcaattcattacctgccgctaggtccaggcaagctgaaaagcgatttccgggtattcgatagccgtgacaatggcagggctgaagcgggcaatgtcgataacctcaacgcaggcctcatgcttacctaccaagtgggagggcactcgctaggcatgggctatatgtaccaaaccggggacaccgccatggcgtacatagcgggtggcgaacctgctgttctcagcgatggtgcgatgagctcagatttcgtcaacccgaaagagcgcacggcggttgctcgctatgacttcaactttgtggcgttgggcattcctggactgactgccatggcgcgctacatgcgcggtacgaatatagatctcccaaagctcgggggcagcaatctcacggaatccagcaaggaccttgagcttgcatacgttgtgcagtcgggcccagcagcgggcttggcgattcgattacggcatgctttctaccgaaacgatcacgaaccaaccgccacgttccgcagtgacaacgagacccgaatcaacctcgactacaccctgaaggtctggtga

SEQ ID NO: 339152 - DNA, 1332 bp, Pseudomonas aeruginosa
atggataattccatcgggaagttgatggatgagaaacccatggtcagttttcagtggggcgtgatctcgctctgctttctcatcaacatgttggacgggttcgacgttctggtaatggcgttcactgcagcgtccgtttcggcagattgggggctaacggggacccagctgggttacctcttgagcgccggcctggtcggtatggcggtcggttcccttttcattgcgccgtgggcagaccggtatggtcgacgcccgctgatcctcgtttgtgtggcgattgccggtttcggaatgttgctgtcttcgtgggcaacttcacctgaaatgctgggtgcacttcggttggttactggcctgggaattggggggatcctcgccagcagctatgtgatcgcaggcgagtacgcgaacaagaaatggcgcagcatggctatcagcttgcagaccactgcttacgctttgggggcaaccgtcggtggcatattcgcggcgcaaatcatcccagagacaggatggcgatcagtattcttctacggcggaattgcaactctcgtgaccctgcccgtgcttgctttgtggctgccggagtcgttggcatttctgatttcgaggcagcctagaaaggcgcttgatcatatcaacaccttgcttgatcgaattcatatttccccgcttcacgaactcccagctttccagcggtcccacaatccatcgatgaaacgctctttcattgagctcttctccccaagcctactgcgctccaccttgctagtgtgggcagccttcttcttagtgatgttcgggttttactttgtgatgagctggaccccccgcttgctggtagctgctggattgtccaatcaacaaggaataacaggtggcgttctgctgaacgtcggcgggatcattggaacctcgctggtcggcctgctcgctgcccgcattcggttgtcacgggtgttgatgggctatctgataatcaacgcgctactgatggctgtgttcgtaaggtcaacggcaaacctacatgttgcctttgctgtagtggttgcgattggcgtgttcgtcaacggctgcgtcgcgggtctctactcactgactccctctatctacgatccctctcagagagtgacagggttggggtgggggatagggatcggacgtagtggcgcaatcctgtctccactggtggccgggcggttaatagatgcacagtggcaaccctccgaactgtacatgttcttcgccttgtcattcgtcctggctgccatcgtcattggattaatgaaaacccagcggcgctcccaagctgctctttcaagtacctaa

SEQ ID NO: 339153 - DNA, 1197 bp, Pseudomonas aeruginosa
atgtccggaaacagaggtgttgtgtacttgggagcaggaaaggtcgaggttcaaaaaatcgactatcccaaaatgcaggacccacgcggcaagaagatcgagcacggcgtgattctcaaggtggtctccaccaacatctgtggctctgaccagcacatggtcaggggccgcaccactgcccaggtcggcctggtcctgggccacgaaattaccggtgagatcgtcgagaaagggagcgacgtcgagcgcatgcagatcggcgacctggtgtcggtaccgttcaacgtcgcctgcggccgctgccgctcctgcaaagagatgcatacaggtgtgtgccttaccgtcaacccggctcgcgctggtggtgcctacggctacgtcgacatgggcgactggaccggtggccaggccgagtacgtgctggtgccatacgccgacttcaacctgctgaaactgcccgaacgcgacaaggccatggaaaagatccgtgacctgacctgcctgtccgacattctgcctaccggctaccacggcgctgtgactgctggcgtaggcccaggcagcaccgtctacgtcgcgggcgccggcccggtcggccttgctgccgctgcctcggcccgcctgctgggggctgcctgcgtgatcgtcggcgaccttaacccggcccgcttggcccatgccaaagcccagggcttcgaggtggtcgacctgtccaaggacaccccgctgcacgagcagatcgtcgatattcttggggagccggaagtggactgcgcggtcgacgccgttggctttgaggctcgtggacatggccacgaaggtgccaagcacgaagcgccggctactgtgctgaactcgctgatgcaggtgactcgcgttgccggcaacatcggtatcccagggttgtacgtgactgaagacccaggcgcggtcgatgctgccgccaagatcggtgcactgagcatccgcttcggtttgggctgggcgaagtcgcacagcttccacactggccagactccaaccatgaagtacaaccgccagttgatgcaggccatcatgtgggatcgcatcaacatcgccgacgtggtcggtgttcaggtaattagcctggaccaggcgcctgaaggctacggcgagttcgatgcaggagtacccaagaagtttgtaatcgatccgcacaagacgtttagcgcctga

SEQ ID NO: 339154 - DNA, 468 bp, Pseudomonas aeruginosa
atgcctgaatcgacgcatctcaatttgtcgcgttacgtccctggcctgctgactttcctggccaataagctggcgacgggtgcatcccactgttatcgcaagcattttgggattggcgtggtggagtggcgcatgctttccatgcttgcggttgaaaatcacatcacagctaatcgcatcagccaagttatcgggctggataagagcgcggttagccggtcgttacagtcgctagaaaaagcaggttacgtctgctctgaggtcgacactgaagatgcacggcgatacaccgtgagtcttacggaaagtggccaggaactccacaatcgcgttctagtcgtcgcgcttgagcgtgagagaaggttgctaagtgacctctcggcggatgaggtggatgtgctggtaaatctgcttggtcgtttgcacgctaaggttagctacgtcaatgaatttgacccggaatgctga

SEQ ID NO: 339155 - DNA, 990 bp, Pseudomonas aeruginosa
atgacgcccttcgcctatgccaagccggccgacatcgagcaggcgctgggcctcgccggcccggagtcgcgctacatcgccggcggcaccaacctgctcgacctgatgaaggaaaacgttgccaggccccggcgactcatcgacatcaccggcctcccgctgcgcgacatccgccggacgcccaccggcggcctgctggtcggagccctggtcagcaacgccgaactggcctggaatcccgccgtggaggcggactatcccttgctagcccaggcgatcctcgccggcgcctcgccgcagttgcgcaacatggccagcaccggcggcaacctgttgcagcgtacccgctgccagtatttctacgacaccggcacgccatgcaacaagcgcgagccgggcagcggatgccccgcgcgcagcgggctgaaccgcaaccatgcgatcctcggcgccagcgaacactgcgtggcggtacatccatccgacctgtgcgtggcgctggcggcgctgggggctcaggtactggtgcgcggccgcgctggcgagcggcgggtcgctttcgccgacttccatcgcctgccggcggacacgcccgagcgcgacaactgcctggccgtcgacgaactggtcaccgccatcgagctgccagcgccgcgcttcgcgcggcattgccactacctgaaggtgcgcgaccgggcctcctacgccttcgccctggtctcggtggcggcggccctggaaccggacggcgagcgcattggcgaactgcgcctggcgctcggcggcgtggcccacaagccatggcgcgtcgcagagctggaggaacgtttcaggggccacccggcgaaccgggacagctatgtccgcttcgccgaagcgctgctgcgtgacgccaggccgctggcccacaacgccttcaagatcggattggcgcgcaacgccatcgttcgcgcactggaagaagcccactcgggagggatcggccaatga

SEQ ID NO: 339156 - DNA, 627 bp, Pseudomonas aeruginosa
gtgaacgagtcgctggaggtctccccgtcgcggcacctcgacttcggccagctgtacctggcggcgcggatcaacatctccgagtggcgtaacaacaagcagtcgatgcagtacatctcgttcatcaagggcaagggcgggaagaaggtcaccgactacttccgcgatttcatcggctgccaggagggcatcgactcaccgggcgaaacccgcgccctgctcaaggccttcagcgacttcgtggagagcgagggcatggccgagcagcaggcccgcgagaaaaccgagacgctggtcgactacgccacctcgcaggcgcgcatcggcgagccgatgaccctcgacgcgctctcggaactgatggacgagcaacaaccgcgggcgttctacgactacatccgtaacaaggactacggcctgtcgccggaaatcccggcggacaagcgcaccctcaaccagttccgccgcttcaccggccgcgccgaaggcctgtcgatcagcttcgaggcgcacctgctgggctccagtatcgagtacgacgaggagcgcgacacgctgcagatcagcagccttcccactcaactccgcgaccagctcaagcggcgcaaggcccaaattggagaatga

SEQ ID NO: 339157 - DNA, 585 bp, Pseudomonas aeruginosa
atgccgcccatcttcctaccccagcgcttggcatgcagcgcgctgcttgccgctgcggtactcgcgggcggttgcagcacgaccccgccgcaagttcccaagacttctgaccgctcggcgaccgaatcagccgagcagccctccgagtacattcctgtggtccgacagggacgctacaccctggtggagctcgcaccggcggcggcacagcgcgatttgctgctgcaactggtggatgtctccctgccagccgacgcacacgccagtgtgagggatggcttgctccacgttctcaagcgcagtggctatcggttgtgcgatgccgattccgcgtccggtgatctctattccctgcctttgcccctggctcatcagcgcctgggacccatgaccttgcgtgacgccctgctgaccctcgctggccctgcctgggcactgcacgccgatgaccagacgcggcagatctgcttcattcgggccgacgatgcgtccgcaaccgcacatgcggccgatgcggccggcaacagcaacgctgcctccgcaactgctcagacatttcccgtgaaggaaggagcacggccatga

SEQ ID NO: 339158 - DNA, 906 bp, Pseudomonas aeruginosa
atgacctggttagttatggcacttatggctccactgctgtggagcctttcaaatatcctggacaagctggcagtgatccatcatgcgaatcactggactacatttatatttctcctgagcattggaaatcttctttattctgcgctgatttttcttctctttacaccatctgactttgacacaacctcagcgcttctgaacctgctgtcaggattatgcatttttggaatgtatttcctatacgcaatgccgctgaagtcggtcgatatctctactgcgattgcgcttcatcagttaactcctttgctggtgcttgtcgtatcgatcctcttgcttggctattcgccaacagggattgagctgctcggcattgccttggtttttgtcggggtttactttgctgtggcaatcggcaaagggagaccaggctcgataagtttatcagcagtattgcttctaataggttcagcagtttttggggcggtggctacgctactatacgatcacctgctcctgagtcacagcctgccctcggttcttatgtttaactatgcaggctacggtcttggcgggactctgatgctgctggttccgaaatggcgccattccatcgcaaaggatgtctccgaaatgccaccaaagggctgggcggtgtatgcgctgagcaatctcttcgacgccggtggatacgcgctttttattggcgcattatctgctggtggaaacgttgcggtggtctcggttttggtcagtcttcacccggtatatgtgctagccttaagtcattggctagcaatagttgacccaaagatactcagcgaaaactttagctcgtcggacgcatataagcgcatgagcgccatagtcgtaatcgttgccggcgtaataatgatgaccaagatctga

SEQ ID NO: 339159 - DNA, 3015 bp, Pseudomonas aeruginosa
atggcatccctcgaacgtaccgcctaccctgttttgtcgcgctcctattcgagggccgagcttcagcgtgaattcagcttctccgaggaagaagtcacgtgggtcaaaagtcgctctaatgcagcattccgactgaatctcgctgttctgttcaagacttttcaggtactccgatactttccagaaatcgctgaagtgccggagccagttgtcgatttcatccgcacacaaataggtctacgcagcaaggttgcgctatcaccctacaagtggatgcagctttaccgccatatgagtgccgttcgggaaaaacttggggttcgaccgttctacggctcggatggtcaagacatagcatccacgcatgcacagttgatggctcccctcctcgaacagcgcgctgacattattaatgcgatcattgacgagttgctgcgccaaaactacgagctgcccgcctattcgaccttgaatgacctagcagaagccgctcgtgcagaagcacaagagaaaatcttcaaccttgtggtagccagagctccaatcaaggtgatctataagctaagggatcttctcgacacggacttcgggcgtcggcagagtgacttcaacacactcaaacaggcacccaagaaaccctcgcgcaagcatctggaggtactgatcgaccacctagcctggctagagagtttcgggaaactggatgccatttttgatgggatcgtcgatacgaaaattcgccactttgctgcccaagctgcggcgtcggatgtatctgaactgaaggactgctcgctgccgaagcgttacacgctgatgcttgctttgatctaccgtatgcgggtgcgaacccgagatcacctggccgagatgttcatccgaagaatctccacgatccacaaacgcgccaaggaggagctggagcaaatccaggcacgtcaacgtcagaagttggaacaactggcggccaccctggacggcgtggtgcagattctggttcaagagccggatgaccaggaggctggtagcctgattcgagaatacctctcccccgatggcaacatggatcggttgcgagaggtttgtgctgaagttcaggccacaggaggtaataactacttgccgctgatctggaggcacttcaagtcccatcgttcactgctgtttcgcctcagccaccttctccagttggagcccaccacccaggatcgctcacttatccaggcgcttcagctcattcaggacagtgagaatctgcaccgtgaatggatcgatgagcatgtcgacttgtcgtttgcatcagatcgctgggtgaagatcgtgcgtcgccctaccagtgaagggccgcctaccaaccgacgttatctggaggtctgcgtgttctcctacctggccagtgaactgcgctcgggtgatctgtgcgtgcagggatcggaatccttcgccgactaccgtaaacagttgctgccttgggaagagtgtctccagcggctaccggcatactgcgagaaggtgggccttcctaccacagcgaaggagtttgtcgcctcgctcaagagccagttggaggaaaccgcgcaacagttagatgacaagttcccttcctgtcgaggggatgtgtcgatcaacgatgcaggcgagccggtactgcggcgggtgatggcacgggacatcccgccttcagccatctcgctacagacggcgcttatgcagcgtatgccagccaggcacgtgctggacattatggccaacattgagcactggattcagttcacgcggcatttcggaccgatgtccggcaacgagccaaagctcaaagagccggccgagcgctacctgatgacgatcttcgccatgggctgcaatctcggtcccagccaggccgcgcggcatctggccggtaatgtcacaccgcatatgctgtcctataccaatcgccgccacctctcgctggagaaactggacaaggctaatcgcgagttggtggagctctatctgcaacttgacctgcccaagctttggggcgatggcaaagcagtggccgcagacggtacccagttcgacttctatgacgacaacctactggccggctaccacttccgctatcgcaagatgggggccgtggcgtaccgacacgtggccaacaactacattgcagtgttccagcacttcatcccgccaggcatctgggaggcgatctatgtgatagagggactgctcaaagtcagccttagcgtcgagcccgatacggtctactccgacacccagggccagtcggccacagtattcgccttcactcatctcctgggtatcaatctgatgccgcgtatccgcaactggcgcgacctagtgatgtgccgaccggatcgaggcgtatcgtacaagcacataaaccgactgttcaccgacactgccgactggcacctgatcgaaactcactggcaggatctgatgcagattgcgctgtcgatccaggccggcaagatttcctcgcccatgctgctacgtaaacttggctcttacagccggcgcaacaagctctacctcgcagcacagacgctgggcagtgttatccgcacgattttcctgctcaattggattggcagccgagagctgcgccaggaagtcactgcgaacaccaacaagatcgagtcctacaacggcttctccaagtggctctcttttggcggcgatgtaattgccgaaaacgatccggacgagcagcagaaacgtctgcgttacaacgacatggtggcttcgtcggtgattctgcagaacaccgtggacatgatgcgcatcttgcaaaaactagcccgcgaagggtggcagtttaccgatgaggacgtgtcctttcttagcccttacctgaccagtaacgtcaagcgtttcggcgagttcaaccttaagctcaaccgaccgccggagccctggatcaaggattcggtattccaacaggctgccggctcgttgcgagtcaactcgaccagtaaggccgcggccgaggaggcaatatga

SEQ ID NO: 339160 - DNA, 279 bp, Pseudomonas aeruginosa
atgaagaaggccatcccattcttgttggcggccatcctgaccgcctgcggtcaggccgagacgcctcagaaggccatcagttcagaaccggacatcccgacagtggaagaactggcggccaaccccgaacggctcaaagaactgcgccagcaatgcaaaaccgaccgcccgaagctcggcgacgtgctgtgcaaccgggtggccgaggccacgcgcaagcggttctacggcgatggcgaaaccccttacacgccgccgaaggaatcgcccaagttctga

SEQ ID NO: 339161 - DNA, 945 bp, Pseudomonas aeruginosa
gtggaactgcgccatcttcggtgcttcgtcgccgtcgctgaagaactccacttcgctcgcgccgccgagcggctgcacatcgagcagtcgccgctgtcgcgggccatcaaggaactggaagaagaactcggcgtgatgctgtttgcccgcaccacgcgcagtacgcggctgacccatgccggaacattgttcttggagcatgtgcgtcgtgtgtttgctgccttggagcaagcgcgagagagcgtgaaagcagcggcaaacggttttcacgggcagttgcgcgtggccttgtcggatggcatcacgccgtcgcgcctgcccgccttactggcgttgtgtcgccaggaagaacccgaggtcgagatccgctttttcgaagtgtcactatcgcagcagatcaaagggctgcatgatgatctgtacgacgtggggtttgcccaatccgacgaagtgggcgacggcatcgtcactttgcccgcttggagcgatgcactcatggtggcagtgccggcccggcatccgctgctggcctacaagcgtattcccttggacgagttgctgcgctacccgctggtcttgtgcgatccgcaagtgtgtgagggccacgccaagcacgttgaacgagtgctgcgtcgtgctgacatggaaccactgatcgcagaacgggttgccacctgcgatctgatgatggcactggtatcggccggcttcgcgcttggactagcgggcgctgcacacatcgccgccagccgtgagccgggtgtcgtagctcgaccgctggcgtcgcgagtgccaccacttacgacctacttgctccgtctcgacggcaatccgtctgatgaactggcacgtttcgttgagcgcgtgcagaccatcgagttgccggaaactcctagggccatacgaggccgaaaccctgatcccccggaggaattgatgccatga

SEQ ID NO: 339162 - DNA, 1230 bp, Pseudomonas aeruginosa
atggacgagaggctgcttttcgcgtcggccctcaatctggcccagccttggtacgtgagcggtacgcgcttcgatgcccaggccaggtcgttgacgatcctcatcgatttcactgcgggcagccgcttcgcgcaccctgccgcatcggggcagcacccggtgcatgacacccagatcaagcgcttccggcacctgaacttcttcgagcacgagtgcttcctcgaggtgcgcgtgccgcggatcaagctgccggacgggcgggtgctgctggtcgagccgcactgggccggcaggctgtccggcttcacgctgctgttcgaagccttggtgctcacgctgtgccggcagatgcccttcgccgcggtcgcgcggctggtgggcgagtcctggcatcgcgtgcacgcgatctgcgcgcgttatgtcgagctggcggtggacgaattggacttgtcggcgaccagggcgctggcgatcgacgagacgtcctaccggcgtggccacacttacctgacgctggccgcggatgccgagcagcgcagggtcgtgttcgtgaccgaagggcgtcgtgttgaggcaatcgccgcgcttgccgggcacctggccgcgcatcaggccacccccgggcagatcgaatcggtgagcatcgacatgtcgccctcctatatccgcggcgtcaccgatcacctgcccaatgcgcgcatcaccttcgacaagttccacgtcatcgcccaggcctccctcgccctggatcgcacccgccgagccgagcagaagagcgatccggccctcaagggcctgcgctgggccctgctcaaggatcgcgaccgcttgccgcgcgagcagcgcggcgaactcgatgccctgatcgccgccgccaccagcaagcgcaccgcccgcgcctggctgtatcgcgagaacttgcgcgagatcctcgagcgcaagcagatcaacgtggtcgccgcgctgctcaggcagtggtgcacgaacgtcatgcgctccaaggtcgagccgatgaaggacgtcgcgcggatgatccgcaagcacttcgacggcatcctggcctggagccagacccgccagaccaacggcttcctggaagccatcaacggcctgttccaggccgccaagcgcaaggcccgcggctacacccggctcgacaccatgcgcaccgtcatcttcctgatcgccggcaagctcgacttctcgcgcctcaacccgcacgtggcataa

SEQ ID NO: 339163 - DNA, 1773 bp, Pseudomonas aeruginosa
atgcaggcaagccctgctatcgccgccgtgcctgcgggtgcgggcgaagacgctgccatcgtcatcgaagacgtggacaagcatttcggcgacgtaaaggcgctgcggggcttgagcgcgcgcatccactatggacggctgacgggtctggtcggccccgacggcgccggcaagacgacgctgatgcggattctgaccggcctcctggtgccgaacgccggccacgtcaccttggcaggctatgacgtggtcaaggacaacgacgccattcatgtcgccagtggctacatgccgcaacgctttggcctgtacgaagacctgtcggtgatggagaacatgcgcctgtatgcgcagttgcgcggcatggatgcggaccgcaacgccgatctgtttgccgagctgctggacttcacgcggctcggacccttcaccaaacgcctggccggcaagctctccggcggcatgaagcagaagctgggccttgcctgtgcgctcatggcgcggccgaaggtgctgctgctggacgagccgggcgtgggtgtcgacccggtcagccgccaggacttgtggcgcatggtgcaggcgctgaccgatgaaggcatggccgtggtctggtccaccgcctatctcgacgaagccgagcgctgcgagagcgtgctgctgctgaaccaagggaagctcctgttcgatggcccgccgcaggagctgaccgcgcagctcgaaggccgcagtttccgtctggaagacgtcggtgccgagcgccgagcggtcctgacccaggcactcgacctgcccagcgtgagcgatggcgtgatccagggcgccggcgtgcgcgtggtgttgcgcgagggcgctcaagcggagcagctccaggccctgtccgatcaggcgcgagtggagctggcgcaggtgcccgcgcgcttcgaagacgccttcatcgatctgctcggtggcggccccggcggcacttcgacgctggccgagcgtctgccgccggttgagctgggttccgacattgccgtgtcgtgccgaaacctcaccaagcgcttcggcgagttcaccgccaccgacaaggtcagcttcgaggtgcaaaagggcgaaatcttcggcctgctcggccctaacggcgccggcaagtccaccaccttcaagatgttgtgcggcctgatgaaaccaactgctggcgaagcgcatgtggtgggccatgatctgcgccgcgccaccggcgcagccaagagccggctcggctacatggcgcagaagttttcgctctacggcctgctctcggtgcagcagaacctggaattctcggccggcgtctacggactggaaggcaacacccggcgcgagcgcattgccgagatgatcgaaaccttcgatctgggcgactggctgtccgccacgcccgattccctgccgctgggccacaagcagcgcctggcattggcttgttcgctgatgcaccggccgcccgtgctgttcctagatgaacccacttcgggcgtggacccgatcacccggcgcgaattctggacccacatcaacggactggcccgcaagggcgtgaccatcatggtcaccacccacttcatggacgaggccgaatactgcgaccgcgtggccatgctctcgcgtgcgcaactgattgcgctggatacgcccgacgcgctcaaacgttcggcggtcagccccgaacgacccgacccgacgatggaggacgccttcattcacctggtggagtcggcggaccgcgagctggaggccgccacatga

SEQ ID NO: 339164 - DNA, 639 bp, Pseudomonas aeruginosa
atgatcgtcgcgctgctcaaccagaaaggcggcgtgggcaagaccacgcttgctacgcacatcgccggcgagctggcgatgcgcggccagcatgtcgtgctgctggacgccgacccgcagggttcatcgctggactggacgcagcgcagaagccagcaaggcttgccacggctgttcagcgccgtcggcctcgcacgcgaaacgctgcatcaggaagcgccagaactcgccaggcgggcagatcacgtcgtcatcgatgggccgccgcgcatcgccgccttggcgcgctccgcgctgctggcggctgagcgcgtgctgatcccggtgcagcccagtccctacgacctctgggcttcagctgaaatggtggcgctgatccgcgaggcgcaggtgttccggccggcgctgcgcgcggccttcgtcatcaaccggcgcgtcagtaccaccgtgatcgggcgcgaagcgcgccaggcgctcgcagaccagccgcttcctgcgctgcgcgcggaagtgcatcaacgcatcgtgttcgccgacagcgtggccgctggccggcttgcacgcgagacggcgccgaacagcgccgccgcccgcgagatcacggcgctggtggacgaattgctgcggtggccgtcatga

SEQ ID NO: 339165 - DNA, 402 bp, Pseudomonas aeruginosa; identical to SEQ ID NO: 329443

SEQ ID NO: 339166 - DNA, 531 bp, Pseudomonas aeruginosa
ttgctgccgcgcggccagttcgctgacgagaccggcctgctgggcggcctgaatactcgactcctgccgagactgctcgccgaagatccggtcgacctggtcctggagctgctgcagctcagccttggccttctcgattcccatcagcttgctgaccaggccggcgccttcggtgtcacccgtggcgagcagacgcttctgcaggtcgccgtacttcttctcgatctcggcgccggccgcttcgacggtttggccggtggcccgaaggtagtccaggttgagttgcttcagggttgtggcgtctttctttgcctgttcgtcggccttcttctgcttttctgccgcatccagggtcgcccaggcggcgcgagcgcgggcttccagggctcctgtcagattgcgttggtcaagctcgtactcacgcaacgcagcccggcccttgccgtaggtcgccgcttccttctccaactgcttgacccagtcttcgttctgtttggccaggcgcgcagcggccttgtcttcgccgcctga

SEQ ID NO: 339167 - DNA, 1434 bp, Pseudomonas aeruginosa
atgtcccgtgccgccgtcccctccgtccgccggcgcctgctggtcaacctgctggtcggcttcgtgctgtgctggctgagcgtggcggcgctgacctaccacctctcgctgaagcaggtgaaccgcctgttcgacgatgacatggtggacttcggcgaagccgccctgcgcctgctcgaccttgccaccgaagaccaggccggcgaggacggctcgatcaccgagatcatcgaacgcagccgcgaagcgatccagggtctgcccctgctacgccgcgaaagcgccctcggctacgccctgtggcgcgacggccagccgctgctgtcgagcctcaacctgccgccggagatcacggcccagggccccggcttcagcaccgtggaagcccagggcacccactggcgggtgctccagctgaatatcgacggcttccagatctggatcagcgaaaacctgatctaccgccagcacaccatgaacctgctgctgttctactcgctgttcccgctgctgctggcgctaccgttgctcggcggcctggtctggttcggcgttgcccgcggcctggcgccgctacgcgaagtgcaggccgaggtccagcagcgctccgcgcgccacctgcagccgatcgccgtggaagcggtgccgctggagatccgcggcctcatcgacgaactcaacctcctgctggagcgcctgcgcaccgccctcgaggccgaacgccgactgaccagcgacgccgcccatgaaatccgcacgccactggccagcctgcgcacccatgcccaggtcgcgctgcgttcggaagaccccaaggcccacgcccgcggcctgctgcaagtcagtcgcagcgtcgagcggatcagcaccttgatggagcagatcctgcttctcgcccgcctcgacggcgacgccctgctggagcaattccacccggtcaacctcgccaccctggccgaagacgtactctccgaactggcgcgccaggccatcgacaaggacatcgagctgtcgttgcaccaggagaccgtgcacgtgatgggcatcgacctgtggctgaaggcgatggtcggcaacctggtgggcaacgccctgcgctacacaccggccgggggccaggtcgagatccgcgtcgagaatcgcgcccagcacgctgtgctgcgggtgcgcgacaacggccccggggtcgccctggaagagcagcaggcgatcttcacccgcttctaccgcagccccgccaccagcagcggcgagggcagcggcctgggcctgccgatcgtcaagcgcatcgtcgaactgcacttcggcagtatcggcctgggcaagggactggagggcaaagggctggaagtacaggtgttcctgccgaagacccagccggacgcgacgcggccgccggccagaggtccggacagcgggcggtcacatatctga

SEQ ID NO: 339168 - DNA, 1152 bp, Pseudomonas aeruginosa
atggagcttgtgtgggccaccgaggaattcatgatcgccggtcgtccttatcctggctttcctatcctgctttgggacacgttcgaaagctgtatccctgccaatgaattccttcgccactatctgctgcgtggagctattgggtcacagaagtcatggccaagcccaggtcgtgcgctatacgattttttcagctttctccaggcacatgatcttgactggcgcgatgtggatcgtggcgaggctaagagcgtcgtagcggcctatcgggattactgcctcatggagtgtcagttggctccatcaacgacccgtcagcggctgcactatgtgtgcaaattctacgaatatgcgcagctgcagggatgggtgagcagactcccgttcggctatgaggagcgggtggtcaaacgtgctcccgacttccttactcacctgagtgccagtggcggtaaggctatggtgaacgacatcatgccgcgcaagcatcggacgctgccgaagtttttgagcataggcgagataaggacgttgctggtgacagcggaaaatccgcatcaccgcatgatgattcggttcgggcttcaaactggactgcgtcgggaggaaatcgcgtctttcccccttgcctacatctttgatccggataaagccggtaggcgagagcgaaacatccggattagcctcgatccacacgatggccatggtatgcgtaccaaaggcagcaagccgcgcgacatctacatcagtcgtcgctttctcggcgatttacatcgctacgtagttcaggttcgaggtgagcgtgcttcgtttagtcgacctcgtgacaatcatgagccgttgtttcttaaccagattggtgagcccttcgcagaggatggcaaaggcatagcccacatcattcgggaaatcggcaagcgcgctggtattagcgtccatacccacatgctgcgccatacctatgccactcataccttggtcacgctccagcgcaatcgtggcaaccttgatccgctggtgttcgtccaacggcagcttggtcacagttctattcagacgacgatggtgtacctgcacctggtcaacgagctagccgatgatgcggtgcttgcctacgacgatgagttaaacgaagacttgggaagtgcttga

SEQ ID NO: 339169 - DNA, 1677 bp, Pseudomonas aeruginosa
atgggcaagcgcaaggtattcaacagaaccgaccttagcgtcccccgggtcgagcacgctcgcgatgcggcaggtcgcgttgtcgttcttcccgaggcatttccgccagatacaactagggttactttcggtcgcaacgcaacggccacccgtaccttcgacttcgcgcgatggtacggctccggcattgatccaatcacctacgcctgccagcgccagatcgagcgtttccttgcaggtcaggacggacggattgaggccagtagcgcggcgagtttctgcaaaggtggtttacgccactttctcgactatttagtgttgcgcgcagccgcatttgggcgtgggcttactctggccgacattgatcgcgccacaattgatggttttctaggccatctcgccggactaggcatcacggtccatagtcagaggggccatttcggcagcgcaaaatccattctctacggattggcttcacgtggcctgatttcgctggtcgccacaggcgacgatgcgactttcccacgaaatccattcccgaactgtagtagcgggaagggcgaaactcctctgccgaaacgccagcggcagttgttcgccagcgcgcttaggaaggcagtcgcgcctatctgggatgatcacactcaagtgactggcgagttgctggcttatgtcctattgaccgttgcgctgcacactggacgaaataccacgccactgctggagatgagacgcgattgcttgcgcgctcatcccaaggacaacagcacgttcctggtcctttggaagcgccgcgggtataccagtcacaaggtggcactacgcgccgagatctctactgaaacgcatctagaatctacccctatcgttaagaccaatgtcgaacgattgatccggcgcgttctggctcttagcgaaccgctgcgtgcagagtctccggattattgtaaggagcgggtgtggctgtatcgcgtgcatcgcggcccagggcgaggcaggatcaatacgttacatgtcgggactttggtgctggcgatcaaaaagctagtggccgactacaggctcaccgatatcgacgggcagccgctacgtattaacgtatctcgcctgcgcaaaacattcgccaaccgaatattcgagttatcagcgggagacttggcgaccactgcctttgcgcttggcaacacgcctcaggtggccgggaagaactatttggcacccagcgtagacatgaagcgaaactggcaattcatgggggaaatactcgttcaggagctactgaccggcaccatcggtgcaagtttccaggctaccccaatggggcgttgcggtgacccggtaaacggccagtacgcaccgaaacgggagggggcagtatgtttctcattcctcaactgtctgcgttgcaagcactacgcggtgacgggagaggatcttcaccgcctattcagcttctacttccgagtgttagcggagcgcacgcacatggacaagcggcgttgggcgcgggagtacgcgcacattcctcgcttgattgatgactacatcgtggccgaaggactgcggcgtgggactttcaagcctgcggcgatcgaagcagcccgtgagcgtgcgcgccgcgagccacacccattctggtcgttcgatgtggtggagaggctggagacctttgcatga

SEQ ID NO: 339170 - DNA, 1890 bp, Pseudomonas aeruginosa
atgagcgacgaaagcgtggttgtactgccttggacgagtctcgagtttcagccagtagaaatacgtgagttacctggcagcgaccgtgacgcccttactgtgagcgccattcaggttgaggggcactgggtcaccctcagccgctatggtgaggatatttggcaactggatggctttgctagcaacgtgcccgaaggcctaaaacaccaggactttcgtcgcgtgcccatagcgtttaaggccgtgatgaaagccttgatctaccgatacctgcagcgaggccgagccgggcagaaacggcccaaagcgagcagcgtgcgtaatctttttcagaatgcgttgcccttcctacgatatctggatgcgctcaacctcgaccgtttaggcgtagtgacccctatgatctgtgcaaactacgttgccgagtgtcgggcctatcggcaaactcaccgaagccgcggtaaaccgctgtctcagagcgcccttgagcgtcggtttatggcagtcgaggcgatttatgagctgagccagtacactcacgaccggatcccgctccccccctggcctgatacctccgcgagcgcgttggccggtggtcgcatgagtagcaagttgggaggcaaaacaccgctgatgccggatgaggtgttctgtgccttgttcgagagtgcttatgagaaggttcagcacggcaaggcgctcctcgatctacgcgatgccttagatgccgtcgcagtagcacggagagggcaggtttccagaacaatcatagaggcaaaaaaccgcgtcctcgccacacttggttggacaactggcctcggagcatttggtcaggcaatccttgagctacggactgcctgctatatcgtgctggccagtacctccggttgtcgcaatcacgaattggctaatctccaatcgggtgcacaccaccgcaccgaggatgatgagggaacgatctatcactggatgcgttctaggtcagagaagacctatacgggcgtccacgactggatgattcctgaggttgctgtacgtgcgcttcgcctaatggagcgctgggcgaagccctatcaaactatgatagctgtcgagatcgccgagctccgacgacgcaaccctcgcgacccagaaatcgccaaggcgcttaagcatcgccatgccctctttctcggagtgatttctacaaagggtaatcaagctcgcaccctaacgggcgtctcatggaacaaagacctgaaggcgttcgcgcagagcattgggttggattggagcctttccagccatcaattccgccgcaaattcgccaactatgcagcgcacagccagttcggcgatctacgttacctacgtgagcactacgcgcactggtccatggatatgactctgagctacgccatggatcgggattgggggcaacacctcgacatcgacttgtacgacgacatccaggcagagctcagcggcatcaagttcggcgtcgttgccacttggacaggggacgagccattggccggtggctatggtcgctcaattacgcgctggcagcgcgacccggcgaatctcgctatcttcaagagccatgcctcaatggtgacctcaattgcggaaagcactgcaatccgcagcaatgggcatgcctggtgtaccgccgatgacgaccgttgcgtcggcaacacattagagagaacgcgctgcggtgactgccacaacgccgtgattggtctctctcacgttggcatataccagcgcctctatgacaatctgagggatctgctggattgctgcgacattggtgatggtggtcgccagcgtgttttacgtgacctggcgcgctgccgtgatgtactcgtacagcttggatacgacccggagacgaatggaacatga

SEQ ID NO: 339171 - DNA, 408 bp, Pseudomonas aeruginosa
atgattgccaaacgtaagtcctcggacgctcgagagcgggatttgcaactcgcgctcatccgcatccaacgtggtcgtgcacatactggagaaaccaaagtcactatcgccgctgtggcgcgagaggcaggcgtctcgacagcgctgatccataaccattatcccagagtcgccgaggccatccgcgaggcccaagggcgctccagtcgtgtccaacgcgatgtgaagcatcaggatttatgtgcggagcgcgagaagaatcgcgtgcttcgccaggaaatagaggagctgcgcatcaaggtcgccagtcttgcctctatcaacgaggttttgattgccgaaaaccgagtgctaaaggcgaagcagaatgactccaatgtgattgagctagccgcgtgcagactctga

SEQ ID NO: 339172 - DNA, 426 bp, Pseudomonas aeruginosa
atgttcagaactcacaagcaagcggaagtcccgtcggatgagctgtatggtggggaagctcagctgtggagcatcgtcgaacacagtctccacggcccttggttctacgtttccgtgcttgaagggcactctggtcagacgctctgcaccatgctaatggtgcaagaagtgcccgtattagaggccttgcttgctcagcaaagcgagacgatgaagattgagagcgtccaactcgtcaccccgagctacttaaacaacaccaacagctggctcatggaggagctgtcggagcttgtgcagctccgcggtgcagactcgcattgctatcaattcctcgttgagaatgggcgtcgatacgttgacggcgatggcgtcatgccgctgcgtggccaatggattagcaggcgagtcatctttcaatgctga

SEQ ID NO: 339173 - DNA, 294 bp, Pseudomonas aeruginosa
atggaacagaagcaggcctttggccaggctctaaagatgctgaggacaggcaagcatctgacccaggaagacttctctcaagtcagcagccgtacctacctcagcactctcgaacgggggctcaaaagcccaacgctagagaaagtaggaagcttggcatcggtgttagatgtacatccaatgacgctcctggcatgtacgtacttgcagctagaaagcgatgccgacttggaagggctattggctcgaattcgaagtgagctcgcttgtgtggaccttgcgtccggcaactga

SEQ ID NO: 339174 - DNA, 1296 bp, Pseudomonas aeruginosa
atggaacacagcccgcaatccgttcagccttccaccctggccggtatcagccgcttggccaaggccatcagaaagcaagaccagatcacccacctcgccgcactggaaatcgccgcacaacgtgccggctatcagaactaccagcacgcccggcacgccctcaatcgcgaccaggcccctcttcccagccaactggtccacagcatctacctctcggcctactggcgggacactagtaccaagccacgccaatccggccttgaaacgatcaggatcgacctcccgcgccccctggccgagttcctgaagcgccaccagatccaccgcgcccgcaacctcgaaggctacttcctggcgagcgaggatcacttggaaatgcgctcgaatctccactctcaggaggcggcgcgtgatttccttcatcgggcggcgcggagcctgcagttcatcgaagccacgggactacgcccggccaccaaccgactgcagcgcaagcccatggatcagctggacgacctgcccaacgtagaccacggctcccgctggatctctcctgccggcgactggctcttcctggacgagccgtacagcccctctttgacggaacgcgccgcctggcttgcaaacaggggactgcacggggcttggccgaattggaacggcctccacaaccctggccaaacacacccgcacctgaccgcggccaatcaaacattgctcaaccaagtgatcagcatcgtgcaggcgctgccgtcggtaattgagggcgactggcagcaatggccgtggatctccgatggctattcgtcccagttcatcagcccagcgcgtaaagcctctggcaacaagcgcaagccccgcgccggcactacctacggctggagcaagaacgcctatcagtatcacaccattgagggccacggttcagtgtggaagcctgatcagtccatgaccctcggtaaccatgtggcattgtccgatgagctaaagcggctgtgccaatccaagctgcccatcaccgcctacaacaagattctggaggtcaggagcgaactggaaaactggctgttcaccgaagccacccgcgctgggcacgatgcaaccgacgctgagcacgatgtgtactacggcggcgagtcgccggcggggtacaagaccgacatggacaggctcgccgccatggaccgagtccgcgcgacactcaccacctcgtaccccgactgcaaaccgttgcgatacttactgaagagcctcgccactgcccgcgcgctcacgcagcagagcgcgacgcggtag

SEQ ID NO: 339175 - DNA, 363 bp, Pseudomonas aeruginosa
atgctgctgactctgctgctggtgttgttccagagtctagctgccttgaacgacgcgcgagaggcggtgtgcgacatcaacaatcgacttcccttgagcaacaccttcgctgaagccagaaagtttgtcaggacgcggctttgtggtgctccggccgccctggtgcggatcgtgaaggccaatgacgtgaacgtgcggttggcgcccagcatgagggccgaggttatcgctctgctgcccaagggggcggccgttgcgatagtgaacgttgataaccgcgattggctggaggtgtccttccagcgcgacggctatgtggtggaggggtgggtatcgaggaagtaccttggcacggttttttaa

SEQ ID NO: 339176 - DNA, 1695 bp, Pseudomonas aeruginosa
atgatcaaggattatgtcgacagaaaaatattgcaagaagagttattcaacctacttatggatgacaagcgccccattgtgactttactcggacggggaggaatcggtaaaacttctttggcacttaaagttttgcaagatatttatctagaaagacgttttgacactgttgtttggctaagcgctcgggacgtggacttgcaactctccggccccaagtcagtccggccggcggtattcgcccctgaggacatggcaaaattttatgcaaagctcgttctttctcccgatagagccaaagaaaaagcttttaatgcgacttcattctttgaggagcagcttagaaaaagcgacagcggcccctgcctttttgtctttgataactttgagaccacacaaaatcctgtagaggttttcaactggattgatacctttatcaggcttccaaacaaagccctaataaccactcgactgagagaattcaagggtgactaccctgtggaagtcggtggaatgaacgaccaggaatcacggttactgatcacccaaaccgcatcatatctcggcttaatgggtatcttggactccgagtatgtgaatgagttaatagctcgttcagaggggcatccctacgtgattaaaattctgcttggggaagtagccaaattaggaagaaaatccaatataccaaaaatcgtagctggcaccgaagacatccttactgccttatttgaacgaacgtacgcagcactatcaccttgctctcaacgcgcctttcttacgctatcagcgtggaactctggagttccaagattagcactggaggccgtcctttatcgatcgacaggcgagaggattgaggtggaaaaaggtattgactccttactccaatattcaatggccgaataccatgtaactccaacagacaaccaagaatttataagcctgcctttggttgcaagcgtctttgggaaaaagaaattaaatattagcccatctagggcggcaatccaggcagatgtagaaatacttcaaatgctaggacctgcacgacgcgacgatgtgaatctcgcattagcaaaaaaacttgaaaactttataggaaacatttcacgccgcatagactcaggcgaaagttatgataatttctctccagtattggagtcgatttgcagagcctataacccaggctggttgctgattgctcgctggcatatggaacaacgaacaactgcaggatatgagtgcgccaaggaggaactcaggcgattcttggagaactcacctcctgcagaggaagcagcagaagcatggcgactactaggccattgctgctatcagacggaagattccttgggcgaggttcatgcatttattgagcgtgcccaagcaataccggttccttttcatgacttgtcaaatacggcaaacagactcaatatctttctacgagaaagagggttcgaaatcgacagagatcaaaaaagggacttggcgtcacgtatcttatctgttttgaaccagcgcaagtcagaagcagaagctgacgatttgtctcgaatggcttggctggccatacacctcgaacaagagtctgttgccattgactatgtccgcaccggattgggcttggattcatgcaatcattatttgacaaagcttgctcaaaaactaaggatcaatgtttttgagtaa

SEQ ID NO: 339177 - DNA, 615 bp, Pseudomonas aeruginosa
atgaacaacggcacaaagcggaaccagtgcgacggctgccaggccggcgtgccgctggagaacggcaaacatcgaatgggacgtcctggtggctaccccgacctcatgagctgcacagcgcatctctatggggcgccgcaggtactgcctgtggcatgggccattttcgacggcgcctggatctcggaccacacggctgattcaaaccgagcggagcaatgggctgaggatggcaagaacgtgatcgctcttttcgcgatgccggtccagcagccggtatctgctttcgctcgggatgtgctggcagaacggcagcgacagatcctccaggaaggcttcagccccagccatgatgccgagcaccaccggggcggtgaactggcgctggctgctacctgctacgccgacgaagccgttacgcagatctgccagccagagcgagagccgtgtctgacgcaactggtgccgggctggtggccgttcgagccatcctggtggaaacccagcctggacgctcgaaagaacctggtgaaggccacggcgctgctcctcgcacagggtgacgcgatcgacctgcagattgataccgagctggagggtcgtccccatggctga

SEQ ID NO: 339178 - DNA, 597 bp, Pseudomonas aeruginosa
gtgaatatcgaggtgacgggtagcaacaacaaagtcgcaggtcgggatttcatcgagaacaacctgaatttggggagcgaagagattcgaacgctcggtgcaatcctcgctaaagagatcaactctctacctaaggacgggcaacctcactccatatcagtgacggtcggtggtgaccaagctggcaatatttcgctaggtggtactcagataaatatccaagctgtttcagcgaatccggctagggagcggacatttgacgactacaacgccggagagttgagagagtgcttacgtcattaccgaaaagagtggaggagcggtctcataggctgctggttgaatactccggcagtcctgatgctgctcgtgctcttcggcttggttggtttcctggtctatctctggtccaaaggatatggatacctgtctatgaacgttgaggcgatatggatacctgtcctagttataggctttctattaggtggcttggggctatggatggatagagttcgacgcgtagagcaccttcacatggagaatgcacaggaaatgattgatcagatacaggccgcattgcgcaaaaaacgacgttaa

SEQ ID NO: 339179 - DNA, 501 bp, Pseudomonas aeruginosa
atggaattcaaagtactgtttggtgcagtgatggttgcgggcctatcggtagcaggctgctccaccaaaaactatggtcggcaaccggagctgacagacttcgaacggcagaccatgagctgccgtgaaattgatctagagcaggccaaggttcagggattcctgacccacgtgcgtgaagagagcgagttcgatgggcgctccgtgctgtccttcctaggcgacttcggaattggaaatatgatggagaaggacgcagcggtcgacagtgccaatcagcgcctgacccaactggcgggcgctaagatgcagcgtggctgcacctatgcctatgaaactgctccagctcagccagtgtatgcagcgccgcgcgcctatgccccagcgatgcccgcgtcggcttctgcccgctctgtcgacgcccaactcgacgagctaaaccatatgcagttgccgtatgaggaataccaacggcgatatcgtgaaattatgggccagtaa

SEQ ID NO: 339180 - DNA, 1074 bp, Pseudomonas aeruginosa
atgaggaataccaacggcgatatcgtgaaattatgggccagtaaggggcgcaaagtggcgaacgaaaaagcgaagatcaccttctaccgaattgatcagtcgggcttttacagatggggcggggaagagccagagtttggcggcactgctgagatgctcaacgagctacaccagtggagtcagggtaagcaactggcagaaacaaagacatacgaaccagcagatggatctgacctcctgccagtgtatctcatggatatcaccccaggtcaggacagttggctggtaacaatgtggaatcaaacaccatcagttgatggtaactttgctgcggcaatggggaactctcaagtaggtaacaccgaagtagtcttaaaggaaatcccagaagggggaatcccaggtttcgctacgtatttctggtttctacctgaacgcaatgtatttgccagcataaaattccagcatctgataaccggccagaagccgatgcaagagtacatggagtcttatctgacgctgtactcttcgcatgccgtgttaaccgaacctgatgaaggggtggacattgagcttgccggttatcgtcaacgccctgacgcagctatacaagacgtgagtccccgattccgtacggcccttttgaaaaagcctggcgatcacgatctattgatcgagcgcgctgatcaaattcggaagatccatcgcaagaccacgcttcatttgaaccgggagcctgagctggctttctggcagcgtttgctccaaaagtcacaccttcgacaaccgcaggttttgcctgacaatgtccgagtgaagtacgagctgaaggtccagttggatcgtgagcaggtcgagcagatcattgtctcttggatcgacgcacatgatcgagagtgggatgactacggatttcagcttaaaggagaggcttcaccgcattggcttagccactccattgctcgggacgaatttcaactggatgtgataagggataaccttgaagtcgtgaatgcacgctcgctcctcggagctattgagggccgacgtcaggcgattctaggcatcctatga

SEQ ID NO: 339181 - DNA, 171 bp, Pseudomonas aeruginosa
atgaacaagacgccccacaccattaccgacgaactgctggatcagcttctggccaattatcagaagcctgaagacttgatcggtaccgacggcatcctcaagcaactgaccaagaagttggtcgagcgtgcgctgggagggtgtccgaaattttgtgtaaccggctcatga

SEQ ID NO: 339182 - DNA, 1647 bp, Pseudomonas aeruginosa
ttgttcgccgagggctttggtctgtgcctcaagtttcgcgtggcagacgagttggacaacttcgagcagaccgtcctcgatcacattggcgccactcagttcctttcccgctcgaccggactctggacgctgcggctgatccgtgacgactacgacgtcgcgacgctgcccgtattcgatgaggacagcgggctgctcgggatcgacgaagacagcatcacatcgctcgacggcacggcgaaccagttcgtcgtcgtctggcatgaccccatcacaaacaccgaccggcgtgcccgtgcgaagaatgccggcgcgatccgcgcggccggcggcgtgatcactacgacgaaggagtatccgggcctaccgaccggcgagttggccggcagggtggcggcgcgcgactgcaacgtgtcgacgtcggctatccgcaagctccaggtgcggctcgatcggcgcgcatatgcgctgaaccctggcgacgtgttctgcgttcgcagccggaagcgcgggatcgaactgatcgtcctacgcgccggaaagatcgactatggcaccctcacgaggggcaccatcgccatcaccgcgctggaagacgtgttcggactgccggcagccgggacgtccgcagtccagccgccgaactggaccccgcccgaccgcaccccgcgggtcattgcgacccgcaggctcatcgaggcgccgtaccgtgatctcgcggcggcactgagcgatgcagatctggcgcaactgcagccagagacaggcatcctcgcggcgctgggcatgcggccgtccggcctgcagatgaactacgcgctgctcagccgcgtggggtctgcaccattcgacgagcggacgtccggcgacttctgcccggtcgcgacgatctcagcagatatcggccggggcctgaccagcgtcagcgtcacgcttgtccaaggggttgatcttgacctcgtcgaggtgggctcggccgcgatgatcgatgacgagatcttccgcgtcgacgcgatcaacgccgcggccggcaccgcggtgctcgcgcggggatgcgtcgatacggtgccagcgccgcatgaggccggcgcgctgatctggttctatgaagactggacggctgaggacacgcgtgagtacgtgaccggcgagacggtgcaagtaaagctgctgagccgtaccagctcggcgacgctcgcagagaacctggcaccggtcgactcactgcgaatgaaccagcgccaggcgcggccctatgcgccaggccgcgtgcttgtgtgcggtgttgcgtatccgactaagacctacggtgtgctgaccgtgtcttgggcgcaccgcaaccggctgctgcaggccgaccaactggttgactcgtctgcgagcagcatttcgctggaggctggcacgacatacacgctgagcatctacagcggcacaagcctgaagaagtcgtacaccggcctcaccggcacgacctggacttacccggtcgaggacgacatagcgcacgggctgctgccggtgctgcgcatcgtgctgttcagcgttcgcgacggtctgcagagctggcagcagcacgacatcacaatcgaacgacacggccttggcttccgcctcggcgaggaacttggaggcgtagcacaatga

SEQ ID NO: 339183 - DNA, 1149 bp, Pseudomonas aeruginosa
atgactctttatatgggaccgaataccggcctgctgatcaatggcttgccgggagaagggcattacagcgatctgattcggatgtggcgctgggacgacttcctccgccagccggtcgtcaaggggcgcgtcgcctcgttgcccacaagcggccaggccgagggcgacacttacattttcaccggcagcggcgcgaaccagaaccgaattgcacgctggtgggcaacgggtgcgacgacgcccatttgggagtacatgccgccacgactgggctggcgggtgcaggttgcgaacgagacgacgccgagcggccaggtcaagacctacgagtattccggcagcgcctggactgagctggtgggcggtatgtcggacgcgcctagcgacggaaaggcatatgcccgcgaaagcggcgcctggactgagctgggatctgccgcgaagtcggcactcaacgttctgccgttcatgaacctgatgcccgacatggggcgcttcgcgggaaccgcagccaatccgctgaatacgatgttcacaacgtcatggactccaagcaccttcatcaatggctggaacggcgcggccctcgcagatgggggcaagttctcgttcgacaacagcacgaacggcggggcggggccggcgctcaatgcgagggtacaggcacttctcacggcaatgggccgcacctggacatcggtttcaaggtacggcgtcgagttcttcaccaccgttctgacggcgggatcgcagacaacaaccggctcggccggcgcggatggggttacgcgctatctgtgctgctccaacggcagtaagacagttttcaacgcgggcgcgtgggcgacggtggtcatgtggctgcgagtcgaaagcggctcagctcatatctcgtcggcgccttatacgacccatcgcctttggatcaatggcgctgttgctgctccaggggttgtgctgccggcaggccaatgggtgcatctgcgattctcgatgcagtcatataacggctatgacaacgcgtgtccgtacatctacgcatccgcaggggctcagatcgcgtttgcatgcccggcgtggttcggtggcctcgtcgatccgggtatccacgttgcacccatcctgacaatcaacggagcaagcgcatga

SEQ ID NO: 339184 - DNA, 123 bp, Pseudomonas aeruginosa
atgatcggcttgccggtggtgagggtcgcgcgcggcgtgttgatgaagccgcagccctggcaggtgatgccgtgcgggttggcgacgatcacccgcgccgactgcccggccacctcggtgtag

SEQ ID NO: 339185 - DNA, 210 bp, Pseudomonas aeruginosa
gtgctgctgatctccgatggcggcacgctggtacgcacgccggcggcgcacatcgcccaggtcggccgcaacacgcagggcgtgaccctgatgcgcgtgcaggccggcgagaagctgcaggcgatcgagcggctggatgtctcgctggacgacgccgatgccgaatcaattacgagcgtcgacgcggacagcaggggcgaacagtcgtag

SEQ ID NO: 339186 - DNA, 1782 bp, Pseudomonas aeruginosa
atgtattacagcagtggcaattacgaagccttcgcccgcccgcgcaagccagacggggtcgacggcaaatccgcatggttcgtcggctccggcctggcctcgctggccggcgccgccttcctgatccgcgatggccagatgccgggcgagcgcatcaccatcctggagcgcatcgacgtgccgggcggcgcactggatggacttgagaagccggacaagggcttcgtgatccgcggcggccgcgagatggagaaccatttcgaatgcctgtgggatctgttccgcagcattccgtcgctggaagtcgagggggccagcgtgctcgacgagttctactggctgaacaaggacgaccccaatttctccctgcagcgcgccaccatcgaacagggcaagcctgcgcccgacatgggcaagttcacgctcagcaaggccgcgcagaaggacatgctcaaggtcttcatggccacgcgcgaggagatggagaacaagcgcatcaacgaggtgttcggtgaggacttcctcgccagcaacttctggatgtactggcgcaccatgttcgcgttcgaagagtggcattcggcgctggaaatgaagctctatctgcaccgcttcatccaccacatcggcggtctggcggatctttccgcgttgaagttcacccgcttcaaccagtacgaatcgctggtgctgccattggtgaagtggttgaaggaccagggcgtggtgttccagtactgcaccgaggtgacagatgtcgatttcgacatcgatgccaccaacggacgcaagcaggccacgcgcatccactggaaccgcgacggccagcccggtggcatggcactcggccccgatgacctgttgttcatgaccatcggctcgctggtggaaaacagcaacgagggcgaccataagaccgcggcgctgctggacgaaggcccggcaccggcttgggatctgtggcggcgcatcgcggccaaggatccgtcgttcgggcggcccgacgtgttcggcacgcacattccggagaccaaatgggaatccgccaccatcaccacgctggacgcgcgcatcccgaagtacatcgagaagatcgccaagcgcgacccgttcagcggcaaggtggtgaccggcgggattgtcaccgccaaggattccagctggctgctgagctggacggtgaaccgccagccgcacttcaagaagcagcccaaggaccaggtcgtgatctggttctatggcctgttcgcggacgtgccgggggattacgtcaagaagccgatgcaggactgcaccggcgaggaaatcacccaggaatggctgtatcacatgggtgtgccggttgaggacatcgcggagcttgcagccacgggagccaacaccgtgccggtgatgatgccgtacatcaccgccttcttcatgccgcgtcaagccggtgatcgccctgacgtggtgccagcgggcgctgtgaacttcgcattcatcggccagttcgcggagtcgaagcaacgcgactgtatcttcaccaccgagtactcggtgcgcacgccgatggaagcggtctacacgctgttgggcattgaacgcggcgtgccggaagtgttcaattccacctacgacatccgcaccctgctggatgcactgcaccagctgcgcgatggcgaagaattggcgttgccgggcccgtcgttcctgcgcgaccgcgtgttggccaggctcgaccgcaccgagatcggtgcattgctccacgacgccggcctgctggccggggaggacgcatga

SEQ ID NO: 339187 - DNA, 888 bp, Pseudomonas aeruginosa
atgaacatgacacaggacaccacaaagaccgtcgcctcgccctccggcctgcagcgagtgaccgtgctgggcactggcgtgctcggcgcgcagatcgccttccagtgcgcctttcacggcaagagcgtcacggcgtacgacattgacgcagcagcgctggagcgtgcccgcgacgccctgacgcgattggctcagacatatgccgccgacctgccggggacgacgcccgaggcgaccaccagggtcgcggcggccatcgcactgagcagcgaccttgcgcaggccgtgcgcgacgcggacctggtaattgaagcggtgccggagaagctggaactcaagcgctcagtctatgccgaactcgccaggctggcgcgcgaaggcaccatcttcgccaccaactcctccacgctgctgcccagtgcattcgcggatgcgacgggccggccggagaagttcctggcgttgcatttcgccaatcacatctggcgccagaacacagcggaagtgatgggtacgccgcagaccgatcctgaggtgttcgagcaggtggcgcgcttcgctgcggaaatcggcatggaaccgatccgactgcacaaggagcagccgggttacgtgctgaattcgctgctggtgccgttgctcaacgcggccgccgccttgttgttgaaaggtgtggcgagtccggaggacatcgacaagacctggcgaatcgggaccggcgccaagctggggccgttccagatctacgacattgtcggcctgcgcacggcgtacaacatcgcaagcgcaaatcccgcaacgcagggctgggccgaatatctcaaggtgaactacatcgacaagggtcgcctgggcgccggtgcggggggtggcttctacgatgattga

SEQ ID NO: 339188 - DNA, 513 bp, Pseudomonas aeruginosa
gtgagccaagcccaacgccacgcacgtccgctcaaccgcagtgaatcgcaggtccgcacgcgcgcggcgctgctggatgccgccgaggcgctgatcgtggagcactcgatcccggcgctgtcgctgcgcgccgtctgcacgcgtgccggctatacgcagggggccttctactccaacttcgccgatcgcgaggagctgctgctggaggtgatggagcgcaacctcgaacagaaggccgccagcctggagcagatgctggcgacctgcggcgacgcaggtctcgacggcaccctggcgtgcatcctggattggctggacaccatccaccatcggggcgaatgggcgcgcatcgccatggagctggggtataggaagttcaaccgccctttttggcgagtctggcgggtaggaagcggccgcgcaagcgccgctttgggcacagatcgggcacagatcgggggttcatgcgtgggttttcgacatcgcggggccacgcagcggctcagtgcgtag

SEQ ID NO: 339189 - DNA, 984 bp, Pseudomonas aeruginosa
atgtggacgaacaccttccaggaaggcttaaaaatagtaggcgaaaatatttccctatctctacccgatggtcgtcaggaactattcaggctgactgacggcgcaatatcgtccgacgcaacgacgggtacactttcaaaagaccaggcaggctggaggtatgactatagggacggaaccagctcacttttcgatgtccagggccggcttatccagaggaaagtcagggggcaggtcatcacgataacctatccgaacctctccaccaccaaggctaaagatgggttcggaaacaccctaaccgtttcctggaacgcaacgaaacaaccctacctcgtcgattacaacggttccctgaaagtggaatatctatatgacgggggcgccaggctggtttcgaagaaaaccacgtcccaaggactcaaccgcacccggaagtatctctatgctgacagtggcaatgccgggttaatggttggaatcatcgacgaacaaggcacgcgttacgccacctggacctacgacgaccaaggccgcgccatctccagcgaacacgccaacggcgccgaaaaggtcaccctcgcctacaacgatgacggctccaccaccgtcaccaacgaatacggcaagcaggccacctaccgcttccaagtgatccagggcatcaagcgcatcgttgccatcgaaggcgaaccctcgcccaactgccccggcagcaattccaccttcacctacgatgaccagggtctgctcaccagcaaacgcgacaacaacggcaacctgaccacctaccagtacaacgcccgcggtctggaaacctcgcgcaccgaggccgccggcactgcgcagacgcgcaccatcacaaccgactggcacccgaccctgttcctcccggtccaggtcagcgagcccagccggagcacccgctatcagtacgacgccgagggacgcagaaccagtgaaggaatcatggcgaaccaatga

SEQ ID NO: 339190 - DNA, 351 bp, Pseudomonas aeruginosa; identical to SEQ ID NO: 323944

SEQ ID NO: 339191 - DNA, 1242 bp, Pseudomonas aeruginosa
ttgcccatacgccttgtcgatctggttgagcgactgcgcgatgaggaagctgcggatgccgtagccggccatgaaggccagcgccgtctcgaagaagtccagccgcccgagtgccgggaactcgtcgagcatcagcagcagcttgtggcggcgcccgatgccgtcggagccgtcgagcgattcggtgaggcgacgcccgatctggttgaggatcaggcgaatgagcggcttcgtccgcgaaatgtccgaaggcggcaccaccaggtacagcgataccggatgctcggcagcgatcagatcggcgatgcgccagtcgcagcgcgacgtgacttcggccaccgtgggatcgcggtacaggccgaggaacgacatggccgtgctcaacacgccggaacgctcgttgtccgacttgttgagcacttcgcgcgccgccgatgcaacgaccggatgcggccaatcgccgaggtgcggcgtggtcatcatgcggtgcaaggtcagctcgaacggactggccgggtcggacaggaagttggcgacgccgcgcagcgtcttgtcttcgcccgcgtagagcacatgcaggatggccccgaccagcagcgcgtggctggttttttcccaatgatttcgcttctccagcgcgccctcgggatcgacgaggatgtcggcgatgttttgcacgtcgcgcacttcatgcgcgccgcgccgcacttccagcagcgggttgtaggccgccgacttcgcatcggtcgggttgaacagcagacagtggctgaatcggctgcgccagccggcggtgatctgccagttctcacccttgatgtcgtggatgacggccgaggtcggccaggacagcagcgtcggcactaccagaccgacacctttgcccgagcgcgtgggcgcgaaggtcaggacgtgttccgggccttcatgccgcaggtacttgcgatcgtgctggccgaggaatacgccggccggttgcgtcaggcccgccttgcgaatgtcctccgcattcgcccagcgtgccgaaccgtaggtggtaacgaggtgcgattggcgcgagcgccagatcgacatgccgatggcgaccaccaccgccagcaggccgctgccgcccgcgatggcgccgccggtatcgaacacgcgcggcgcgtaggcgtcgaagaagaaccaccactcaaacagcttccacgggtggtagatcggcgtgccgagaagatcgaaccagggcgagccaaggcgtag

SEQ ID NO: 339192 - DNA, 945 bp, Pseudomonas aeruginosa; identical to SEQ ID NO: 323969

SEQ ID NO: 339193 - DNA, 507 bp, Pseudomonas aeruginosa
atgccgttgacgccgggggcggcggacgccgatgtcgcaggacgcccgctacaacccgccaacgccggtctccatgccagcgatccgaagcagaacggcgaataccgcttcgatatccgtttgcaggatattcccggagacgaaggattccccttgattcatacgccctggcgcatcgtccagggtaaggagcacaacctggtattggaaggcgagagcgacgagaagggacggttggtgctggacgacactcaacagcgtcagctatcgaacgcctgcgagcgtgcgcctggcgatgtctggctggtgtatccggggcaacgaataggcatccgtccgcatcgggagcgtgagggttgggacgccacgcgccacgcgctgggcgcgctggacttccatgacaccctgggcggccagcgcgcgcccaccccgctcgaacaccagcgcggcaagctcgacagttgctgcgaaggcgacctttattcccacctactggccaaggactga

SEQ ID NO: 339194 - DNA, 726 bp, Pseudomonas aeruginosa
atgaaaaagcgccttatcgccgccgccatcgcggccatgctttgcaccgccaccgctcatgcgcaatgggtcgtggtcgatccgacgaacctcgtgcagaacacgctaaccgcgatccgcacgctggagcagatcaacaaccagatccagcagcttcagaacgaagcgcagatgctgatgaaccaggcgcgcaacctcgccagcctgccgtccagcgtggtgaaccagttgcgcgccaatctggcaacgaccgagcggctgatcgcccaggccaggggcttggcctacgacgtgacgaatctggatcgggagttcgcgcgcctgtatcccgagcagtacgccgccaccgtcagcggcgaccagatgtaccgcgacgcgcaggagcgttggcggaacacgctcaacggcttgcagaccaccatgcagatgcaggcgcaggtgtcgcagaacctgggcgaagacgaaagcgtgctggccgatcttgtgggcaagagccagtcggccgaaggtgcgttgcaggcgatgcaggccatgaatcaattgctggccttgcaggccaagcagtcgatccagtcgcagcggctccagatcacgcaagaccgggcggcgtcgctggagctggcgcggcaggcggcagccacggagcgcgcccgcgaggtgcggcggcgcttcctcggcgacggcacgccgtacacgccgcagtccgtgaacttctacggcaactga

SEQ ID NO: 339195 - DNA, 1500 bp, Pseudomonas aeruginosa
ttgcaggagctgggcggcgatcaagtcgccttcggctatctgacggcgaccgtcaccgtcatggacgaggacgctgccgtcgcagacgagaagctgcgcatggtggagcgcgtcatccagggtcggggcttcgtcaccatccctgaaacgctcaatgccgtggatgcctggctgtcctcgctccccggcaacgcctacgccaacgtgcgccagcccatcgtctcgacgctgaacttggcgcacatgatgccggtgtcggcggtatgggctgggccggagaagaacgaccacctcgacggcccgccgctgatcgtcacacgcaccgatggcgcgacgccgttccggctggtgacgcacatcggcgacgtgggccacacgctggtcgcggggccgactggcatgggcaagtcggtcttgctcgccacgctggcgatgcagttccgccgctatcgcggttcacgcatcttcgccttcgacatgggccgctccatgcgggccgcgatcctcggcctgggcggcgaacactacgacctgagcacggatggcgaaatcgccttccagccactcgcgcgcatcgaccgtgagggctaccgcacgtgggccgccgaatggatcgaaggccgcttgctgcacgaaggcgtggcggtcggccccgacgagaaggcggctatctggtcggcgctgggaagtctcgccggtgcgccggtggagcagcgcacgatgacgggactttccgtgctgctgcaatcaaacacgctgcggcaggcgctgtcgccctatgtgctcggtggcgcgcacggcaagctgctggacgccgaccatgaccgcctcggcatggccgacgtgcagtgcttcgagatggaggagctgatgcacagcaaggccgccgtcatggccgtgctgcattacctctttgcgcgcttcgatgaacgcttcgacggtgcgcccacgctgctgatcctcgatgaagcgtggttgttcctcgatgacccggtgtttgctgcgcgtatccgccagtggctcaagacactgcgcaagaagaacgtcagcgtcatcttcgccacgcagagccttgccgacatcaaggattcgagcatcgcgcccgcgatcatcgagagctgcgcgagtcggattttcttgcccaacccgcaggcgaccgagccgcagattcgcacgatctacgagggcttcggcctcaacaggcggcagatcgaaatcgtcgccaccgcgcagcccaagcgcgactactactaccaatcccgcctcggcaaccgcctgttcgacctcgacctggggccggcggctctggcgtttgcgggcgcttccacgccgcaagaccagcgcgacatggatcgcgtgctgctggacgccggcgtgcccggcttcgcgggcgcctggctgcgccatcgcggcctcgattgggcggccgacctgctgccctcgttccccggcctcgcgccgggctccctcgctgaccaacccctggagaacctgtcatga

SEQ ID NO: 339196 - DNA, 306 bp, Pseudomonas aeruginosa
atgaccaaactggacaagggcaccgtgatcgcagcggcgctggagctgctgaacgaggttggcatggacaacctgacgacgcgaaagctcgctgaacgcctcaaggttcagcagcctgcgctttactggcatttccagaacaagcgcgcgctgcttgacgcactggccgaggcaatgctgacggaacgccacacccgctcgctacccgaagagaacgaagactggcggctatcatgtcagccacttccaagcccaagctctacaacccacgccaccccgaacgcacgctgctctaccaaacggtag

SEQ ID NO: 339197 - DNA, 1176 bp, Pseudomonas aeruginosa
gtgcgcagctctgccatcatcgccctgctgatcgtcagtctcgacgccatgggactcggcctcatcatgccggtccttccgacgcttctgcgcgagcttgtgccggcggagcaggtcgctggtcactatggtgccttgctgtcactctatgcgttgatgcaggtcatcttcgcgcccgtgcttggacaattttcagatgcttacggtcggcgtccgatgcttctggcttcccttgcgggagccgcagtcgattacacgattatggcatcagcgccggtcttatgggtgctctatatcggccggctcgtctccggcatcacgggcgcaaccggagctgtagctgcctcaaccattgcggattcgacgggggaaggttctcgcgcacgctggttcggctacatgggggcctgttatggggcaggcatgattgccgggccagcacttggtggtatgctcggtggtatttctgcccatgctccgtttatcgccgctgcccttctcaacggcttcgcgttcctgctagcctgcattttcctcagggagactcgtcgcggcgatggcgagaccggaaagtcggttcgcatcaaaccattcgttctgttccggctggatgatgcattgcgcgggctagtggcccttttcgcagttttcttcattattcaactgatcggccaggtccctgcggccctatgggtcatatatggcgaggatcgttttcagtggaacaccacgaccgttggcttgtcgctcgcggcgtttggagcaacacacgcgatttttcaggcgtttgttaccggccctctttcaagccggcttggagaacggcgcacgctactgtttggcatggctgcggatgcgactggcttcattcttctggcttttgccacgcagggatggatggtgttcccgattttgttgctgcttgccgccggaggtgttggcatgccggccttgcaggcaatgctttcaaataatgtcagcagtaacaagcaaggagctttacagggaacgcttacaagcctcaccaatctaagctctatcgcgggaccgcttggcttcacggcactctattctgccaccgtaggagcatggaacggttgggtttggattgtcggcgcgatcctctatttaatatgtctgccaatactacgcagacctttcgcaacttcattgtga

SEQ ID NO: 339198 - DNA, 861 bp, Pseudomonas aeruginosa
atgatgaccttagttcacactctcgctgtcgccgaatatctcaacttccgtcacgccgccaatgcgctcggcgttgcacagtccagcgtcagcgcccgcgtgaaggcactggaagaagacctcggcatcctcttgttcgagcgtcatgcacgcggcgttcggctgaccgaggccggacgccatttcgtcgagcggatagccgtaggtattgaccaactcgaccatgcggtgaaaaccgccggcatggcggcagccggagaaagcggccggcttcgtatcggtatccatgcccttattccgcatagcttcctcgcaaagctgatcggccaataccgcaaggatcaccccgatgttgaagtcgagatcgccgaaggcccggcccgtgaagcggtggtgcagcttcgcgccggcaggttggacgtggcgttcgtcgcgggcacgccccaaccacccgactgccattcccgtcgtacatggaccgaaccgctcttggcggtgctaccggaacggcatccgctcgccgagcggtcggccgttacatgggccgatctggcgggcgaggcgttccttgttcggcatggcggcactggcccgcaagttcatagccatatcgtgctgcgccatgccagactctggcccgcgccgtcgatcctgcgcttcgacgtggggcgcggcgcgctgctgtccatggtcggacagggcttcggtatcaccatcgtcagtgcggccacggcgctgttgccgtcaaccggcattgtcttcttgcccttcgccgacgagccggagccggtcgccacggataggcgttttaaccgcatgaggccaagtatcgcaccgcggaagcgccatcaagccggctga

SEQ ID NO: 339199 - DNA, 924 bp, Pseudomonas aeruginosa
atggcctacttcaccggaacagcgaacaacccgtcggatctgctgggcaagctccgcgcccacgctgaaaccctgggctgggtcaccgatcgtgcatcagcatcagagtggctctgccacaacgccgacggctactggtcattcaacgccggcaccaatcaatggctactcaccggaaatacagggttcgacaactccaaggcgtggaacgcgcagccgggcaattcagtacagaacactccttattcgtcgactgggccaaccgaggcccagctcagtgccgggccgtactcgcgctaccacctgtttggcacagcagcctacttgcacctgcatgtggagatcgctgccggacagttccggcctgtgttggtcggttcgctcaataagcgcagtgtgggatatgtaggcggtcagtatgtctgcggctcgttcatctatacccctggccaagcgctgacaaacaattggtcgtcacaccccttcgatggctaccacattcggtacagtggcggcggcagcgtgctgcggctggacagccttgacggcggcccttcgccggagtggctgccgttcgactacacaacgaacgtctcccggcgcgtcgtcggccccggtcgcggaaactacagcagtcagtaccatcccgacgtggggctgatcgacgcgagcgccaacgagctgaacagctcgaccaacgttgtgccgtgtgcaatttatgcgttcggcgctcagcagcgttcgaggtacatcggcgaagcgcctgatttcggtctgtgccggatggacttcctcgcgcctggggactcgatcacgatcggaaccgacacctggcgcgtcttccctttgctgcagcgcggaacagcaaacgatttcggcaacaccagcgcgctggtcgggtatgcattccgggtggtcgagtaa

SEQ ID NO: 339200 - DNA, 318 bp, Pseudomonas aeruginosa
atgaccccgctgctcctggacatcaacaagcgcggttgggcggcactacatgactggtccggtgctgtgcgccacgcgacgggcggaatagccagcattcccgcgcccgcaatgcctgctccgggcctttctgcatcgcgcctgcaggagcccgcaaagaacctcagcgcgacgctgaagaacaaccagaacttctacctggtcgacgaccccagccgcatcggtgatgtgatggcaggtcgttacggcgacgaggcaatggttctgcacatcagccgcgacccgcagaaattccgtcaactactgggaatcaactga

SEQ ID NO: 339201 - DNA, 1149 bp, Pseudomonas aeruginosa
atgactctttatatgggaccgaataccggcctgctgatcagtggcgcccccggtgaggggcattacaacgaactgatccgcatgttgcgctgggatgacttcctgcgccaaccggtcgtcaaggggcgcgtcgccacactgcccacaaccggccaggccgagggggacacgtacattttcactggcgccggctccaatcagaaccgcctagcgcgctggtgggcaacgggtgcgaccacgcccatttgggagtacatgccgcccaggttgggctggcgggtgcaggtggcgaacgagacgacgccgagcggccaggtcaagacgtatgagtattccggcagcgcctggactgagctggtgggcggaatggccgacgcgccgagcgatggaaagccatatgcccgcgaaaacggtgtttgggcggagctgggatcggcggcgaaatcggcgctcaacgttctgccgttcatgaacctgatgcccgacatgggtcgcttcgcgggaaccgcagccaatccgctgagtacgatgttcacaacgtcatggactccaagcaccttcatcaatggctggaacggcgccagcctcgcagatgggggaaagttcgcattcgacaacagcacaaatggtggggcagggccggcgctcaatgcgcgggtgcaagcactgctggctgcgatgggccgcacctggacatccgtttcaaggtacggggtcgagttcttcacgacagtgctgacagcggggacacagacaactaccggctcggccggcgcggatggggttacgcggtatctatgctgctcaaacggcagcaaaacagttttcaacgcgggcgcatgggcgactgtcgtcatgtggctgcgtgtcgaaagcggctcggctcatatctcctctgcgccctatacgacccatcgcctttggatcaatggggctgtggccgctccgggagttgtgttgccggcgggccagtgggtgcatctcaggttttcgatgcagtcgtataacggctatgacaacgcgtgcccgtatatctacgcggccgcaggggctcagatcgcgctcgcctgtccggcgtggttcggtggcctcgtcgatccgggtatccatgttgcacccatcctgacaatcaacggagcaagcgcatga

SEQ ID NO: 339202 - DNA, 1653 bp, Pseudomonas aeruginosa
atgatcgatcacggcctggagatcgtggcctacgcactgaaggtgcggcagacctatttgcttccgatcggcgcagcgccggagtcacagtcagcccaggctgaagcctggtcggccgccgcggcttatggtgccctggctcacgacataggcaagatcgtcgtcgacctgcaggtggagttgcaggacggcagcacctggcacccttggaacggaccgatcaaccagccctaccgcttcaagtacgtgaagtcccgcgaataccagctccacggcgctgcctcagcactcctcatccaccaactcctaccgcgcacggcactcgattggctcagtcgctttccagagctgtgggctcaattgatctacctgttcgctgggcagtacgagcacgccgggatcctcggcgagatcatcgtgaaggcagaccaggcctcagttgcacaggagctgggaggtaatccggatcgagcgctggctgcaccgaagcagtcgctgcagcggcagttggcagacggccttcgcttcctggtgaaggacaagttcaagctgaatcaacctggcggcccgtccgatggatggctgacccaggacgcactctggctggtgagcaagcctgcagccgatcaactgagagcctacttgctggcccagggtatcgagggggtgccctcctccaacgcgccgttcttcaacatgctccaggaccaagccgtcatccagacaaatgccgaggacaaggccatctggacggccacggtagacaacggtgctggatggagaaacaagttcacgctgctcaagattgctccagccttgatctggacagatgctgccgagcgcccctcaccctacagcggatcactggtcgttgaggatggaaccgcctcaacggaaaagccggaaacgacctgtgaaattcccaacgagccggctgaaaagcagcaagcaccagaaacgaagatgacgctccatcaacctgagccgagcgttgcgaaaccggcaaacgagacgcgggcgattgcgaaaccctcaactgatgatcaagaagaaacagacgatttgtatgcacttcttggtaatatcaattcgccactagaagagctagacactagccacgactcgccggctgcttctcctacgaacacacgcggggaggagaacctacagcagccactagggaccaaggagccaacagattgcgctcctgaagcaattgaagacgtatttatgcctagcagaagcactgatctgggacagggattcgttgactggatgaaatctggcatcacggcccgtcgtctgttcatcaacgacaccaaggctttggtgcataccgtcgacgggaccgccatgctggtcacgccaggaatcttcaagcgttatgtccaggagcatccggaggttgaaaagctggcccaggccaaggagaccgccggctggaagctggtgcagcgcgcgttcgagaaacagggtcttcaccgaaagaccagtaagaatctgaacatctggaccatcaaggtttctggtcctcgcaagacgaaggagctcaaggcttacctgctccaggatcccaaactgctgttccctgtgcagcctctggacaacccaagcctcacggtcatcaccgatgccgaaggaggtgtggaatga

SEQ ID NO: 339203 - DNA, 690 bp, Pseudomonas aeruginosa
gtgaggcacaagcccctccgttattggcactacgaactctttatgagttttctctgtctcgccgcggatgaggatcagttgattttcccagtcgatgtcgcgcttgcggatgcacaacagcgcattcaaccggattccggtgaagtagaagacctcaaacgtgcaaagccagaaccaggcgggagtgatgcgtgcgcgatcgccagtgcagcgctcggcgccgacctgcatgttgagccaattgcgggcgcgcaggatggcttcggctgcgacggttttgcttgctcgcctgggggggatgacggtggtctttctgaacgggttgacttgggagtgtgtcaccagctcgtgctcgatggcatagccccagatcgttcgcagatgattcgaatacgtgttccagctccgcttcgacaggccttgttccaggaccttgcgccgccatcccagcacagacctgtggtccacctcctgtacggttgccgtagggccgaagtgcttgagcagcgccttggtcgcggcgcggtagatcttcgcgctggcttctcggagatcgtgcgcgaagatgtactcctcggtgagctgctgcggcgtcattccacacctccttcggcatcggtgatgaccgtgaggcttgggttgtccagaggctgcacagggaacagcagtttgggatcctggagcaggtaa

SEQ ID NO: 339204 - DNA, 351 bp, Pseudomonas aeruginosa; identical to SEQ ID NO: 323952

SEQ ID NO: 339205 - DNA, 420 bp, Pseudomonas aeruginosa
gtgatccccagcgtggcctacaccgaccccgaagtggcttgggtgggcctcaccgaagaccaggccaaggcccagggcgtcaaggtcaagaaaggcctgttcccctgggccgcctccggccgtgccattgccaacgggcgcgacgaaggcttcaccaagctgctgttcgacgacagccccgaagcaggatcaggagacggccatgctggccggggccacggcaagatcttgggcggtggcatggtcggcacccacgcgggcgacatgatcggcgagatcgccctggccatcgagatgggtgcggacgctgtcgacatcggcaagaccatccacccgcatccaacccttggcgaatccattggcatggcggcggaagtggcgcatggcagctgcacggatgtgccgactgcgcgcaagtaa

SEQ ID NO: 339206 - DNA, 1002 bp, Pseudomonas aeruginosa
atggaaacccagatgctaacgccaactcctggaggggactacccccgcacctggaacgaatttcttgactggtttgccaccgaagaggcttgccaggcgttcctggagaagcttcggtggccccaaggcttcgtctgcccgcgttgcggcaacgctggcgatgtgtaccgcgccagccgcacccgcctgatgtgccgctcatgccagtaccaaggcacagtgacatctggaaccatctttgacaagacgcgcacaccgctgcgtgtctggctggctgcagcttggtacctgaccaatcagaaacaaggcgtgagcgccctggggctgcagcgcgtattgggtttggggagctaccagaccgcctggaccatgctgcaccggtttcgacgtgccatggtccgcccgggccgggacaagctcaaggggcttgtggaggtggatgaaacgtacctgtccatcacggatcgcaagaatcccgccacccctgcagggcgcaagagcagcaccaccaaagtgttgatggtcatggcggtggagatcgtggagcccaaggggtttgggcgcatccggttacgccgcattgaccgagacgccgccacccacgtaatcccctttgtgcaggaggtggtcgagcctggagcccaggtacgcacggatggttcggcggcatatcgcgctctgggagaactgggttacacccaccagcgcaccgtcatgctcggctcaggcgtacctgcccatgtctccatggcgggagtgcaccgggtcgcctcactggtacagcgctgggtgctgggaacacatcatggctctgtacagccagaccacctggacgcctatctcgatgaattcgtgttccgtttcaaccggcgcacatccagctcacgcgggatgctgttttaccgcttgctgcagcaagcggtggttacgccgccagtgacgtatggggatgtcgtgagcaagaacaccggggagagccaatcggataccattgctggatga

SEQ ID NO: 339207 - DNA, 351 bp, Pseudomonas aeruginosa
atgccccagtcactcaccaccgccccggagcgcgcgcaactgctcgccaacggcgcggcccgtgccgctggccgggccatcgacccggtgcccgtggtgcgcctgttcacgccggacgcgcacgtgacctggctgctggccgcgctcgaccccgtcgatggcgataccgcctggggcctcatcgacctggggatcgggatgccggcgcaaggcaccttcaagctgtccgagctggccggcatcgtcgggccacgcaagcagcccgtgatgcgcgatctctatttccagcccacgcgcacactgtcggaatacacctgcttggccgagcaagacggggctatcccggactga

SEQ ID NO: 339208 - DNA, 762 bp, Pseudomonas aeruginosa
atggtcgatccccatcacgtcgcgcattggtatccgactgccgcttacctgtacgtcctttggctggatacgctcgcgctcgcctgggagtacctgcgcaggcatcccgactaccggcttgactggctgcgccgtcatcgccggcctgaagcagcgcatcgctggggcttgcgcctgctggaagaccctgccttggatgcgcgtgacgcgcatcccgcttggctgcctggtcatgcggccgtggtgcagctctatcccgatgccgacccgccgcaggatgccgccaccttcgcgttctggtgcatccccggccacaagcaacttctccacgacggcaaggggctggcgctgatcgcgcgcagcccaggccattgcctgcgcttcgcgttggcgtccgccctggaagacggcatggccgtggcctatgcccatcgcggcggcgctgccgcgaatgcgcgtcgccatacgcacggcccagccttggccgacgccaagcccaggccaacacctgccgcgctgctggagctgcacaccttgcaggcgctcgacgcgaccctggcgggcgcatccttgcgcgatgtcggcgaagggctgttcggtgccgaggccgtggccgattggtacagcgatggcggcctgcgctccaaggtgcgccgcctggtgcggcgcggcgatgcgctgatgcgcggcggctatcgccgattagcacagcttccgccgcttgagaagggtcgttttgatgcggacgcaaaacggccctga

SEQ ID NO: 339209 - DNA, 282 bp, Pseudomonas aeruginosa
atgcgtcccgctcctttgcggcctgccgccactgtctcgaccgctgccgcgcaacctcaacgctatctcaccaacgacgaagccgccgagtacctacgcctatcgccgcgcacgctggaaaagcagcgcgtgattggcggtggcccgcgctttcgcaagttcggccgccgtgtcatgtacgccgtggccgacctcgatgcctgggctgccgaccgcagcttcgagacgacctccgatcccgaatacgccgagcaccacttggccgacagccgtgcgcgctga

SEQ ID NO: 339210 - DNA, 210 bp, Pseudomonas aeruginosa; identical to SEQ ID NO: 323948

SEQ ID NO: 339211 - DNA, 750 bp, Pseudomonas aeruginosa
atgtctgcatctacctattttgtttccgaggccgccgtccgcaatctcaaacagcgggcggagcgccgcgtgagcggcgtccgttccgcgcatatgagcgaggtcgtagccgccgcgctcgggttcagaacccatgcggcgctgcgcgccgcactcggcggtcgcgccactgccgaggctagcaaaccgagcaatgcacgcgcgatccagcggttgcggcagttgggctacaacgcaccagatgacctgcatttgctaccagagctggaccgttcctactcgccgttcaagacctatccgctgcgcaagcagcgcggcgtgcgctggaacgcatggcgcaacctgatggtcgcggcgatcaacgccggcttggaacagcgcctgttcgggttgtccccgggcgaggactggtgggccggcgccgacccgacgaacggaggcggcgtgcgcgggttgtaccgcttcaccttcgacggcctgccggcaactgcggctgtcgccgcgattagcggcgacgagttggcgatccacgtactgcttgacccgcgcaatgagcaggtcgaagccgacttcaacgacggcctggatgacggcgcggcgtgcgcgcacggctggctggaacgtcggctcggcgcttggatacaggatggcggagaggaattctcgtgcaagcgtgctgtgcaggcgcgagtggccgcggtggtgattgagccgcacggttacgccgaccaaggcagcttcatcctgtag

SEQ ID NO: 339212 - DNA, 210 bp, Pseudomonas aeruginosa
atgacccgcaccacaaacagccgcccgcgcatggcggcgacctatgcccccggcacggtacgcgctcgccgctggcatggtgaaggcgacgtgcgcggctatcgcccgccctcgggctggatggcctgcgccgacctcaccgacattcatcccatcacgggccgcgccttgccgcgtgccgtgtggtggctcatcgagacgaaggaatag

SEQ ID NO: 339213 - DNA, 465 bp, Pseudomonas aeruginosa
atgagccactaccgcctcaacctgttcatccagccggagcacgccaagcggctcgatgagctggccgccaagaaaggcgtgtccaagtcatccatcgtcgcggcggcgcttgcatcgtggctgtcgcccgatgccgccgaccagcgcgaggcagccatcgccaagcggctggatcgcctctcgcgccaggccgagcgcatggagcgcgaccagaacatccagatcgagacgctggcgctgttcattcgctactacctcacggtcagcacgccagtccccgaagcgcaccaagaggccgctcgcgcacagggcaaagcgcgcttcgagcagttcgttgaacagttgggtcgccacctgctgcgcgggcgaagcctggtgcgcgacgtggtggaggagctgcatcccgacccgatgcggatggaggacgcggcggcagccgcgcaagcgcaggagcgtgtgtcatga

SEQ ID NO: 339214 - DNA, 879 bp, Pseudomonas aeruginosa
atgccgccgggatggccggtgccccacaccttgatgagatccagcgcctcggcgccgcgcacttcgccgacgacgacgcgatcaggccgcaggcgcatggacgagcgcaccagctcggtcatcgacaccacgcctgcgcgggtgcgcaggggaacgtggtcacgggccgcgcattgcagctccaccgtgtcttcgagcaccagcacgcggtcgccggtggcggcgatttcggcgagcaaagcattggcgagcgtggtcttgccgctgctggtggcgccggcgatcagcacgttctgccgctcgcgcacggcgcgaacgaggaagccagcttgcgcgctggtcatcattccgtcgatgacgtaccgctccagcggaattacgccgatagcacgcttgcgcagcgcgaaggccggccccggcgctgccggcggcaagatgccctcgaagcgttcgcccgtttcgggcaactcggcggacagcagcggctggccgcgatggacttctgcaccgacgtgggccgcgaccaggcggatgattcgctcaccgtccgcctcgggcagttccacgcccatcggcgcgcgcccgctggaaagccgatccacccaaagggtgcgatcaggattcagcatcacctccaccacgtcagggtcttcgagcgcggcggcgatcagcggccccatcgccgtgcgcagcatctggatgcggcggtcgagcgacgtggcactcatggactgcggaacggcgctcatgacgcacgctcctgcgcttgcgccgctgccgccgcgtcttccatccgcatcgggtcgggatgcagttcctccaccacgtcgcgcaccaggctgcggccccgcagcaggtggcggccaagctgctcggtga

SEQ ID NO: 339215 - DNA, 324 bp, Pseudomonas aeruginosa
atgttctccgccgcacacttgaggatgtgcgagccgaccggggtggaaccggtgaaggcgatcttggcgatgcgcttgctggtggccagggcctcgccggcctccctgccgaagccctggacgacattgagcacgcccggcggcagcaggtcgccgatgagttccagcagcacgcagatgcccagcggggtctgctcggccggcttgagcaccacgcagttgccggcggccagcgccggggccagcttccaggcggccatcagcagtgggaagttccacgggatgatctgcccgaccacgcccaagggctcatggatgtggtag

SEQ ID NO: 339216 - DNA, 705 bp, Pseudomonas aeruginosa
atgcgattcaagaaaccgcaggtgcgctacgccgacacgtcgcagcctgccacgccgtaccaagctgccagtcaggtgtgggacgagcgtatcggctcgccgcgcgtgcaggcgaagaactggcgcctgatggccttcggctgcctgacgcttgcgctgctgatggccggcggcctggtgtggcgctcggcgcaatccatcgtgacgccctacgtcgtggaggtggacagcgcgggccaggtacgcgccgtgggcgaagccgccacgccataccggcccaacgatgcgcagaccgcgcaccacatcgcgcgcttcgtgacgctggtgcgctcgctgtccatcgaccccatcgtcgtccgccagaactggctggacgcctacgactacacgaccgacaagggcgcggccgtgctcaacgactacgcacgggtcaacgacccgttcgcgcgcatcggcaaggagtcggtcacggtgcagatcaccagcgtcgtgcgcgccagcgacacgtctttcaacgtgcgctggacggaacgccgatacgtcaacggcgccgcggcgggcttggagcggtggacggccgtggtgtccatcgtgctccagccgccgcgcaccgaagaacgcctgcgcaagaaccccctgggcatctacgtcaacggcctgtcgtggagccgcgaactggattcttccgaaggagccaagccatga

SEQ ID NO: 339217 - DNA, 657 bp, Pseudomonas aeruginosa
atgctggcctcgctcaccttgctggcgctcgggatcttcggccccggcatcgccacgggcctcgtctccggtgcgccgcagctcggcgcgggtgcgatggctggtgctgccgtcggtgccgctggcgcggccgttgccgtcggtgctgccgcgacgggcgtaggtggcgcagtcatggccggggcgcgcatggcgcctgccgccgccaagcttgccggcagcggcgcgcgtgccgccgcctcgacggccagcagtgcgaagtcggcgtttcaggccggttccgccgccgctggcggcggcgcaaagggcgcgatggcgggcctgggcaacgtcaccaagaccggcgcgcaggcagccgggcgaggcgctgcatcccgcgcttccgctgccgggcaacgcatggccgctcccttccgcgctggctggaatggcgctgctgccgatggcggcgcgggtgcggcatccggtcagggtgccgcaggcgaggccgcatccggcgccgctacggcgcagacacaggaacagcccgcttgggccaagcgcctgcatcgccgccagcaactcacccacgccgcgaccaccaccgcccacgcgctgcgcggtggcgatggcggcggctccggccaggggccgagcctgcgcgattccgattcataa

SEQ ID NO: 339218 - DNA, 825 bp, Pseudomonas aeruginosa
atgacctcccccgccgactccttcgtgacccgcgcctcgctcgccgctgatctcgccgcgcttggccttgccgcgggcgatgcggtcatggtccatgccgccgtcagcaaggtcggccgcctgctcgacggtcccgacacgatcatcgccgctctgtccgacgccgtcggccctgccggcaccatcctcgcctatgccgattgggaagcgcgctacgaggacctcgtggacgaggacggccgcgtgccgcaggaatggcgcgagcacatcccacccttcgatccgcggcgctcacgcgcgatccgcgacaatggcgtgcttccggaattcctgcggacgacaccgggtgcgttgcgcagcggcaatcccggcgcctcgatggtcgggctcggcgccagagcggaatggttcaccgcagaccatcccctcgactacggctatggcgagggttcgccgctggccaggctggtcgaagccggcggcaaggtgctgatgctcggggcgccgctcgacacgctgaccctgctgcaccatgccgagcatctggccgacatccccggcaagcgcatccggcggatcgaggtgccgctggcgacgccgaccggcacgcaatggcgcatgatcgaggaattcgataccggcgatccgatcgtcgaaggtttggccgaggactacttcgccgagatcgtgacggcgttccttgccggcggccgaggacggcagggcttgatcggcaccgcgccatccgtgctggtcgatgctgccgcaatcacggctttcggcgtcgcctggctggaatcgcgcttcggctcgccctcatcctga

SEQ ID NO: 339219 - DNA, 201 bp, Pseudomonas aeruginosa
atgccgttcatgctgccgctcgacgaggctgcgacacgggtggtcgacggcttctcccgcggcggcttcgagatcgtcttcccgcgccggctcgcctggctgatgaaagggatgcggctgctgccctatccggcctatttctggatggtgcgcaggctggccggggagcatcgtggcggacgccgcgatggggcggtgtag

SEQ ID NO: 339220 - DNA, 639 bp, Pseudomonas aeruginosa
atgatcgtcgctctgctcaaccagaaaggcggcgtgggcaagaccacgctcgccacgcacatcgccggcgagctggcgatgcgcggccagcacgtcgtgctgctggacgccgacccgcagggttcatcgctggactggacgcagcgcagaagccagcagggtttgccaaggttgttcagcgccgtgggcctggcacgcgaaacgctgcatcaggaagcaccagaactcgccaggcgggccgatcacgtcgtcatcgacggcccgccacgcatcgcggcactggcgcgctccgcgctgctggcggccgagcgcgtgctgatccccgtgcaacccagcccctacgacctgtgggccagcgccgagatggtggcgctgatccgcgaagcgcaggtgtttcggcctgcgctgcgtgcggccttcatcatcaatcggcgcatcagtaccaccgtcatcgggcgcgaagcgcgccaggcgctggccgaccaaccgcttcctgcgctgcgcgcggaagtgcatcaacgcatcgtgttcgccgacagcgtggccgctggccggcttgcacgcgagacggcgccggacagcgccgccgcgcgtgaaatcaccgccttggtggacgaactgctgcggtggccgacatga

SEQ ID NO: 339221 - DNA, 351 bp, Pseudomonas aeruginosa; identical to SEQ ID NO: 335185

SEQ ID NO: 339222 - DNA, 231 bp, Pseudomonas aeruginosa
atgtgggtgcaaatcgcgattctggtcgcgtcgtatttgatcagcagcgctacttctgcgaaagcgccgaagccgaaaccggaggcgctgacttccgaagatctgcctcagaccgaagacggcactggccactacgtgatcttcggcgatgtgtggatcgaggactggatcgtcctcggtaccggtaacgagcggatgaaggcagtcaaatcgaaagggtcgaagaagtga

SEQ ID NO: 339223 - DNA, 519 bp, Pseudomonas aeruginosa
atgacactccagctccgacacgaaaccccggacgacattgctgccatcgaggcggtcacggtttccgcctttgccgatgcgccgcataccagccacaccgagcaattcatcgtgcgggccttgcgcgctgcgaacgaactgacgctttccatcgtggccgaagaacacgggcaggttgtaggccacgtcgcgctgtcgccggtgaagatcaccgatgacaacgggcgaaaggccgaaggctggcacggtttggggcctctctccgtcctgccgcaaaggcaggggcatggcatcggctcgcgcctgatggaacaggcgctgtccgaactgcgaactatgcgggccccaggctgcgtgctgctgggagatcccgcgtactacgcgcgctttggttttcaggcccacgcgagcctgcaactgccgggcgtaccgcccggctatttcatggcgctggccctgcatgggccagtaccggaaggtatcgcgcactatagcgatgccttcaccgccgccgcctga

SEQ ID NO: 339224 - DNA, 1035 bp, Pseudomonas aeruginosa
atgggcaacacccgcaacggtttcagcaagaagaaactcaagggcgagttcggtgaactgcccatcgaggtaccgcgcgaccggcatggcaccttcgatccgcagatcatcgagaagcaccagacccgctggacgggcttcgacgacaagatcctttcgctgtatgcccgcggcatgacggtgcgcgagatccaggcgcacttgcaggaaatgtacggtgccgaggtgtcacccagcctgatctcctcggtgaccgacgcggtggccgatgaggtcaaggcctggcagtcgcgcccgctcgatacggtgtatcccatcgtctacctcgactgcatccacagcaaggtgcgcgagggcgccgtgcgggtgaaggcggtctatctggcgctgggtatcaacctggccggcgagaaggaaatcctcggcctgtggatcgcccagaacgagggcgccaagttctggttgcaggtggtgaccgaactgcgcaaccgtggcgttcaggacatcttcgtcgcctgcgtggatggcttgaagggcttccccgaggccatcgaggcggtgttcccgcgcaccagcgtgcagctgtgcatcgtgcacatggtcaggcacagcctgaactacgtgtcctggaagcggcgggcggaggtcgccgccgacctgaagcggatttaccagtccagcaccgctgacgaggccgaactgcgcctcggtgaattcgaggccaagtgggatgacgactacctgccgattggccagtcctggcgacgcaactgggccaggatcacgccgttcttcgacttcccgccggagatccgaaaggtgatctacaccaccaacgccatcgaatcggtgaacatgagcctgcgcaagattaccaagaaccgcggctcgttccccagtgacgaggcgctgctgaaactcttctacctggcgctacgcaacatcagcaagaaatggacgatgccgatccgtgactggaaggcggcgctgactcgctttacgatcagctacgaagaccgcctgccgcagcagtaa

SEQ ID NO: 339225 - DNA, 339 bp, Pseudomonas aeruginosa
atggcgggcctgggcaacgtcgccaagaccggcgcgcagtccgccggacgcgccgcagcatcccgtgcttccgctgccgggcagcggatggccgctccgttccgtgctggctggaatggctcgacggccgacgctggcgcgtcaaccggccaagcctccgcaggagaggcctccgcaggcggcgccgctgcacagaagccggaacaacccgcctgggccaagcggctgcatcgccgccagcaactcacccacgccgcgaccaccgccgcgcacacgctgcgcggtggcgacggtggcggctcggggcaaggcccgagcctgcgcggctccgacgactaa

SEQ ID NO: 339226 - DNA, 774 bp, Pseudomonas aeruginosa
atgctggggtacaaacacagcggtttctcggtggatgccggggtgtgcattgaatcccacgaccgtccaggccttgagcggctcttgcgctattgcgcccgcccaccctttgcgatggacaggctgcgcaaagagggaagcaaactggtgtaccgctgcggcaagcagcgcagcgaacccaccagcgacaagcgcggtgccaaggttgatgagctgcacctcacaccgctggagctgatcgaccgcattgccgcgctggttcccccgccacgcacccaccggcaccgctattttggcgtgttggcacccaactcgccgctcagggctgcggtgacggcgctggcgacaccggcgcaagccgctcccgtgctgggcgcgtcgatcagcacgggggagtgcgcgcctggtgtggtaccgatgagcagcgcgctgccatcccagagcgagccggtgctgcccaagcgtgcagcgcactacctgtgggcggtgctgatcgcccgcatctacgaggtgttccccctcttgtgtccgctgtgtggcgggcatatgcgcatcatcgcgttcattacgcacagcgctgacatccggcacatcctggaccacatcggggcagattcagagccaccccgcatctccccggcgcgcgggccaccgctgtgggatgactgtagtgatgcgcagatggatgacggggcgcaaaccgagccagcagactgggacctagcggcgcaaccggcaccggactttgaggtcgatcagcgcatcagttggtga

SEQ ID NO: 339227 - DNA, 735 bp, Pseudomonas aeruginosa
ttgagctggacgcacttcatcgccctgatcccgctgaaagacccgctccagcgggactattacgcgcagatggcgagcgtcgaacgctggagcgtgcggacgctgcgcgagcgcatcgactcgatgctgtacgagcgcacggcactgtcccaaaagccgggcgagacgatcgcacaggagttggcgacgatgcgcgatgcgcagcgcatgtcgcccgccctggtcatgcgcgacccgtacatcctcgacttcctggggctgcgggacacttggcaggaaggcgacctggaagcggcgatcatccgggaaatggaatccttcctgctggagctgggcgcgggtttcagcttcgtggcccggcagaagcgcatccaaattgacggcgaggatttccacctcgacctgctgttttacaaccgcaagctgcgccggctcgtggcagtggagttgaaggtcggcgagttcaaggcggctttcaagggacagatggagctttaccttcgctggctggacaagcacgaacgggagccggaggaagcctcgccgctggggatcatcctttgcaccggcaagaagcgcgagcagatcgaattgctggagctggacaagtcgggcatccacgtcgccgagtacctgaccgccttgccgccgaggggcgtgctggtggagcgactgcaacaggcaacgcagcgggcacagttgcagatcgagcagcgcaaaatcgacaacgagtag

SEQ ID NO: 339228 - DNA, 159 bp, Pseudomonas aeruginosa
atggaacttacgcctgcgcaattcgcgcgtatcgaggattgcctgccgcggcagcggggcaatgtgtcgctggacaaccttcaagtgctcaacgcgatcctgttcgtggccgaaaatggctgcaagtggcgggccctgcccaagcggttcggcaactag

SEQ ID NO: 339229 - DNA, 255 bp, Pseudomonas aeruginosa
atggatcgcgcctacgagggcaatgaaacccggcagctcgcgctggatctgggcctggatccggtcgtgcccccgcatccgctgcgggcccagccatgggcgtacaacaccgagatctacaagcgccgcaacgaaatcgagcgcctgttccgccgtctgaaagggttccgccgcatcttcagccgcttcgacaagctcgacgtcatgttcgcggccttcatccacttcgcactgatcgtcgaatcgttgcgatag

SEQ ID NO: 339230 - DNA, 504 bp, Pseudomonas aeruginosa
gtgaagggtgacacctacaaggacaaggtccgcaagaccgaattcaccgaggacgacgacggcaacatcaccgaggtgaggatcctcaccgaccgtttcatcccgatcatccgggcatgggaaatgacaccctcctcggtcaaccagggccgcgtgctgaccatcagctcctcggccgcgaccacggaagaagctgaagagccccaacctgagccggcctctgcaccgctgctgttcagccctggccaggtcgtgatgaccgcagccgtgagccacctggtggaaaccggtcaactcaacccagcgcctttgctgaatcgccatctggcgggagactgggggacgctggaccaggaagactggaacaccaaccagagagccctgaagttcggcgatcggctgctgtcgtcctacgacatcgacgccggcgacgaatccaggctctggatcatcactgaggcagaccgcagctcaaccacgcttttgctccctagcgattactga

SEQ ID NO: 339231 - DNA, 546 bp, Pseudomonas aeruginosa
atgagcgcacagattccttccaacaaatccagtcgcgccagttacaagaactttcatcgtttattcctctggactggcactctcgccacgctgaatagcacgaatgaaatccaacttcagcaacagctttttcattccttcgatatccagacgtttggtattatgagaattatagtcctctgtatgagtaattttttcctcgccttgctccacaaacttactatagttcagatcacgcaaatctggggggatacgataatagtcacccatgtcttcagcacaggccatttcctctcgactaagaagcgcctcataaagcttctctccatgacgcgtacctattacattgataggataaccattcttgccaagcaattgagtaagcgcatgagccagcacctcgatggttgcagccggtgctttctgtacaaaaagatctccattggtaccatgctcgaaaccataaagcacaaggtctacggcatccgtaagcgtcatcatgaaacgtgtcatgtttggatcagtgattgtgagaggctggcctga

SEQ ID NO: 339232 - DNA, 531 bp, Pseudomonas aeruginosa
atggccccggactggccggaatcgcccgccgccgtggcgctgcgcgaactgcaacaggtggcaggtgttgccttgccggaggacagcgccgaactgttcgccgcgctgctggcgaagtcgcaagacgaactggtgcggctgcttgccgtgtgcgtggcttccacggtggacgtggtgacgcctcgcgccacgccgcaccggcccggcgaggaactggcgcaggccgtgggcctcgacatggccgcatggtggcaaccgaccacagaaggctacttcaagcacgttccgaaggccgcgatcctgcaagccgtgggcgagtacgcgcccgagcacgtcactaggctggcgaagttgaagaaggccgacattgccagcgaagccgaacggctggcggatggcacgggctggatgcccgccatcttcaagaccgaaacgccggaagccacgcaggaagaaccgcaggagcaggacgacgccccgcaggaagccgaggcaatggcggatgaacccgccgaggcgctggccgcttga

SEQ ID NO: 339233 - DNA, 207 bp, Pseudomonas aeruginosa
atgggtcggaatccagatcgctttctgtcggccgcgcagggcgtacagcaggctgcgcagcgccgcgtgctcctctcggccctcggtctgccagcggaagccatgcaccgggaaaccgaccccagcttggtcggcgaattgcggcaggccagtttcgttgtccaggacatcgagcaggcgctgatacgacagggacaagtcttctga

SEQ ID NO: 339234 - DNA, 1185 bp, Pseudomonas aeruginosa
atgcgtgaagtggtgatcgtcgacagcgtccggaccggcctggccaagtccttccgcggcaagttcaacctgacccggccggacgacatggccgcccactgcgtcgacgcgctgctggcgcgcaacgacctcgacccgctgctggtggatgactgcatcgttggcgccggctccaacgaaggcgcccagggccacaacatcgggcgcaacgtggcggtgctctccggcctcggcatccaggtgccggggatgaccctcaaccgctactgttcctccggcctgcaggcgatcgccatcgccgccaaccagatcgcttccggttgcagcgaggtgatcgtcgccggcggcgtcgagtcgatcaccctgaccctgaagagcgtcaacaccgaccacctggtgaacccgctgctgcaaagggaggtgccgggcatctactaccccatggggcagaccgccgagatcgtcgcccgtcgctacggcatcacccgcgaggcccaggacgcctacgccctgcagagccagcagcggatggcgcgagcccaggcggacgggctgttcgccgacgagatcgtgccgatgaccacccgctacgcggtggaggacaaggccagcggcgagaagcaggtgctcgacggagtggtcgaccgcgacgactgcaaccgcccggacaccaccctcgaaggcctggcctcgctgaagccggcgttcgccgaggacggttcggtcaccgccggcaacgcctcgcaactctccgacggcgcctcgatgaccctgctgatgagcctggagaaagcgctggcgctgggcctggagccgaaggccttcttccgtggcttcaccgtggccggctgcgagccggacgaaatgggtatcggtccggtgttctcggtgccgaagctgctcaaggcgaaggggctgaagatcgccgacgtcgatctctgggaactcaacgaagccttcgcctcgcagtgcctgtactgccgcgaccggctggagatcgacaacgagaagtacaacgtcaatggcggctccatcgccatcggccacccgttcggcatgaccggctcgcgccagatcggtcatctggtccgcgaactgcgccggcgcaacctgcgctacggcgtggtgaccatgtgcgtcggcggcggcatgggcgccagcgggctgttcgaagccgtacgctga

SEQ ID NO: 339235 - DNA, 666 bp, Pseudomonas aeruginosa
atgatcggcgtggaagcgctgctgcgctgggagcatccgcaacacgggctgatcacccccggccagttcctgccgctggcggaaaagaccggcctgatcgtgcagatcggcgagtgggtgctcgacgaagcctgtcggcagatgcgcctctggctggacggcggacatgcggactggaacatcgcggtgaacctttcggccctgcagttcgcccatgccggcctggtcgactcggtacgcaacgcactcctgcgccacagcctggagcccagccacctgatcctcgaggtgaccgaatcgaccgccatgcgcgatgccgatgccagcctggtgatcctcgagcagttgtcggcgatgggcgtcggcatctccatcgacgacttcggcaccggctactccagcctgctgtatctcaaacgcctgccggcgagcgaactgaagatcgaccgtggcttcatcaacgagctggcccacgacagcgacgacgccgcgatcgtctcggcgatcgtcgccctcggccgcacgctgaacctgaagatcgtcgccgagggcgtggaaaccgaggcccagcaggagttcctgacccgcctcggctgcaattcgctgcaaggcttcctgctcggcaggccgatgccggccgagcagttgctcgccagcgtcgcctga

SEQ ID NO: 339236 - DNA, 630 bp, Pseudomonas aeruginosa
atggccgttcgcttcgatcatttgctcggcgtaatcagtggtcagcgtttccttgaaatgagagggctgaacaacgatctgcccttttacatctgcgagttcaaggctgctgaagcggtggagatggagcgtgtacgccggcagctggtaacgcggctggcgaacatgagcattccctgtctccagggacgaggtatccaggctttggaaatcaacctgtatgacttgtctattgagctgctcaaggctcgagagggcagcagtgaggacggcaacctctgggacgaccttcttgccattgaacaggaggtagagaaagaacagctgttggagactctgcagaacgtcttgggcatcgaggagtatctgatccccgctatcggtgagcgactagcggctgctgagtacgacgttttattcctctccggcatcggtgaggtgttcccctacatccgttcacacaacgtgctgaacaacctgcaaagcactgccaagttcaagcctacggttatgttcttccctggtgagtaccggtactcgctggagcagggggcttctctggagctgtttggcttgctgcatgacgacaagtactaccgcgcattcaacatttttgagactcaggcctga

SEQ ID NO: 339237 - DNA, 429 bp, Pseudomonas aeruginosa
atggacgccttcgaaggagccattggcgtttccgagtcagacgggaaatgtacgccggagtatgtagtttgcgactcgctttcaagaaattacttgcccgaatactttgcgtatctgctcagagaaatggcactagccagatatattcaggtgatctgcaatgcggttcgccagcgagcggtccgcatccgcttcaataatctggcttcccgtttcatggtggtcccgccgattgaggagcaaagggctatagtcgcgttcatcatgagcgaaacagaaaagcaggacgctgccgtggcgctgctggaacagcaaatcagcaaactcaaggaatacaaagccatcctgatcaacagcgccgtcaccggcaagatcaaggtaccgggcgtggtggagccctgcgatgaggctggacgggagagcgcctga

SEQ ID NO: 339238 - DNA, 951 bp, Pseudomonas aeruginosa
gtgcataccctgtcttccgcacacaacagcttcgaagcctggaaccaggcgttgcgccaggtctgcgggcgcttcgaatcgcagcccgcgctgaaccggacgctgttcatcggcgatatctcgcggcaggacctcggcggcctggagctggcgcagatccgcaccaacgccgggcgcatcgcccgccaggccacccatgccgatcatgacgacgaccgtcactgcttcctggtcgtccagcgcagcggccatgcgcaactgcgccagggtggggacagcatagagctggcgccaggggaaatggcgctgatggactccgcgggcggctgcgagatcattccccacggactcatcgaacacacctcgttccatctctcccgcgaagaggtatgccggcacctgccacccagccagcgggccttcggcaaactctcgccgaactgcgccagcggtcgcctgctgagcctgctggtgcagcaggtgtgcgccggagaactgcagccgtgggcggtggcggacgagggcggggcgttgcaggaggcgctgatcgccctgctcgggccggcgctacagcacgccggcgaggaattggagggaccgctggccgggctctatggctacagtctgcgccggcacgcggagcgtctgatcgagcaatccctgcaggagccgcgcctgagtccggacatgctcgccggccgcctgcgcatctcggtgcgccagttgtaccggttgttcgaggagcagggcgacagcgtctgccgctacattctccgccagcgcctcagccgcagcgccgccgacctcggcaacccacggctgcgcggcgaatcgatcacctccatcgccttcaagtggggtttcagcgactcggcgcatttcagccgggcgttcaagaagcagttcgaggtttcgcccaaggactatcgggccggcgcgctaccggcctga

SEQ ID NO: 339239 - DNA, 1491 bp, Pseudomonas aeruginosa
atgtccaactccagactcacccagcacctgctccgcgggcgggttggtttccccaccgccctggccagttcggtcgggttgatcatggccagcccggtgatcctcaccgccaccaccggcttcggcctgggcggcggaaccttcgccgtggcgatgctggtggcgctgctgctgatgctggcgcagtccaccaccttcgccgaggccgcctgcctgctgccgacccgtggctcggtctacgactacctgtcgtgcggcctcgggcgcttcttcgcgatcaccggcacgctgtcggcctacctgatcgtccatgtgttcgccggcaccgccgagaccatgctcagcggcaccatggcgctggtcaacttcgagtcgctgaataccctcaccgagccgggcggcagcgcctggctggtgggcgtcggcatggtgctctgcttcggcctgctgaatgcgctggggatcaccgccttcggtcgcgccgaagtgatcctcaccttcggcatgtggagcaccctgatgatcttcgccgtggccggcctgttgcgcctgcccgcggtggagttgcagggctggttcggggcctcgatggtcggcgacgacctgccgaccctgctgtcgctggtgggcatggcgatgttcatgttcgtcggttgcgaattcgtcacgccgctggcgccggaggtgcgccacgcttcgcggaccctgccgcgggcgatggccctggggttgatcggggtggcctgctgcatgttcctctatggcgcggcgatgcgccggcaggtggaaaacctcgacctcggcggcggcctgcacctgctggagacgccgatggcgatcccgcgattcgccgagcaggtgatgggaccgttcggacgcatctggctgggcgtgggcctgctgttcgccggggccgccaccatcaacaccctgatggccggcctgccgcggattctctacgggatggcgctggatggcgccttgccgaaggccttcacctacctgcacccgcgcttcaagacaccgttgctgtgcatcgccgtggcagcggcgattccctgcctgcacgcctggtggctgggcggcgacagcgaagggatcatccacctggtcctggcggcggtctgcgcctggggcaccgcctacctgctggtgaccctctccgtggtgctgctgcgcatccgtcgcccggacctgccgcgcgcctaccgctcgcccctgttcccgttgccgcagctattctccagcgccggaatcctgctggggatgttctacatcacgccgccggggatgaaccccgccgacatctacctgccgttcgccctgatgctcggcctggcggccgcctacgccctgttctggaccctgtgcgtacagcgggtgaatccgttccgtccgctggcggtggaagaggtgctggagaaggaattcgccgaagaggaccagcagcagcgggagaaggcgcatgtccgcctgggcgcgctggtatga

SEQ ID NO: 339240 - DNA, 1218 bp, Pseudomonas aeruginosa
atggcggacaaagcgttaaagaccagtgtcttcgtatgggaaggcactgacaagaaaggcaccaaggtcaagggcgagctgtccagccagaacccgaccctggtcaaggcgcaactgcgcaagcagggcatcacgccggtcaaggtccgcaagaaaggcatctccctgctgggggcggggaagaagatcaagcctatggacatcgccctgttcacccgccagatgtccaccatgatggccgccggcgtgccgctgctgcagtcgttcgacatcatcagcgaaggcttcgacaatccgaacatgcgcaagctggtggaggagatcaagcaggaagtcgccggcggcaacagcctggccaactcgctgcgcaagaagccgcagtacttcgactcgctctactgcaacctggtggacgccggcgaacaatccggcgccctggaaaccctgctcgaccgggtcgccacctacaaggaaaagaccgaggcgctgaaggccaagatcaagaaggccatgacctacccgatcgcggtgatcgtcgtcgccatcatcgtttcggcgatcctactgatcaaggtggtgccgcagttccagtcggtgttcgagggcttcggcgccgaactgccagccttcaccatgatggtcatcaacatttccaacgtactccaggaatggtggctcctggtactgctgatgatgggcggcgccggcttcctgctgaaccacgcctacaagcgttcggagaagttccgcgacgccaccgaccgcacggtactgaagctgcctatcgtcggcgccatcctctacaaatccgccgtggcacgctacgcgcggacgctgtcgaccaccttcgccgccggcgtgccattggtggaagccctcgactcggtttccggcgccaccggcaacgtggtgttcagggacgcggtgggcaagatcaagcaggacgtgtccaccggcatgcagctgaacttctccatgcgcaccacccacatcttccccagcatggccatccagatgaccgccatcggcgaggagtcgggcgcgctggacgacatgctggccaaggtcgctggcttctacgagcaggaagtggataatgccgtggacaacctgaccgccctgatggaaccgatgatcatggcggtcctcggggtcctggtcggtggcctgatcatcgccatgtacctgccgatcttccagctgggcaacgtcgtctaa

SEQ ID NO: 339241 - DNA, 318 bp, Pseudomonas aeruginosa
atggacgccggactgtggctggccctcgtttcggtcctggtcctggcccaggtggacggcgtgttcgtcatgcccttcacccagaccgtattggccttgctggtaggcatcgccatggcacgctggtcgaagccggtcgcgccgtcccccgcacagcgctggctctgtcggggcctggctgtcgttgtcattgtcgtgctggggcgcgtgctgctgctcgaagtgccggggctgaccgcggccgaggagcgctacctggaaatccacggcggcggtgaggcgccacgtttctggattcagggctggattcccatgtga

SEQ ID NO: 339242 - DNA, 2256 bp, Pseudomonas aeruginosa
atgcagaacgatgccaatgtggtgcacctgaccagggtcgcttccgagccgtcgccgaacgccggagcggggcgcctgccggtcatcctcgtgcaggtgcgcgacaaggcggcgttgcagctgaaacaggcgttgcaggcgttgttcgacaacgccgacgacaccctcttcgaaatggccgaccgagccaccagcaacctcgaacagaacgctttcttcgaagccatgcgcgacctgcgcctcaagcgcaagagtatcgagcgggtctacctgcagaaggtcttcgaggagttctcggcgctcaaccaggtacagtccggcaaatccgtgccgaccctggataccgtgtccttcgacagcctcagcctggtacagaacgaggaactggaggagtccgtcgcggtggacgcgatggtggcgcgggtgatgagccgcgatgccaccgcgctggcccacctgagcacccgcctgaacaccctggtcgggcggaaggtcgacgagaagagcaatcccctcgctccgcgtccgctgaccgcggctttcctcgatgcctgccaggggctcggcgtcgagatcaaggtcaagctgatcattctcaagctgttcgagaagtacgtcctggcccattgcgaccagttgtacgccgaggccaaccagatcctggtcgctgcgggcgtgctgccggaactcaaatccgcactgccgcggcgtcagcccgctgtccgtcccgaagcggtacgcgatgccgggaccctgcaggcacaggctgcgctactcgacggcggccagcaggaagtcttcggcgcgctgcaggaactgctggcgcaggtccgcgacaatccttccttctaccgtcgcgaaacgcctgagaatgccgcgccgatttccagcaacgacctgatgcgcctgctttcccacctgcaacagcacttgccgggccctggcgccgcggagttcgacgtccgcgacggggtcgaccaactgctccagcgggtcagccacaagagcggccgttctcgggtggtcggccaggtggacgatgacgtcatcaacctggtgtcgatgctgttcgaattcattctcgatgaccgcaccctgcctgattcgctgaaggccctgatcggtcggatgcagatcccgatgctcaaggtggccctgctcgacaagaccttcttcagccgcggtagccatccggcacgtcgcctgctcaacgagatcgcatccgcgtcgctgggctgggccgaacacaatgatgcccggcgcgacagcctgtaccagaagatcgaacaggtcgtgatgcggctgttgaacgacttcgtcgacgacccggcgatcttcgccgagttgctggaggacttcattgccttcaccggcgacgagcgccgccgcagcgagctcctcgagcagcgcacccgcgacgccgaggaaggccgcgccaaggccgaactggctcggcaggacgtggagcaggtgctgaaccagcgactgctcggcaaggtcctgccggaggtggtggtgcgcctgctgcgggatgcctggagcaaggtgatgctgctgatctgcctcaagcatggcaaggcttcggccgagtggcgggaggccctggataccatggacgagttgatctggagcgtcggcccgcatgacgatccgctgtcccgccaacagttgctggagcgtgtgccaggcctgctcaaggcgctgcgcgagggattggccagcgcagccttcgatccgttttccaccggagaattcttcagccagctggaaaccctgcatgtccagggtctgcagcgcgacaagcgcggcgaggcggctgtcgcggacagcccgctgctcgacgaagcgagcccgggcacggccgcggaaaagccccgggcgccggtcatgctgcgggtggtcgaggaaatcgtcctgacctcgccggacgccgccccggcgcctgtcgagagcgaagtgcgcctgccggacaacgacgaggcactgctgcgggtcgatgcgctgcgtgtcggcagttgggtggagatccaggaggacgccgagcacaagctgcgctgcaagctggcggcagtgatccggcccaccggtcgctacatcttcgtcaatcgcaccgggatgaaggtcctggaaaagacccgcatgggcctggcggtggagtttcgccggcaggcggtacgcctgctggacgatgccttgctgttcgaccgggccctggagtcggtgatcggcaacctgcggcgcctcaagggcgcctag

SEQ ID NO: 339243 - DNA, 729 bp, Pseudomonas aeruginosa; identical to SEQ ID NO: 327401

SEQ ID NO: 339244 - DNA, 771 bp, Pseudomonas aeruginosa
atggcacaggaaacgtatttctacgggcaaggtgagattgacgccgcgcctatcgtcaacggcgtcctcggcaaatggcgctggattcaggatgtctcggccatgagcatccagctcgcagtcgagaaggtcgagcacaaggaaagctacagcggccagaaagccctggtccgaagcttccccatcggcaagaccgccaccgtcaacatcaccctgcacagcatcggcccggataacctggcgcttaccctctatggcaaggtcgtggccaaggcggcgggctccgtgacgggcgaggtactccccgccgacctggtggctggcgatgtgatccgcttggccaatttcggcgtcagcgaactggtcatcaccgacagcgcgagcagcccggcgcccctcgacccgcagtattacgccctgcgagccgatggcgcctacggcgaggtccaactgctgggtctgccgacgccggccccgacccagccgttcaaagcggcctatgagtacgccgccaccaagcaggtgggcatgttcaccgcgccgcagccgaccgttgccctgcgctataagggcatcaacctggccgaaggcggcgcgccggtcatcgtcgagctgtacaaggtcgcgaccgacccgctccaggagctggcattgatcagcgacggcaacaccgtcgccggtatgcagatcagcggcggaatcctgctggacaccagcaagccggataccggcgacctgggccgcttcggccgcattattcagctggggtga

SEQ ID NO: 339245 - DNA, 546 bp, Pseudomonas aeruginosa
ttgctcctggagcttggcgttgtaggtcgtaaagacgtccgggtcgatccctcgacccctggcagcattcaggcgcgcctggaggctgtcgagcttctccagctcgcgagtgaccgggtcgatggccgcgagcagtttgcccagctcggcctgctgccggtcgaactcggcggtggctttcgccgcagcctcggccgctcgttgctcggctgcaacctgctgttcgcgggcgcgctcggcgttgtggtaggcattcatcgacgccgattgcgcacgggcgctttcctgccatccgctggtggctgcccgcgtggcggtgttcatccgatccgaactttccgccagcgcgtccagcgcttcccgctgttgcagggaggcggcgaccatcgccttgatccgggccgcctgctggtcggctgtctctcccaaaccggacagctcccggccagcctggctggcatggtcgccagcggcttggatcgagtcggacagttcctcgacctggtccgcaccctgctgaaggtcagcgcggatgcgcagggctaa

SEQ ID NO: 339246 - DNA, 750 bp, Pseudomonas aeruginosa; identical to SEQ ID NO: 334372

SEQ ID NO: 339247 - DNA, 2352 bp, Pseudomonas aeruginosa; identical to SEQ ID NO: 329607

SEQ ID NO: 339248 - DNA, 780 bp, Pseudomonas aeruginosa; identical to SEQ ID NO: 56175

SEQ ID NO: 339249 - DNA, 2523 bp, Pseudomonas aeruginosa
ttgcagcacgctgctgttggtccattcgctggcgcggatgtccagcaggccattggtggtcagttcgccgccggcgcggatcacctgcccggaatccaggccgaaggtgccattgccggtgtggaggatgcgcccaccggcgttggccaggctgcccagttgcaggtcgaggtcctggttggcgctttccagcacgccgtaggcgttgttcaggccgccagcgaccaaccgcgtgctgccgctgcggccgagggcgcgcaggctgccgccgctgttgtcgatcgcggcggcgcgcaggtgcagctcgctttcgctttccaactggccgaagcggttggccagcgcgccggccaggctgaagtcgatgcgcccggcgccgaccttgccgccctggcccgccgccgcgccctggttgaggaagcgctggccgtcgaggctgagcaggccgctggcgtagaggccgccgccctggttgtcgaagtcggcggtgacgatgcggttgtcgccgctcagcgccgagagatggccctgctggttgcgcacgccttgcccggcgcgaatctccagcgactgcgcctgggtgacgccggcgctgttgtcgaacagcccggtgaccagcttcagccaacccttggcgctgttgagcacgccgccggcgccgttgtcgaggctgccgctctgcaggtcgaggttgccggcccggctgtccaggcggccgccctggttgtccagcgcgccgccgatacgcagccggttgtcaccctgggcctggagcgtgccctggcggttgtccaggctgccggcctgcacctcgagggcgccggcctggctgaagatcaggccgtcctgctggttgcgcagggcgccgccgcccaggcgcaggctcatgccggcctggctggcgagggtgccggaggcgctgttgtcgaggctgccggcgctgatctccagcagcccctggctgaccagcttgccgccgcggttgtcgacgctggcgctgcgcagcagcaggtcgccgccgctggccaggcgcgccgcgccggcgttgaccagggcgccgccgaggatggcgtcgagccggccctgactgatcaactggccgtcgctgttatccaggctggcgcccttgagcagcaggctgccgccgttgatccggccgccggcgttgttcagcagcgtatcgtcgcgctcgaagctcagcgcgcgctgcgccgagaccaggccgccctggccgttgtccagcttcccggcgatgctcagggtcacgtcgctttcgccggagacgatgccctgggcgttatccaggctggcggcgtcgatccattgcgcgcccttgctgaccagcgcgccctggccgtggttgtccagcgcgccgccgaggctgatggccagctcgccgtccttgctcgaaagggtgccgccggcgctgttgtccaggctcccgcctgtcaccgtcaggccctgccatccggagagcaggccggcgccggcgttgcccagcgcgtcggcgtccaggcgcagttttccggcgctgatgatgcgcccctgctggccgttgtcgatgcgcctggccagcagctcgaagccctgctggctggaaatctcgccgccctggcggttgtcgaggacgttcagccgctcgatgctcagcgggccgcgggcactgatcaggccgccctggttgtccaggtcgccgccccgcaggtcgagactgacgccgcgctcgccgatcagccggccctggcgttgcaccaggcgctcgaccgtcaggcgcaggtcgccccgggcggagatttcgccgccgtcggcggaatcgacgcgccctgccgtcagttccagttcgccgtcgctggtgagcaggccgccacggttgtccaggttggcggcgctcaggcgcagcgactgcttgccactgagggcgccgccacggttgtcgaggtcggcgctgctgacgtccagcacgccctggctgatcagttggccaccctcggcgttgtccagcgcgccagtggcgacgctcaggccggcgttgccggagagcaggcccttgccgctgttgtccagggaggcactggcgagcgtcaggcgggcgccggaaacggtgccttcggcgtggttgtccagcgcgccgtcgacgcgcaggtcgatgccggcgcggctggccagggtgcccttggcgctgttgtccaggcgagcggccgcgatgtccaggccggcggtgccggagatcaccccgcccaggctgttgtccagggcctgggcgatgcgcagggtcaggctgtcggcgccgatcaggcgcccgccgcggttgtccaggctggcggcggcgagggtgaaggcgcggtcgctggagatttccccgccggcgccgttgtccaccacgccgagctggcgcagcagcagcgcgccgggcgtggcgatcaggccgccgtcgcggttgaccagcgtgccgccattgaggtcgagggtgacgccggcttcgctgaccaggacgccgcctccgcgctggtcgaggccttttag

SEQ ID NO: 339250 - DNA, 606 bp, Pseudomonas aeruginosa; identical to SEQ ID NO: 334369

SEQ ID NO: 339251 - DNA, 1320 bp, Pseudomonas aeruginosa
gtgatcgcgcatgaacgccatcgcagccgaggtcatgctgccgctcgtggtcgggcggtagccgtcttcgatcatccgccctggcagtgcccggaacagcaggtagaacagatcatcgccgtagccgcccatcagcgtgccagtcagcagcaaggtcttgcgagccttcgccgccagcacgcccatggcctggccctgggcactgccaccgttcttgtactcgtgcgcctcgtcggcgatgagcaggtcgaacgtgccttgcggcaggtagcgtttgatgaactcggacggttggtagccgccctcgccaaagccaaactccatgttggccatcgcacgttccatgcgcgtggcctgacggtcggaaaacaccagctcgccattgccgtccatcaggttgatgaactcgtggatgttgtcacccagcatcgaggccaggaagccgtcaccaaacttctgcatcaacttctgcgcggtgacttccccgatggtcgggatgcgcttcaaggctttgaggacgacagaggactggtcactgccggacagactacgcgggcggatcagcgtccacaggggcgcggcgcagtggctgcacttcctgcgggactcctcggcttcgagcgagatcgggttgaccggttcgccgtcgaggtccgtaatgaccgtgccgcagttcgggcatgctgccacgtcgccgtggcgggtgcgccgctgggtgaagaccggcttccagtggaaccccatccgcatccgcacgcgccccaggacgaaaaactcctggcccgtgggctgcacacccaactgctcgcgcagcttgatgagcttgaccagcgtatccgggccattgagcacccagaccttggcgccggccaccgtctcctggatctcgcgccgccacttgtagaccaggtggggaggcgaaagtaccagcgtgcggcggtagccttcggcgttgagcacggcggccgcggcgatgccgacggtcgtcttaccgcagcccatctcgccattgacgatcgcggcgcgttcgccacggtcgatcagcagctcggcggcggcgtggacgacttcggcctgtgctgggaacagcttgcgcttgaggctggcgacgacgagttgccggtgcgcctgcggttggccggtatagaccggcgggttggcgctgttgagggcgtcgagcagttcgtcgccgaactcgccgacgaaatcctgaaggctcagggtcagagggttggattccgcgtccagcagttcgcccggtacgggcgctgcattgctggcggtggtgtcgagatcaacgggcatggtgatgctccataa

SEQ ID NO: 339252 - DNA, 699 bp, Pseudomonas aeruginosa; identical to SEQ ID NO: 334471

SEQ ID NO: 339253 - DNA, 228 bp, Pseudomonas aeruginosa; identical to SEQ ID NO: 323928

SEQ ID NO: 339254 - DNA, 819 bp, Pseudomonas aeruginosa
atggctgcacttcctgcggtactcatcggcttggagagcgaccgggttgaccggctcgccgtcgaggtcggtgataaccgtgccgcagtccgggcaagccgccacgtcgccgtggcgggtgcgtcgcgtggtgaagacaggcttccagtggaaacccatccgcatcctgacgcgccccaggacgaagaactcctggcccgtgggctgcacacccaactgctcacgcagcttgatgagtttgacgagcgtatccggcccattgagcacccataccttggcgccggccaccgtctcctggatctcccgccgccacttgtaaaccaggtgcggtggcgacaggaccagagtgcggcggtagccttcggcgttgagcacggcggccgcggcgatgccgacggtcgtcttaccgcagcccatctcgccattgacgatcgcggcgcgttcgccacggtcgatcagcagctcggcggcggcgtggacgacttcggcctgtgctgggaacagcttgcgcttgaggctggcgacgacgagttgccggtgcgcctgcggttggccggtatagaccggcgggttggcgctgttgagggcgtcgagcagttcgtcgccgaactcgccgacgaaatcctgaaggctcagggtcagagggttggattccgcgtccagcagttcgccctgcacgggcgtggcttcagcggcagtggtttcgagatcgagggacatggtgatgctccaaagaaaaatggggcatgcaccaccccagcggggcaatggcatgccccgtggtgggaggagaatcggcgcgtggccgaaggtggttga

SEQ ID NO: 339255 - DNA, 411 bp, Pseudomonas aeruginosa
atgagtcgggaaaagagtctcggcctgatcgatgtggattgcagcagcgcaaacaccacttcagataacgcctcgttcatttcctcaagccgaccgaacgattctgtcagctcggccagttcttcctgcaattcgcgaaactcttcttcgctgatcatgcctgcgccctccaaaacggctgacagtattgaatccatcgcgctcgggcaagcacagctcgacgctatacaccgcccgcttctcgacgatctgcgccatgccaccgagttcttcaactcagtcgatggcgacctcgcttcgatcttcaacggcaacagacagattgcagccgaatggctggaaactgctgcgctcaccctcggtaacgccctgatcgcccgccacgagactattggaggcgaccatgagtga

SEQ ID NO: 339256 - DNA, 534 bp, Pseudomonas aeruginosa
atgcactacggcgacgccgaggcagcggtttcatgggtaggccagattggcgatgtggactggccgaccgtggacagtagccgaattagctgcgtgtcggaggacgagctgatggatcagccggggctgatcgacacctactgtcgcacctgcacggcagtcgttggcgaccatcgctgcaaggtcaacctcgttccgtaccgcgtcacgctgacgccgcagagcatcagcggctgggtgatctctagcggcgtggtcgccgggtatgcggatgggtggtttaccgggggctatgtggagtggcaggtggacggcgacaactacgacagccgctacatcgagcggcacgccggggccgatctgcacatcatgggcggcaccgagggcattccggccgggggccagctgcgggtttatccaggttgcgacgggctcgcgcagacctgcgacgacaaattcagcaacctccccaacttcagggggtttaacgcgatgcaaggcaagtcgccgttcgatggcgatcaggtctggtga

SEQ ID NO: 339257 - DNA, 234 bp, Pseudomonas aeruginosa
gtggtcaaacaactgcgggattcattcgggaagttcccgctgaaagctttgcagttcgtcacccgcgaaaccgagggacgccgctacctgggcgatttcgacggcgccttctacgtgccgacgctcaactccggcgccgaagacgtgatcgtcgaggacggtgtcgaccacgtcgttttccaaaccgcttggcgtagcggtaacccttggctctacgcgatcaggaaggactga

SEQ ID NO: 339258 - DNA, 654 bp, Pseudomonas aeruginosa
atggaacccagcagttggcccgaggtgatgccggcgacgatgtaccgggggcgtcctgtcctggaacagcgcccggacgaaagcgaagacctcacctccagctatcagcgcctgctgtccaccctggacaacggcagcgcgattccccgcgtgaccgacgtcgccggcatggcgctgcccgtcatcggccatcgctggatcggtatgggccgagccgagcggtcggcgttccgtagcctggtctatgcgctgcgcggccagcagaagccgctatgggtgccgacccacgccgacgacctgaccctagtcgccaccgtctcgcaactggcgaccgcgctggatgtgcgcaatatcggctatgcccgtttcgcgaatggtcggccgggccgtcgcgacatccgtatcgagctgtacgacggcacggtctatcaccgccgcatcctcaccagcacagagctggacgccgacaccgagcgcttggccatcgatgccgccctgggccggctggtcgagccgaccgatgtagcgcgcatttgtttcatggcgctctgtagcgccgccaccgacgtggtcgagatagagcacgtcaccgatagcgagggcgtcgcaaccgccgcgctgacgttcaaaggggttcgtgacgatgagttttaa

SEQ ID NO: 339259 - DNA, 765 bp, Pseudomonas aeruginosa; identical to SEQ ID NO: 334052

SEQ ID NO: 339260 - DNA, 219 bp, Pseudomonas aeruginosa
atgatcgttacggctcagcacctgcataccgtgccgacctggaccactcggcagggctactgccaccggcaggcgcgggacttcttcaagcgccatggcctggattggatggcgttcctacgggacggcatcgaggccgacgtgctagtcgcgaccggcgacgcgctcgcgctcaaattggttgaacatgcacgccaggagatcgcggatgggcgctaa

SEQ ID NO: 339261 - DNA, 240 bp, Pseudomonas aeruginosa
atggacccgatcacaatcaatctcgtcattctggcggcgtcgttcatcctatccaaggtcttggcgccgaagccgcagaagcccaagccgaccgcctttgaggacatcgatttcccgcgctgcgacgagggcgacgaacaggtcgccgtcttcggtcagtgctggtcgaagagctggatggtgctgaccgtgggcaactacagaacgaaggcgattaagaccaaagggagcaagaaatga

SEQ ID NO: 339262 - DNA, 252 bp, Pseudomonas aeruginosa
atgtcgatgagcccggagaacctggccgttctggcggatatgacggtacgtctgctggagctgcggcagaacgaatgcaagcacctggttgtcgaggacagcgcgccgatactgttcggaaagctggtcggcagttatctggatgctctggcgaaagaagtgcccaccacggcaaaggtggtgagcgtcacgaacagggttgaccttaagagtcttctgggtcgggcagtattcccagaagccggttcttga

SEQ ID NO: 339263 - DNA, 252 bp, Pseudomonas aeruginosa
atgactggtccgaaagtattcggggtggaagaggtagaggcgataaaagagcgcgatacgctcattgccgccgtactacgggggctgatctcggtcgcagaagtcatgtctgccagtgaagaaggcaggaaggcttgggaagaaagccttgagcgtaacttcagccgcgtccctgaccatgtagacccggaggttttccacatggtcaagaaccggcttctgggaatactgcccgacccagaagactcttaa

SEQ ID NO: 339264 - DNA, 219 bp, Pseudomonas aeruginosa
atgatcgttacggctcagcacctgcataccgtgccgacctggaccactcggcagggctactgccaccggcaggcgcgggacttcttcaagcgccatggcctggattggatggcgttcctacgggacggcatcgaggccgacgtgctagtcgcgaccggcgacgcgctcgcgctcaagctggttgagcacgcatgccaggagatcgcggatgggcgctaa

SEQ ID NO: 339265 - DNA, 219 bp, Pseudomonas aeruginosa; identical to SEQ ID NO: 339260

SEQ ID NO: 339266 - DNA, 204 bp, Pseudomonas aeruginosa
atgactacgttcaccagcatcgttaccactaaccctgatttcggcggattcgagttctacgttgaagcgggacagcagttcgacgattcagcatatgaagaggcatacggtgttagcgttcctaccgccgtggtcgaggaaatgaacgctaaagcggcgcagttgaaagacggcgagtggcttaatgtctcgcatgaagcctga

SEQ ID NO: 339267 - DNA, 219 bp, Pseudomonas aeruginosa; identical to SEQ ID NO: 330011

SEQ ID NO: 339268 - DNA, 2076 bp, Pseudomonas aeruginosa
atgttcgcagcagccaaccagacccatttcagcctcgccatcgacggcctcgccctcgacctgcaggtgctctccttcagcggccgcgaagccatcagccagccgttcgccttcgacctggagctggtcggcgaacgccccgtgccggacctcgaaagcctgctgcacaaacccgccttccttaccctcgggcccgccggcaacggtatccacggcctggtgcgcagcgccggacagggcgactcgggcaagcgcctgacccgctaccgcatcaccctcgtcccgcaactggcctacctcgcccagcgcaccaaccagcgcatcttccagcacctcacggtgccgcagatcgtcggccgggtgctggaggaacacggcatcctcgccgacgcctaccgcttccagctcggcacccgctaccccgagcgcgaatactgcgtgcagtacgacgagagcgacctgcagttcgtccagcgcctgtgctgcgaggagggcatccattttcatttccagcacagcgccacggcgcacctgctggtattcggcgacgaccagacggtgttcccgcggctcgcgccggtggcctaccagcaggactccggcctggtcgccgaccggccggcggtcaagcgcttcggcgtacgcctggaaacccgcaccagccgcgtcacccgccgcgactacgacttcgagaaaccgcgcctgacgctggaaagcgccgcccgcggcgaagcccggccggacctcgaggactacgactatcccggtcgcttcgtcgaccgcgagcgcggaaagcacctggccaggcgcgccctcgaacggcagcgcagcgactaccgcctggccgagggccgcagcgaccaaccgttgctgctcagcggccacttcctgccgctggccgcccatccccaggcgggctggaacgacctctggctgctcaccgaggtgattcacgaggggcggcagcctcaggtgctggaggaaagcatcgtctccgatgcctcggcgagcccggacgacttccggcagggttaccgcaaccgcttccaggccacgccctgggaggcgttcttccgtcccccaccgacgccgccgaagccgcgcatcctcggcacgcagagcgcggtggtgaccggcccgaagggcgaggaaatccactgcgatcgctacggtcgggtgaaggtgcaattccactgggatcgcgagggccaggccgacgacagcagcagttgctggttacgcgttgcctccggctgggcgggaaggaactacggtgccatcgccatcccgcgggtcggcatggaggtgctggtgaccttcctcgaaggcgatcccgaccagccgctggtcaccggctgcctgtttcacagggaacatccggtgccctacgaactgccggggcacaagacccgcagcgtcttcaagagcctcagcagccctggcggcggtggctacaacgagctgcgcatcgaggaccgcaagggccaggagcagatcttcgtccatgcccagcgcgactgggacgaaaacatcgagcacgaccagaagatccgcgtcggtcaccaacgccacgacaccgtggaggcgaacagctacagcgagttcaaggccgaggaacaccgcaccacccacgccgagcgcaaggtggaggtccgcgccagcgaccacctcaccgtagccaacgaccagcacctgaagatcgccagcggccagttcgtcgaggccggccaggagatccacctgagcagcggcctgaaggtggtgctggaggccggcgccgaactgaccctgaagggcggtggcagcttcctcaagctcgacgccagcggcgtgaccctctccggggccaacgtccgggtcaactccggcggcagcccgggcagcggcagcggcgcggcgccgctgttgccggggccgccgctcgacgcggatgcggcgacagcgggccaggtactggacaacccggcgcgtagccgtcccgagcggaaggggccggaacaattgatcgtcgatgtctggggagacccggcgcaaggaagccaggtcgtactgttgccaccggagagcgaggcatga

SEQ ID NO: 339269 - DNA, 1464 bp, Pseudomonas aeruginosa
atgatgaataacgaagcgctagttcaacgaagcgaagtctcagaaccgacagaaaccacgctggttttgctggatggccgaataattaccgtcaagattggcgaactgattcgactgcgaaacagcgatggagagcctttgccgctccacttcgaaatcctgaaagaaggaaaccccttccaccaatcgttattcaaggtcatttgcggaactctatcgacgcacagcctaaagtacaatcatgcaattctcttttcccttcgccaatggtttggtgttgagagctgcggaataacaaccgcgctcgaaattaatcatataagcctaataacaagaatttcaagccactacatggggtttattacccccgcactaaggcgtattaaaaatcagaatctggacggcttgagcccaaatgttattgactttctgagcaatgaccataagtgggaagaaagaggcaacggagcctattacacactcataaccaatgaccccgtaagtggcgcgctaacagatcaggagcttagcagcattcatggcgagctaaataatgcctacgcccgaggcatagtgagccaagaagaatatactcttgcctggttttttataggcactggggttcgtcccgtccaagcatcacgcatgattaaagctgacgctcaaatatccgagggcgccgaaggaaaagaagtaaccctaagaatacctctcgccaaaggagagggcggcggtcaaacagaatactggttgagacgcgcccccacggtactagctgattgcttgattaactacctagagcatcgcaaggaagagcctgccaactctaaactttttgacggcacaccaagatcaattgctcatcgactaacagtagctctaggtcgtctcaatacctattcctctcgactagagcaaagaattccaatctccccttaccgcttccgctacaccctagcgacacgagccctggcccatggcgcctctgacttcgaagtggcaaggctcctgacgcaccggagcactagctgcatccagttctaccgtgcctccatgccccagctccagaatcccatccgcgaggccattgggaaggagatggagttctttgcaagagccttccaggggcgccttatcaagtctctagatgagtccacgcgagctggtgaagatgcctcggtcattgccgacttcctacgactgacgggccagacagtgggtgcttgcggcacccgcgctgagtgtcatcagaacgcgcccattgcgtgcctgtactgccatcactttgagcccctaatcgacgcaccttgggagacgctgatggcctcgctgaaggccgatcaagacatggagaaagatgatcggattcgccagatcaaccacaacgccatgtcagcaattaacgaaatcattatcgcccgcgactcaaagcgcactaccacggatgacgataccaatgggtga

SEQ ID NO: 339270 - DNA, 921 bp, Pseudomonas aeruginosa
atgaaatcgacacaaaaaacccgccaaaaaaatcttgtgcatttttctggccacgaaacgttccccctacgtcaaatgtggctcaaaaaggcttttgatcgagcagatgacggctgcctaattcacaagtctacgttcactgaagagtcggctgttgctgcctttggcgtcggaaaaaacatggtgacatcaatccgccattgggctttggcttgcggcatgatgtatgaaagtgacgacggcttccgcatcggtagcttagctcgcgaaatcctcaaagacgaaggactcgatccgtatgcggagaatccttcaacagcatggctcattcattggcagcttgcaggcaaatgctttcgttcgaccacatggtattggctatttaaccatgtgacagcccctacttttactcgtcaagagcttgaggagcctttggcaaattacgcacgcgagcgggatccaaaacatcgcctatcgaactcaacaatctcccgcgacctagaaacatgcctgcgcagctacgctccacgcgtggccggtggctcccccgaggatttggcagagcccattttgggtgagctaggtctattgcaagaagttcataaaggtcaatacgccttccggcgcggccctaaagcatcactacacgatggtatttttgcctatgcgcttgttgacttttggagtcaacaagcagagggacaaagttcattagcatttgaaaccatcgcttatgcggaaggctcaccaggccgtgtcttcaagctcgacgaagaatcaatagctcaacgattaatcgcactctcggacttcactgatcacaagctcgaatggacggactccgccggcttgcgacaagtccatcgaaagactctaactaaagaagacattaggaatatgatcaggcgcgcctatgactga

SEQ ID NO: 339271 - DNA, 3336 bp, Pseudomonas aeruginosa
atgactgaaaaaaagcaacaggtgctgtccgacatcgttcaaatttcgcgccagtaccaacgctccatccgtattgatgccgatattggccgcgccgatgcgctctcgggctacatctgccacgctaccgcaaccactgttgtcgatagcatgtgcaaacaaatctctggtaccaaccagcgctgcttcacatggaccggcccattcgggggaggcaaaagctcgttagctgtcgcattggctagcgcgttgcatcctgacaagaacctccgaagcaaggctcgcaaggctttgaatctggacgccaatccaatctttaacaaagccttccccacccgcaaggggtggctcatcgtaccgactgtgggtagacgcggcagtgtcgtaacggaactcaactctgcactgaagcatgcacaaagtaagacggttagcgatcgcaacaagccaagcgctcagtccctcatcgctgaattgattgaggaggccaagagccgaccacatgacggcgtattagttattatcgacgagatgggaaagttcctagaagcgtctgcacttggctctggtgacgatgtctactttttccaagaactcgccgaagctgccgctcgttctgaaggccgattagtggttgtcggtgtgctgcatcaatccttcgcgcaatattccgctcgtctaggcctcgatacccgcgatgattgggccaaggttcaaggccgatacgtcgacttgccctttgtagcagcaagcgatgaagtcgttgagttgataggccgagcgatcgaggctaaggacaaccccaagtgggtacagctcgcatcagaaaccgtcgcagaagcgatccgctcacgccgccccgcagtggggcagggcttcgccaaggcattagcgtcctgctggccgctacatccagccatggcagctctacttggaccaatttccaaacgacagttcggccagaacgaacgtagcaccttcggctttctctcttcagtagagccttatggttttcgctcctatctgaattcaacttttatcggagaggcgacttggtatcgcccgagcgattactgggattatctgcggtcgaaccttgaacctgcaatcctagcgtcccctgatgggcatcgctggtcgcaggctgtcgaagcggtcgaacgagctgaagcaaagacaggggatcagctacaagtgtcgctgatcaagaatattgcggttatcgaccttttccgaaatggatcgggcctagcggctgacgcagcagttattagcgcactgttccacgacaagacacgcaaggaaatcgacgctgcgctgaaaaagttgtccgagcttaaggttattctctacaagagctacaccggggcttggtcagttttcgaaggcagcgacttcgacatagatgcagcaattgcacaagctctaaccatctcacccggcatcgattacgcacgcctcgcccaactcatgggactgcatccagtggtagccaagcggcattaccatgagacaggctctatgcgctggatggagctgtcgttatgcagcatcgagcaggctgaaaagatcgcttccaacttccacccgcgcaagggagagttcggaacctttatcctcgccctccctaacaaaggaatgagccaacgggaagctcggctacgcgcacaatcctgctcaaagctccgaccttggccagtgatggtgggcattccaaccaaccatgcccgaatcgccgaactctccgccgagctaatcgccttggagcaggtcaaagagcgccatgagttatctggcgacgcagtggcgcgccgtgaggtctacgcacgcttggccgctacccgcgccgatcttgaagaccaactccaagccgcagtgtctatggccaaatggcataacgggactgatcaagttattgagcctggttcgaaactatcaccactggcatctcaactagctaaagaacttttcagtgcttccccccatatatggagtgaactggtcaaccgcgacagcatctcgagcaatagcgttaaagcccgccgcgatctacttcatgcaatgatcaacgccgaaggtcaagaagccctcggttttgaaggcttccccgcggagcgcggtctctacgaaacactgctcagaggcactgagctgcaccgtaaaagcacctctaacatgtggcactttactgcgccgagccgcggaggctccagcagcttcgagcccttatgggaggcaacccgagccctcttctcggatgctaatgcccgtgtaagcgcacacgagatctatgcactatggagtgcccctcccttcggcatgaaacaaggcattcagccggtaattctcacaacgttcatgctttcccaaaaagccaacatagcggtctacaaagacgcaatgtttgtgcctcgcctaaccgaatttgatatagacgagtgcttgcaagatcccagtcggttctcgctacgctgggtcgctatagatgaaaccaagagcaaaattctggatggtatctcgaagctattagcagaaattggtgaaagcgcaggggcgtctgacccactggaggccgcgcgcggccttgtcgccatggtgttcaatctccccgaatgggctcgaagaacccagcgtttaagcgagacagccaaagctatacgggacatgctcgtaaatgccagcgaccctcacaaagttctatttgttgacctacctcacctactcaatactattgacagtaaggtctatgtaaaagctctacgcgcacctctgcaagagctcaccagtgcgtacgacaatatgctcgccgaagtcaaagagagaatgcttgaggctctcgacgccaatagcgacgacctggaggccttacggcagcgcgcctcatccgtctcaggtgtgtctggtgatctgagacttgacgcattcgcgacacgcttggccaatttagatggaagcagaagctcgctcgagagcatcctaagtctggcagcagataaaccacctcacgactgggtggatcgacatattgaaacggcggttttagaactaactaagtttgcccgacgcttccgcgagacagaagcattcgtcggggttcatggccgtaaggcgcacagcgaagctattgctgtcatcatcggtgcaggctcagacactaaaactatctctcgctcattcgcaatctcggatcgccatcaccaaacagtggaaagcaaagcctacgaggtcgtctcaatgctcgaaggccaaggactggaaactgaagtgctattggcgattctagccaaagcagggatgaaactagtatcgcaagagaaggatgagactaatggctga

SEQ ID NO: 339272 - DNA, 843 bp, Pseudomonas aeruginosa
atggctgaacgacatgtcctgggtatttctggaggaaaagatagtgcggcacttgccgtattcatgcgggataagcaccccgagcttaatattgagtacttctttactgacactggcgaggaattaccagaggtcaaggactttctcgataagctagaaggctatctaggaaagccgattaccaagcttaaccccaatcgggactttcgcttctggctgcgccaatataagcatttcttgccgagcccacaaacacgctggtgtactcgaatgctaaagctcaagccatttgaagagtgggtgaaaccctggctggctgctggtgatagagtcacgtcctacgtagctattcgtgcggatgaggactatcgcgaaggctactcatctaaggctgacaatcttctcgttaaactaccatttcgagaagccggcatcgataaggctggtgtgatcgatattttagaaagctccggaatcggttatccgaagtattatgaatggcgctctcgtagcggctgcacattctgcttcttccagcagaaaattgaatgggttcgcctcagagaaaggcatccggaagcttatgaggctgctaaggcactagaaaaagatgccctggaacatggatctccttttacctggtcaaaaggagagtctctctctgacatggagcaccctgcacgaattacggaaattaaagcggagtacgaaattcgccgagcacgacagcgagcaagcactcctataaatccgctgcgcccagtcaaaacctgccctgaagacattgatgatgcctacggggaagatgaaggcaatggctcttgcttgatttgccacaaatag

SEQ ID NO: 339273 - DNA, 1083 bp, Pseudomonas aeruginosa
atgggcggaagggaggctatccgaggtttttccatacaaactttgatctgcttgctagattcattgcaatcagttaattcttcatgggtaactgtcaccatcgagccagactctttcaatgataaggcggatatatcttgggagttttcggatggtacgcgtcgccttcaacaggtcaagtcttctaagaaccagattgggcgtgcggatgttgatttctggtgtaaagagctaaaactatcaggaagggctgagagttatcagctcatgttggccggtcctattgcggctgctgttcttgatgatgctccttttcatggggttgatgtcccggttccggcttcgttagatacactggcattgatcgatcaggctattactaggctagatcgttatttgattgagaagacaatcgctccgttacccctgtcgattcgtgagtctttaatatacatagtggccgcgcgtctgctggagggcgcggtttctggaaaaaaactacaccgaaatgagtttgatggatggttgctacattggattactgcggcctatccagaagcaattgagcagcgtatgtctgctaattgtagtgtcttgtggagtagtattgagatttccagtcatatcgaaatctcacgaagagcatttgaagtgatactcccgctcactatagtcaatggtggggtttcaacggccgtagtagagtggttcttgttgcgggtgtcgtcggaaggtcgtgaaatgcgataccgccccgtcttggtaatgccagaggtaggtgttggtttgctggagcgaagaatgatggctaggccgttcggtgagtttgctgtatctccacaagcagctgtcaacactgtgttacttttcactcctgttgataagaatggatatgcggtggatgaatggcctcgaggacagcacgagcttgagctgtttataaagtataccactcagccggctccatgcttgattaagaaagtatcgatattaataacgatggaggagacggctgtgctaggaactacaaatacaaagcatgttagtatatcgacattggaaagttatcttgacattatttag

SEQ ID NO: 339274 - DNA, 1770 bp, Pseudomonas aeruginosa
atgtcatttcccattattcctcagaatctttctatttctgctatgcggagttcgggatatcgagataccgcgcacgcattagctgagctaattgataattccgtccagtctggacaagagtctggtgtgcggactgacgtcgaactaatttgtatcgatgaggcaccaagcggtgggcgacgccggctttcgcgaatagctgtttttgataatgctgcaggtatggaccctgcattactaaggaaagctcttcagtttggaaacggaacacgccttgagccaaagcatcaaaaaggaattgggaagtttgggatggggctgccaaattcctcgatttctcagtgtaaacgtgtcgatgtttggagttggcaaaaagggattgtgcaccatgcgtatctagatgttgaggaaatccaaaagggctcgatgacagaggtgcctgctcctcagatttcggttattccaggcgaatggctgtctttaattgctggtgaagttggtgatagtggtacattggtggtctggaccgagttagaccgagtctcgtggaagcaaagcacaacgttgcttaggcatactgagtttattgcaggccgtgtatatcgtcactttataaataaaaagcttgtccggattaggcttgcagcttatgagagtaaagactcagagtattcgtcgctgtatgaaagcttcgttcgccctaatgatcctttgtaccttatgagtggtactagtgcgccggcaccatttgatcagaaacctgcttttgatccatttggtgagccggaggtgatctcggtcggacataaaggggaggagcactccgtaactattcgtgcctcaatttgtaggccagaagcaaggcgagagggggggactaagccaatcggtcaacatgcccttaagaatcaagggatctctgttttacgctcgggacgcgagctggaaatgaatcacagttttcttaattcgtatgattcacgagagcgatggtgggggatcgaggttgagtttgacccaggtttggatgatgtttttggtgtaactaataacaaacaggctgcaacaggatttatgcggttaagccttgaggaggacgctcaagctgaatcgctctctgagcgcgagtatcgtgaaatgcttgagcttgaccgggatccacggctgccgatgtatcgtattagtcgtgagattgaaaagctccttagcgctatgcgtgcacaagtcgcaaaaatgcgcgaaggcgatcgtgttcaagggcaaacagagcgtacagagaataaggctgagaaggctgctacagactctgtaaatcgccgtcgagaccgtgtgggagatacgggggaaagtgacaggcaagaaggactttcgcacgctgagcgtgctacagccttgaccgccgaaattattcaggatggggttgagggtaagaaggcgcatgagatcgccgtagattacgttagcaagaaaataaaattccgttttaaacatgcagacacatctgggcaaatgatatttgatgttgctgtaactggtggtgttattctcgtaacattaaatactaggcatcctgtgcattcacggcttttcgaggctcttcgagataatgagagtccagaaaatcaatatgcaaaagaggttctctctctagtggcagcttgggcgcggatggaggatgaagcaccaagcgaaaaagcacgtctagctatcgaagatgtccgtctaaattgggggcgtatggctatggatttctttgaggtagaggactag

SEQ ID NO: 339275 - DNA, 1569 bp, Pseudomonas aeruginosa
gtgaaatcaaagcttgttgatcatttggctcgctgcgatactgcctcgctaaagccgttgttaggggacgctacatttaaccttttagaaagggtagggggcgatgcattaaactcggaaggattgtcctaccttattgtgagtatgcatggagatgtaggcgctcttcgtagtcgtgctattcgtgatttgattttttccaagttgagtagtgatgaggggagggcgctctgtgagttgcttcagctccctgcgtctgcagcgctaatgactctgcgtagtgtggactttgatagtaaccctctcaacttagagatgttgatacgttggtttggcgtctcctatgatgctgcagatctctctgctagaattactgagggatctcgaaaggctatcgctaagaataagctcagacaccaccaattggtcgcgttctgtgaacttcgacgaagcatttcaagtccaggatcctctatcctggtgcatatgccattcggtgctggaaagttgcggttggtagctacagcagtgcttgatctctatcgctcagaatctgatgggaaaactattctttggctgacgcctggcgaggcgctgtgcgaggaggctttttctgaactccgtaatgtatgggagcagctaggttctcgtgatgtgacaatctttcgtctttacggtgatcaccctactccagattttagaaatcttgggaattgtatcgtggttgccgatattacgaagctagggcatgccgacgatggcttggaggagttggggcggagagcccgtataatagttcttggtgacgcggagcgtgcttttcatccggttggtgaagaaattatttataaaatgtcgaaagatagcacgtttagtttggtaggtattttggcttcgcctagtagcattatagatttcagttcttcaggagccgcattgcgagcgaggttctcgaattcttatattaccatgaacgatgatgacccatgtaagttgctgcgcgagtctggtgatgtagatgaggttgtcgctgaggttcaggatattaaatctggtgtagctccgtttgtgggctgcaatgtgctggattttagctttgagtatatagatctgctcagtaaggatgtagagcgaaattgtgctctattggagctgctaataagcgaggcaagaacttcgggtcgagttctattctttgctaccactgcggagcatgcacgcttgtttgtagggttgctagcacttcgtggcgttagagctatgtcgctaactagtgagaagacaccggaagaacgaacgatcttaatgcagaaatttaatgctcgtgacgaaaaaattctctgtgttcatgggttctttgtttcgggggactctgttcctgagctttctgtggctgttatcgctacgccctcattatcaacatccgtcttcctagggatggttgggcggcttgcgagtggtcgaggtacagacaaaaaccgcctaaggcttgtggtcgtttctgattcaaatcctgagcagagacgcctggtagagaccttggggacttggaataagctggatatttag

SEQ ID NO: 339276 - DNA, 2562 bp, Pseudomonas aeruginosa
atgactccaaaatatcgcaagacactgctcgccctggccatttccgccagtaccctgcccctcgccgctcacgccctgacgttgaccaacagcggcctggacagcgaaggcaacacctacaccgacagcaccgaagtgaccggtgccttcgcgggcagcgaccagcctcttcgtttctacagcgacaccttcaaccacgacctagtgctcaatgcgcaggtgcaggccactggcgacgacctcaatggcgtcgacctgtcctacgccggggacgataacaatccctcgtccatcggcgcgccgaccgaggtgttcggcaacctgcagaacaagggcagcatttcggtgaatggcgccggtgtcactggcctgctgattgatccggccaccatccacggcaacctggtcaatgaaggcaccctgcaggtggcaggtggggtgctcgagggcgacggtattcgtggtctcaaattcgccggccagtcggtgttgcagggcgacctggtcaacgccaccagcggcaagatcctcgccgatggcgacgaggccacgggcatccagctcaagggcggcaccatcggtggcaagctgatcaacaacggcctgatccaagtcagcggtaccgagtcgacgggcgttctcgccacctacgacgacgacatgggtggcccggatcgagtggacctgggcggaatcgagaaccacggcagcatcgtggccagcggcgatgatgcaaccgcgttgcgtctcgacggtgtgagctttgccagcacgccggtgcaggtcctcaacaccggcaccatccaggctgacgatgccgccatcgaggtgggcgccttcgacatcgacggcgcgaatgccagcaataccctggtcatccagaacagcggcagcctgatttcccaggacgaagccatcgatgcctctcaggccagtggcggcgtgcacctggtgtggaatgccggcagcattaccggcaacctgatcgacctgtccaacatcgaagtgaacggcgacgtgaccttcaatggcaccgacgccagcaccgatggcgcgaacatccgactgaaggacgccggttggctggatgtcggcagcgatgcgggcaacacgccggcgcacctggaattcggtcagccgcacaccactatccagggcaacctggatgtggccggcaactcgtcgctggggctcaacctgagttcggccacggatccgaacaaggccgtggttgcggtctccggtaccgcagagttcgccaagggctcgcagatccaactggcggcccagggcaacgacttcaaggcccagggtacgacctataccctggtccaggcgggcaccctgcaggatgaaggcgtgagcgtgaccagccgctcggccctgctgaacgtcgacaccgtcagcagcggcgacaaccagatcgtggcgaagatcagcaccaagagccagggcgaggtgggcgacgtgatcggccagatcggtggctcggccaacgcccagcgtgcgggcgcggccttcagccaggtggtgaccgggctggcgcagagcaatcccaacgatccggtcttccaggcctacgtgaatgcctcacaggatccggcagcgctgaagaaactggctgagcaattgacccctgaagtaaacggtggcgcgacccaagccgccgccagtgggcaaacgctggtgagcaacgtcaccggcaatcgcaccagcagcctacggggtgcgtcctcgggcgatgtactgcagaacaccggtatctgggcccaggcgttgtacagcgatgccaaccaggatctgcgcgacggcgtcgctggctttaacgcctacagtcgcggccttgccatcggcgccgatggccagctcaccgaccagttgaccctgggggtggcctacagcttcctgcataccagcgtaaacagcgacaacggcaacaccaccgatgtggatggcaatgccctcaccctgtacagcggtttcgaacagggcaactacttcgtcgacgccaacctgagctatggcctcaacgacaacgagagcaagcgacgcatcgctagcaccacggccaaaggcgactacgacagtcaggtcctgggagccaacgtcgtcggtggctacacctatcacctgaacgagcagttcctggtcgagccgcgcctagccgcacgctatgcgcgcgtcgatatcgacggctaccacgagaaaggctcgtcggcggcgctcaaggtggatagccaacgctacgaagtggcggaactcggtgctggtgtgcgggtagccggagacttccaggtcggtaacggcaacctgcagccgcaagccaagctgatggcctaccatgacttcgccgcggacaaagcccagagcacctcgacctttgtgctgggtggtacgcccttcgtgagccagggcgccaaggcggtgcgcaacagctacgaagcgggtgtcggtgcggactatcacctgggtgcggtcacggttggtgtcagctacgactacaccggcaagaccgacttcaaggccgacaccttcaccgccaaggtccgttacgacttctga

SEQ ID NO: 339277 - DNA, 897 bp, Pseudomonas aeruginosa
atgagccactacctttccggcccacctctgtgggccggttttcttcgagctctcccggcgctgctgctcggcgtcctcctcgtcggctgccagtcgccccgcgaggcactgcagcagttggcggatgagcatgggcggcaactggagatactgtcggggcagccgttcccattggccatgcttccaccgcagagcaccacgaaagccactcgtttacgcgtctacctggaaggtgatggccacgcctgggccaccgcgacgcagcccagcctggatccgagtcctcacaatctgctggtggcgcggctagcagtggacgatccaacgccgaatgcctacctggcgcggccctgccagttcgtcatagcaccgacctgcgaacctgccctctggactgatcggcgcttttcccaggaagtaatcacgagcctcagtcaggcgctggatcagttgaagcagcgctgtggcaaccgggagttcgagctggtggggtattccgggggtgcggcgttggcacttctactggcggcgcagcgggatgatgtcatcttggtccagaccctggccggcaacctcagcccacggctttgggcagaactgaaagggctctcgccactcaacggctcactagatccgctcgactatcgtagtcaactcgtgttgttgcctcagcggcatttagttggacagcgagacaccgttattccaagtcgcttgccagacctttaccggagggctctcggctccccctctcatatcgaatgcatccatataccgggagcaagccacgatactggctgggaagtcgcatggaagcgctgggtacagcccctcactccagcactacaaccttcgccttgtgttcagccaagactcagatcaagtgaggcgacatga

SEQ ID NO: 339278 - DNA, 1029 bp, Pseudomonas aeruginosa
atgtcccaagcgaaggatacgctgctcaggctattcgcattattgcgactgatacccaccgagcctcggcgcatcgcaacaccaacccttctcgaaaagctccgcgataaaggcttttccgtaactctgcgctccatccagcgcgacctgaaccggctgtctgttcccttctccttacagtgtgacgatagcgaaaccccattccgctggagtttcacacgagacgcaccactgaagttggaagacatggatgctcccaccgcgcttgccttgtacctgtcggaaagccatctgaacaccttgttgccccagacggtgctggatcaactgagtccgcagttccggcgggcccgaaacttccttggcagcctaggcaataatggcctggcggattgggctaggcgtgttcgggcaattccctacgggaaaaccctgctacccgcagtgattgctccgacggtatgggatcaggtttccaccgccctcctggagcgcaagcaactggatgttgcataccaaagccgaagcaaaggtgagctcaagcggctgcgcctacatccagcaggcctcgtgtcacgacacgccgtcagctatctgctggcgtctgtcgatggatatagcgacctgcgccagtttgccctgcatcgcatccgcgaggttcgagtgctggatgaagcggcagagtcgcacgccacattcgacgtcgatgactacatcgacaccgggattttcagccatcgacaggccgaaacgcaggtcgaactgatcgccgacgtacatccacagattgccgccctgctcagcgagacgccactgagcaccgtgcagagtctgagcgatctgcccaatcaggcctggaagaggttgcatgcccaggttgcgctggaccgggacaccctatggtggatcttcgggctcaacgacaacatccgggtccacgcgccgcaggtctgggtcgatgaaatccaacagaagctaggcaacttgcgcaccttttactcagggcctgactactcgcctcacgcgtga

SEQ ID NO: 339279 - DNA, 1416 bp, Pseudomonas aeruginosa
atggacaacgaacgtaaaagggcactgaacaactcggtcagcctctgtccgatctggcctatgcaggcatcggaaaagattggccacatgctgaccgagatcagccacgcaaacgtcatcatcgacaagattgccggaacggcacagaacagcgcgatcaaaggcgggttcgcggccgagacctggcacgccgaatcgttcaacctggacgccatcctcaaggacaaggacgtccgggccttcaccgataactttaccaataccccgctcgccaagaaccatacaacccatgacatcgtcgtgatgaaaggcgatgagcagttgctcggcgcgcaactgaaatatttcaagaatggcgatgccacccaaaaggccttcaggtccactaaggatggcgttcaccagtaccgggacagcgatgcctttatcggtcccgcagatcagatcgagcagatcaaagatgccgcgaaacgcgacatgctgcgcaaccagcaaacccgtccagaggtggccaatgccgcagaaaaggtacgtgagaagactacggctaatctcgacgtcgagggcgcccagtcgacgccgctgagcaagcgggacgccgaacacctgggcagtggcagcaagaccggcaaggaactgcatgaaaacatgcagaacggttacctgaacaaggcgactgtccagcagagcctgcgcgcggcgggctcggcggcggtgatcaccaccgtcatcgcgggcagcatcaacactttccagtcgatcaaacgtgtacgggacggcgagatcacggcagaacaagcaaccttgctgattttgcaaaacaccgccatcgccgccggcgacagtgcactgaaagcgggtgtcgccacggcgacggtcagcatcacggcacgtaacctgccgacgctgttcgcaggctctgccttcaagcgcaccttcgccaacagcggcgtggcggcggcggcagtgtgcgcggtggatgtggtccagaacgtggtgctgttcgcggcgggcaagatcacccgcgaagaactagaaacccgggccggtcacaatctgctgcaatccggcgccgccgtcgtcggcagctcagtgggcgccgcggtgggtgctcttggtggtcccatcggcgcgctggtcggcggcatcatcggcggcctaatcaccacgatggccatgagcatcgccatcgacaatcacattgagaaaagcttccgtctgacgctggaagccaccgaacacgtggcgagtaacgccatgatcatgcacgactcgctggaatacctgcagatgtcgcagtctttctatgccgagttccacaaggggctgtatctgtccgagcgacatttcgccggccaggtcaagaccatggcagcccaaagcacacagttgaagaacctgatcgataatctttaa

SEQ ID NO: 339280 - DNA, 2154 bp, Pseudomonas aeruginosa
atgacagagaaatgggagcgatgccgacagcattaccagtcggtttatgaaaggaatcagcctgaagtcggcgcgggtcgtgctcttgacgaatgcctgcatcatttcctggatcaacggcctgcaggtaaaaatctctctgcgattgatcgcgcgacaggcttggcgtcagctgcgttttggcttgatatggatgcggttgctcaatccgagctggcaagccttgcgctcagtcgagtgctgcacttcgacactgcaatcagtgtcgagcagttggtgaagttggcaagccttgtcccagacaccctcagatgggcgattcgctactcgaagctgtttgagcgtatcgcttcgccgctctggctagcgcttcgtgcggagttcgcgggggaagagtggcaagtattcttcggtgtttgcgaccgtttgcttgatcagctcaagccctttgatgagctaattgccagcactgaaaaacagcttgagcacttatccctgctggagtttttttcctacctcagcgtgctggcttatcaggcgttttccgacgatgctgccgatgaccgttccggtcagcagtgggcggtatacaaccgcattatcttgaggaagctccgggtttgttcggaagaggattttcgcctgaacgagacacggctcgggcagtcgctgaagcgtcatctgtcaccgatcattttccctgcatcgcccacaactgatgcagccagatgtcgtgaaaatctcgaatggttagccgttctgattgctgccacccaagagcggatcgactacgaaggttcgattgactggttttgcttcgatcctgaatgccgttaccagctaaaacctggcgagtcggttatctataaccagtcggaggcgggagctgtgcggtggcggcgaaccgggcgtaagagcgacctgctttggcactactggatgaaccgcgtggtgcaggcattcgttggctccggcatggctgggcaaatcatcggttcgcctgagaaccatgaactgaatcagttggcctatatcaaggcgtgtcgcagcgagctgcaattgcagcagatatacggcctgggtgattggctctcgctcgaggatggcactcaggtcccgcttcaccacgtgttgctggcgagcgagctgacttcggttttctttcagagccagttcatccagccattccaggactaccttcgcgagtcgggcgtgcttgcgcatgcccttggccgtttggctatggatggcctgctgtcaggggagaacaggttccccatggcttggtctgaagagggcgaaaagatccgcaggatcaaaggctggacggtcagcgaggagcatccgctaggcagcaccgattcagccaaggcaattctcaagttctggaccagtgatctcaaggcgctatctcagcaactgaagcagcagccgggtatgcctacaccgcgcttgtacgaacaacccttctacaaagttggccgctacagctttcagtttccctgggtcggtgcgcaacaaaacaacctgacggcagcgatcaataacctgcgccgcgtgaatgcccgcagagccgatgcacaggtagaaacccggcgtgtggagctgacgctagccgagagccttcggcaacggggctttgccgttgaagtgggatatcagccgcctattgcagaagagggcgatgccggcgaggtggatttgatctgtcagcgggatggtgttctgctgcttatggaggtcaagtctgggtatatccgctcgaccactcatgaggtctggttgcatcgcactagtactttgcgtaaggccgcttggcagctgcgacgcaagcgtaccgcggtagcaagggcgttggtggctgatcaagatttgcgcttcaggttgggctacagcggccagtgcactgagactgatctgcgggcttggatagtcgatacttctattgagctcgatgggcaatcagtcgatgggttcagggtgctatctcgtgaggcactggaggtagttctgcgggacgagaagcaactcctccggccggtggatcagtttgatgacgagcaaggtcggtgctcattgttccctgacggatttactgctggccgattcatagctgttgtcgaggctgatgagctgtggcgaggcatctgctag

SEQ ID NO: 339281 - DNA, 2346 bp, Pseudomonas aeruginosa
atggaccaaatacactattccgacccctccgccgcattagacctgcaaaggctatataaaagttctaaattactacctttttttggaagtggcttcactaagggtttaagatcaaagtccgcccgggtgccagacgccaaacaattaacccaaaaaattacggaaatcgcgagcggaaattgtagagatcctgaagatgccgaagcgatacgaaaaataaacgacctaaagatcgcattcaatttactatttgatgaagaatacgtacagcctgtgcaggcaaggacttatctcagcaatgttttctccgacgtaattattgcagaccctagcaaagtaagcctactccagcttaactggccccacatactaacattcaatatagatgatgccatagagtccgtggccagaggatataaaaagctactcccaaacaaagaagtcgcaagggagtacataacttcaaacaaatgcctcttcaaaatccacggagacattgaagacctttgcgcttataccgaccagagaacaatttttacttggtcacaatatatcgaaagcataaatgaaaacaaaagcatgctttcttttgtaaagcagcaagcagaaacatctgcctttctatttataggatgctccctagataccgagctagacttactaagtcttgctaaggacatgccgttctctaaatcaattctgctgaagcgcgggagagccggcgtagaagaaaaactagcactgaaacaatatggaatccaacaagtcatctacttcgatgactatgatgaaatatcaaaatgggtagtatctacgctaaaagatactgtcgtagatgcccctcgaagcaacctatacattgatgacactgcattgagcgccaagcaagccattgaaatcatcgctaacggcggccctctatccaaagtagaaagcaaccagataaaaggaatttgctcatctactttcccacgccgcgacttggtatccgaagtggcaagggagctccgaacccatgatgtagttttgattgttggccgaagattcagtggcaagacaatgctactctatcaagtgctgtcaaacgtcttggactatagctcttcctattattcaacaactgacaccttcagcccagaagttgcacaactcctcagcgtcaagaaaaatcacgtctttgccttcgattccaactatctcaacgcacaggcattagactcgattttacacgccaagctcgacccatctaaccgcataattatttgtgtcggcttcggagatgcagacctaatgagaattaggctggaagataaaaacataaactacgaagaagtagaaattcacaacaagcttaggattagcgaaactcaaaaatttaacgaaaacctagccaatttgggacttccaaaataccaaacaagcaacactcttctcaatttttcttataattacttcaaagagtatgaatcacaactaggagtgagctcactgttcaagagaaaattcaacaatagcgagacaaaagtcttaatcttgattgccgcatttggcaaggctgacttcgcacaagtccatgcaataaatgaaaatttcgacataaatagctttatatccaataacgacagattgcttgaggctgtttccaataaaggctccaccgcaactaatgtaatagtatgcaactccagctcttggttattgcaggaaatgcaaatctattttggaaaaccagcagtagctagaactttagcagacatcatatcgtcccttagcaaagagggattcaaagtaacagcaaagaacctaattagctttgacaaattaaatgaagtatcaggtgggaaaggcttccatcaatatattagagaaatgtataaactaatccaggccaacttccaagatgacaaccattattggattcaaagagcaaagtgcgagctaatttcagggagcacagtagaagacttcaaaaatggcatgctatgggtcagcaaaattagagttgaaaatagcacagcaaaaaaccaaacctattacagcgcaactcttgttaaagctcaattacacgctagagcatacaaagcaggagcagacaactccgacctcctcgcattcctagagaacatgcacgagtcagcccagaactatcaaaacaacaaaacccatatagatagattgctagacaacgccaagccagacacactacacgcggtaaaatcattagagtccgttagcgacgcccgattccttacacgacggacagaagttacggagctactggcactattccaaagtagcaaagaaaatagaaaaagagccagaagtgtgcaagccaaaaaaaggtga

SEQ ID NO: 339282 - DNA, 549 bp, Pseudomonas aeruginosa
atggaaaagcgcgagattgacgatcagctcaaaagcctggacttcgacatggatgaggaagtcgacgatcgcaacgaacgtcgaggccgaaaggctgcgccacatcgccacgcccacactcccatggaccccagccacgccatcattctggccgccatcatcatcgtcggcggtttgtggggcgggaagcttctctacgactacatccaggaacaacccatcaaggccgccttcaacgaagctcctgcccatatgcggcagaccatgcagcaagccgagcaaaactccagacgcttacaggcagagatgcagcagcgaatggcggccgaagaagaggccagagaacaacggcgtgctgagcaactcgcccatgtgcaggcggagcaagcccgagcggaacaggaaaagcgcttcaaatcatcccagtgccagttctggtggcaacaacacatgcagaatcctactgagcggactgcccagaaaaaaatgaagcttgtaacaattagcgacctgagcagagagtcgaatacaaattatcaggacagataa

SEQ ID NO: 339283 - DNA, 384 bp, Pseudomonas aeruginosa
atgagcacggctcatcaagtggatgaaaggcagatagtccaaaggctctatgagatgaatattaccgataccagagagaagccgattcactggttcccgcacgttcggattcaggtgaaccgggtagacgatatcgatctcggggtgatttctggcgacctcggccaaagcccggcagattctctcgaaacctcctccgaagctttcgcggcgatggccggtaacgaggacgaacttgcgcgaggaatcgagaaactcggtcggagcagccgcctggcgagcaagcgccacatcgtatctcaaccgctggacgacgctcagcaatgcatcgataacggtatttcccgtcacaacgatctgctcggcagcgatcccttcctttag

SEQ ID NO: 339284 - DNA, 189 bp, Pseudomonas aeruginosa
atggtaataggctgcaaggctagcagccaatgtcgtagctgtgtcgccgtggacgaggacgatatcgggtttgaactgggcgaaaacctctttcattccctgcagaatggcgacagtgacatcggtcagatcctgacctgtacgcataatattgagatcgaagtcagggacgatcttgaagagatttag

SEQ ID NO: 339285 - DNA, 573 bp, Pseudomonas aeruginosa
atgcgaaccgaatcgcacaccctgatttctacgctgctcggcgtggtgaaccaatggcgccgccgagaggggtggagccgagagaccgtagtccagcacatcgtggaggcgcatgagcgcatccagggagcgctggtcaccggcatcgtcttcgacccgccgacgcgcgatacaaccgagcggatgaaggtcaacgccgaccgcgtgttccgctggctcgacgacggcaccaaggacaccaacctggtgccggcgaacttcgttcccagcatcctcgccgcgctgccgactgacctgaaggtccaggccctgggcgacatcctgaccccgctgggcgtgtcggtgcgtctgatcggcggcgatgccggccagcggccggaggtgctctgcatgctccggacgctcatcaaggagaacggtgaggcgcagcaggccgttgccaacctcgtcgacggcgccgatgaccaggaactgcaggaggcccaccgggagctctccgaatccagggcggcgaccgatgaggcgctgcggatgatcgaccagatgcgccggccgcgccttgttcaggggtag

SEQ ID NO: 339286 - DNA, 1065 bp, Pseudomonas aeruginosa
atgaggaaaagacatccaacggacgagatatatcaaagcattgccgacagaaggtctttgaaggctagcagatcgaccagaagatataatccaaacaaagctactcatgccaagagaatacttgacagagaagtagtaccagctccaagtagcatctcttttttcggaaaagagaactacaaaaaattctttgagttcttaaaaaaattatacatcacatcatcaagatcaaagataataatagatctacaaaaaacaaaagagataaaaatatccgccgcgttaattctgtacgcaacagtagagataatccaaaaaaaacaaaaaaagaaagacccaattaaaacaacagtatgtaggcactctagcgtcgccaatggattacaacgcatcggcttctggaaactcacgaaagaaagcaagcatattcgaaaaaatatctccatgggacttgaggtttgctcaacctcttacaaagatcaacagagtggtgacacatctcaactcaggcgtgcaataacgtatgttcaagaggcaatcaaaacctctggaatgaatgaagaagaaggggtaaaagcatttgctgccataactgagtcttttagcaacgtttggcaacacgcatacgatgacgatttttatccaaaacctctgacagatgatgaaaaaaactggtggatagctgtcgagaaaattgaaaaccaattattcattgcagtgtacgactcaggagtcggcataccagcaacactttcaaaaaaaccttggtacagcgatataattgatcatctactgagttcacttggatttcccaattccaacgacagcttagcaattagagcagctgttgagtatgggaactcgagatttaagacgggaggcagaggaaaaggtctggccgaagcgcaggactttgtcaccgcgaaccctgaaggacaaatgctaatatatagtggactgggctcctacgaattcaacgctatgagacctaacataaagagcatagagcctctaccagacagaatgccaggcacatttatacagtggaacatccggttgggataa

SEQ ID NO: 339287 - DNA, 1416 bp, Pseudomonas aeruginosa
ttgaagattaaaatcctcaaagagccaatgttggagttcggaaacggcgcgcacatatgccctaggactggcatcgaaaccctgggagtttatgacaagcgcgatgagctgaggcgtagtgaattacgcattggcatcgtcgggcgcggtgaaggtgttgatctcctggacgaatggctggacaaatgcaaacgcggaatcgtcggaaaggaagaaaccaagttccccaatttgttccgggggtttggtggcgtggatgaataccatgggttctacaccaaaattctgtcctctccccagtacacacgaaccctgcagaagtcagaaatcaacaacatatcgaagatcacggcccgtgaagaccgggtcgtgaaatgcgttgagctctactatgagcagattcgatttctgtccgagaaccgctccatcgacgtgatcgtctgcgtcgtcccaaatgacatcttcgattctctaaccaaggcgactggggacaaagacaccgagtcgctggaagcctacttggagcacaacttccgtcggcttctcaaagcgcgttgcatgcacctgggcattccgctgcaactcgttcgcgagaagaccatcctgtcagtcaaaccctcgatcgatcagcaagatctcgctaccaaggcttggaatttctgcaccgccctctactacaagggcaaccgcactgtgccgtggcggttggtcgaggacaagttcaagcccaagacctgctacatcggaatagggttctacaagagccgggatggcgaaaccgtctcgaccagcctggctcaagtgttcgacgagttcggacatggagtcattttgcgcggtgcaccagtgtctctggacaagcgggacaagcgcccttacatggacgaatctcaggcgtatgagctactcgacagcgcgttggctgagtatgaaaaggcgttgatgcagaagccggctcgcgtcgtgatccacaagtccagcaggttcaggcctaccgaagtatcagggttttccagggtactgaatgctaaggggatcaggacaaaagacttggtgtcgatcacgtccaccgatatccggctgttcagcgacaagaactacccgccaacccggggaacgctgctgagcctgtcggaaactcaaggcgtgctctatacgaaggggattgtcgacttctacaagacatacccaggcatgtacatcccaagcccgttgcgcgtggaagcgttcgaaagcgactcatccctggaagacctgtgcaaggagatccttgggttgaccaagatgaactggaacaacacccagcttgatggacgcctacccatcactttggagtgcgccaacaaggttggagacatcatgaaatacgtggatgcctcggagaagccacaggtcagctatagcttttacatgtga

SEQ ID NO: 339288 - DNA, 1470 bp, Pseudomonas aeruginosa
ttgagacagttagagattgagaatgaactaagggatgtcgtcagcagaatcattaaccaggttgacctatcaactaaacaaggcaggcttgacatcaacctgtcgctggaagatgcgctgattccgatcctgaaagcagcctacaacctacccaacctgattaacctcaataggcggcagaaaaacttccccggcatcgatctgggtgatgaccatgaccgtgtcgcctttcaggttaccgccaccacttctctggaaaaggtcaaaaagaccttgacccacttcgtcgacaagcagttctacaacacgtttgatgaactgtacgttttgatgctgaccaacaagcaggcttcctacagccagtccgcgattgacgccatcacaaatggcgcattcgagttttcaacgaagaatcacatcattgatcttggcgacattctagccaaggtgtccgggcttcgaatccccgctcaggagcgggtgttgaatgacttcaagatcatcttgggggacatcaaggcatatctggacttcaatgctgagggaaaccttcaatctcacacactgacttccaaccttattacgataacaccgcctgaaacagtatacgtcgccgaattgctgctgaatgaggcctcaatccttgagcaagcccgcgaacacctgaactttcgaaaaaatagctactctaggcaaagccttgtgaagatggccctactgctcaatggatctggcacggatgactgggtggttttcgaaaatcgaatcttcaccttcgaggacatcaacaactccagtattcgacatattgttgatgtaggcaccattgaagcacttgagtcccgcgacctctccgaatctgagatcgacgacaatatcaatattttcaagctacttttgaataaccatgtgcgtgagaccgtcaagcctcacaacattgtgtatgaccgccgagagaagatctttttcttcaaacctcacaacccagacgacgaaagccgcaaagaagactgggtagggaaaaagaaatcaacccgtcgagtgtacgaaaaggtgatgtccaagcgagaccccacgcgtctcgctcaccatgttcatttatcattcgaactgagctttaccagcattgcgcagcagtggtacgcactcgttgtgcctagttggctttatacttatgatggaaatcgcaagtctcgctttcatgaggatttgctatcaaagcaaaaaagacttgagtttaaccaaagcgtacgaaacatagttcgattcctagcctactacttgcgttcagtcaacagcccgattactaaggctttgcctaataactctgcttcgactcctgccctggacagcccagcgaatgaagtagaattcttcggcgagttattagagatcacttgcgaagaaaagctggtggaaggcgaacaggttggcgctgaatttgatgaggagttagcccttgaagattaa

SEQ ID NO: 339289 - DNA, 1140 bp, Pseudomonas aeruginosa
atggcacgcaagtggctgaagcaggaacggcggacaaaggaggagcttttcgatgccttggtgcgaaacgctttaggtttcgtcaatacctccatcgaccacctacagcaaaaacccaagaatgccattgtcgatctgtacacggcgatcgagctgttcctgaaagcccgactgatgaaagagcattggacactcatgctcgcgaagcccgaaaccggtgacctacaaaaccttgccgtgggagattttctgtcggtctacctggatgacgcgctgaagcgaatccaatcgattcttggcgagaaaatcgaccaggatgcttccgacaacttcaaggcccttggcgagcaccgcaatcagatcgtccattttgcccactcaggcatggataatccgagtaagacacaagccggcgtgattgtggaaacgtgggcatcctggcactacctccatgcactattgaccggtccttgggaggcggtatttcagccctactcagtggaactccaggtgctcaaccaacgcatgatgcgtcagggcgacttcatcaaagcccgattcgagatcctcaaacccaagatcgaaatccaggaaaagaaaggcaacaagatcgttacctgcggtcattgccacatgtctgccgcaattgtcggcgaaacccattcatggggtaccgactacacctgcatggtttgcggggttgatgacactgcagtggaagagtgcaacgcagaattaccctgccccggctgcaatgctccgtttaaattctttcaaaaaggtctgcatgcctgtcctgcctgcggccatcaaattaccaccgacatcctgatagacctctgcaccaaacaatttcccgagggcgacgactggtgcgaggaaggccacgtccacatcgcatcctgccacaagtgtcagcaccctcaaccctcggtatttttcatcgagggcatgtggagttgcgtatcgtgcttcgaccgtggctggggagcagtcgcgtgtgagagatgcgatgaattcgtcacaggtgacatggaaagaatcaaatactttgcctgccacaaatgtgagcccgacgtgagaaagggtctcttgggtttggccgagcccgccgagagccccactgctgaaggcagctaa

SEQ ID NO: 339290 - DNA, 3621 bp, Pseudomonas aeruginosa
gtggccagcaccctcgaagcgcgccgcgacatcgccctctccgccgggcgcgacgtgaccctggcggcggcggcgaacgaggagcacagcttcgccaccggcaagaaggtgacggcgaagaacgatcgggtggaacaccaatcgaccgtggtcagcgccggcggcgatctcagcgtgcaaggcggcaatgacgtgaccttcgttgccagtcaggcgaaggccagcaacgaggcctatctgtacgccggcaacgacctcaatctgctggcggctcacgacgaaagctattcctactactcgaagaagaaaaaaggctcgttcgggcgcagcagtagccggatgagcgagagcgaagccagtaccgtggtgtcgtcgtcgatccaggcgggacaaggggcggaactggtcgccaagcgtgacgtcaacgtcgaggcctcttccgcctccagcacgaagggcgagctggcggtcgtggcggggcgcgatgtgaacctcacggcagctgagaacagctactccagcgtgtccgcgaaatccaagtccggaggcttggggctgtcatccaccagcaaggccaacgcccagtcctcttcctacaccagcgttcagggcgccacgttgagtggcgataccaccgtggtgcaggcgggaagggacatctcggtggccgccagcaatgtggtttctaccgggaagactgcgctgcgtgccggcaacgacatcatcatcgacagcgtggcggagacgtcggagtcgcatcgcagcgagtcgaagaagaagtccggcctgatgagttccggagggatcggcatcacgctcggcacggcgaagaatgcctcgacacaggacacccgtaccgtcgtcaaccagggcagcaccatcggcagtgtgctcggcgatgtcgacatgcgggcgggcaagaacctgtctatcacggcttcggatgtggtggccggcaaggacatcaacctcgtcgggcagaacgtgagcattctcgctgccgacaaccagaacgtcagcgagcagacccgcaagaccagcaagagcggcttgacgctggccttgtcgggaacggtcggtagcgcaatcgacgccacctaccagaatgccaagcaggccaggaacgaagacgacagtcgcctttccgcgttgcaggggatcaaggccggcttgagcggcgtccaggcctggcaggcagctcagcagagcggcggcatgacgggcgagaacagcgcgcagttcgtcggcatcagcgcttcgctgggctcgcagaagtccagctctcggcagcgccaggagcagcagatcagccagggaagcacgctcaccgccggtggcaacctgaacattatcgccacgggttccggggctgtcggcgaagacggcgacttgcgcgtgcaaggcagcaagctgcaggctggcaaggacctccaactgatcgccaaccgcgacgtcgtgctggaagccgcggccaatacgcagaagctcgatggcaagaacaagagcagcggcggcgctgtcggggtaagcgtcggcgttggttcgggcgaggctggcatcagcattttcgccaacgccaacaagggcgccggcaaggaaatcggcaacggcaccacctggaccgaaaccaccctggacgcgggccagaaggccagcttggtcagcgggcgcgacaccacgctgaaaggggtgcaggtcaatggtgaaagcatcctggcgaaagtgggtcgtgaccttaccctgcaaagcctgcaggatcgcgattactacgattccaagcagaagaacgtcggtggtggggcgagtttggctatcgttggccagggtggcggcgccaacttgagtctcagccagagcaagctgcattcgaagtacgacagcgtgcaggagcagaccgggctgttcgccggcaagggcggcttccaggtggaggtgggcaagcacacgcagctggatggcagcgtgatcgccagcaccgccgaagccgagaagaatcgcctgagcacaggctccttgggctggagcgagatccgtaacaaggccgagtacaagagccaacttcagagtgtcagtgtcagcagcgccaacgatggcgccggtgcgttcgtcagcaacatgcctagcggcatgctcattgcctacaaccacggcgatagtgccagcggtaccacgggttcggcgatatccgaaggcaccctggaggttcgcgatccggcgcgccagcaacaggatgtggcgacgctcagccgtgacccgagccgcgccaacgatagcgtcagtccgatcttcgacaaggagaaagagcagaagcgtctgcagcaggtccaactgatcggcgagatcggcacccaggccatggatatcctgcggacgcagggccaactcgacgccgacaaggcggcgcgggccgaactggaagcgcggggtatctccgcgccggacgccggcgccagcgagcggcaagtcgaggactaccgcaaagcgcttctgggcacgaatgcctaccaggacatcatgggcaagtacggcaccggaggcgactaccagaaggccgcccaggcggtgaccgcagccttgcaagggctggccggcggcgacattggctcggcgttggcgggagcttcctcgccctatgtggcgggcgtgatcaagcaggtggcaggcgacaatgacacggcgcggatcatggcccacgcggttcttggcgcggtggttgcgcaggcccagggcaattcggctgctgcggggggcgcaggagcggcggggagcgaactggcggcgcaggtgatcagcgagcgactgtacggaacccgggacagctcgacgctgaacgaagcgcagaagcagactatcaccgcgctggccagcctggccggcggattggccggctccgttgtcgatgggagcagcggaggagccattgccggggccgcaggcgggaagaacgcaacggaaaacaacttccttggcggcggaaccccgccgggcttgatcagctatggtcaggcagcgagctccttgaccgagtacatgcgcaagaacggggcgacagccgaggagatcacccaggcgcaacgtgatctggcccagggacagggcttcgatggcgtacagccagcgaatgagttcatcaaggcctggggcgaggccatggttgcggaggctgccggccttgggattgttgcggggttgggtaggtttgggttgtgggttgggaaaggggcgggagaaactgccatagccgttcccggtcgtgtccaatctcgtataaatattgccaatggccgcacagcaactacaccgcttcgcgataccggaaggccagtatctgcggggtttgaccatgttctacaagggcatttcggagtagaggtttccaactcacggtctgtgttcactatcactccgagtgaactgaaggatgtacttcagagcagccctgttgttaagtcaccagttatggcattgcctgatgggcaattcgtgaggaccgttgatgtaggtaaagtaattggcactaccaatttaaaggatggaggagtgcccacctcggtattaaaaatatttactgacagagctggtaatttgatcacaaccttcccaatcaaggcggtggattaa

SEQ ID NO: 339291 - DNA, 1599 bp, Pseudomonas aeruginosa
atgcgaccacgctctgccctgcgctacagcctgctgctgctcgccttcgccgccagcgccgccatccaggcccagccgaagaccctggcggtgtgcaccgaagcggcgccggaagggttcgatccggcccgctatacctccggctacaccttcgacgcctcagcccatccgctgtacaacgcgctggccgcgttcgctccgggcagcgccacggtgatcccggccctggcggaaagctgggacgtctccgctgacggcctcgtctacaccttccgcctgcgccagggcgtgaaattccacagcaccgactacttcaagccaacccgcgaattcgacgccgacgacgtgctgttcagcttccagcgcatgctcgatccgcagcaccccgcccacgacctttcgcccagcggctacccctacgccgacgccatgcaactgcgcgacatcatcgagcgcatcgagaagatcgacgaacatcaggtgcgcttcgtcctcaagcacccggaggcgccgttcctcgccgacctggccatgccgttcggctcgatcctctccgccgaatatgccggccagttgatcgccaggggcaagggcgacgaactcaacagcaagccgatcggcaccggcccgttcgtcttcacccgctaccgcaaggatgcccaggtgcgctacgcagccaaccccgactactggaagggcaagccggccatcgaccacctggtgctggcgatcaccctcgaccccaacgtgcgcgtgcagcgcctgcgccgcaacgaatgccagatcgccctgacgcccaagcccgaagacgtcgccgcgttacgccaggacccgcaactgacggtgctggaagaagcggcgatgatcacctcacacgccgcgatcaacacccggcacgaaccgttcgacgacccgcgcgtgcgccgggcgatcgccatgggcttcaataagccgtcctacctgaagatcgtcttcggcgatcaggcccgtccggccatcggcccctacccgccgatgctgctcggctacgacgacagcatccgcgactggccctacgaccccgaacgggccaaggccctgttgaaggaagccggcgtcaccccggacacacccctgaacctctacatcagcaccggcagcggccccggcggcaacccggcgcgagtggcgcaactgatccagtccgacctggccgccatcggcatccgggtgaacatccgccagttcgagtggggcgagatggtcaagcgcaccaaggccggcgaacacgacatgatgctctacagctggatcggcgataacggcgacccggacaacttcctcacccacaacctcggctgcgcctcggtggagtccggggaaaatcgcgcgcgctggtgcgacaagggcttcgacgaagccatccgcaaggcgcgcatgagcaacgacgagagccaacgggtagcgctgtacaaggaagcgcagcggatcttccacgagcagatgccctggttgccgctggcgcatcctttgatgttcgacgcgcaacgcaagaacgtcagcggctaccgcatgagcccgatgtcggcgcgggacttttcgcgggtgaagctggactga

SEQ ID NO: 339292 - DNA, 1530 bp, Pseudomonas aeruginosa
atgagcctgcatctgaaacccggccagttgaccctggccgacctgcgccaagcctacctggcccccgtgcgcctgagcctggatcccagcgccgacgcgccgatcgccgccagcgtcgcctgtgtcgagaacatcatcgccgagggccgcaccgcctacggcatcaacaccggcttcggcctgctggcctcgacgcggatttccccggccgacctggagaagctccagcgttccatcgtcctgtcccatgccgccggcgtcggcgaggcgctggacgacgccatggtgcggctggtcatgctgctcaaggtgaacagcctggcgcgcgggttctccggcatccgccgcaaggtgatcgacgcgctgatcgcgctgatcaacgccgaggtctatccgcacatcccgctgaaaggctcggtgggtgcgtccggcgacctggcgccgctggcgcacatgtcgctggtgctgatcggcgaaagccgggcgcgccatcgcggtgagtggctgccggccgccgaagcgctggcggtggccgggctggagccgctgaccctggcggcgaaggaaggcctggccctgctcaatggcacccaggtgtccaccgcctacgcgctgcgcgggttgttcgaggccgaggacctgttcgccgccgccaccgtctgcggcgggctcagcgtcgaggccatgctcggttcgcgggcgccgttcgatgcgcgcatccacgccgcgcgcggccagcgtgggcagatcgacgtggccgcggcctatcgcgacctgctcaccgccagcagcgaggtggcgcgttcccatgagaagtgcgacaaggtccaggacccctattcgctgcgttgccagccgcaggtgatgggcgcctgcctgacccagatgcgccaggccgccgaggtgctggagatcgaagccaacgcggtgtccgacaacccgctggtattcgccgccgagggcgacgtgatctccggcggcaacttccacgccgaaccggtggcgatggccgccgacaacctggccctggcgttggccgagatcggttcgctgtcggaacggcgcatctcgctgatgatggacatgcacatgtcgcagttgccgccgttcctggtggccaacggcggggtcaactccggcttcatgatcgcccaggtcaccgccgccgcgctggccagcgacaacaaggccctggcccatccggccagcgtcgacagcctgccgacctcggccaaccaggaagaccatgtgtcgatggcgccgaacgccggcaaacggctctgggcgatggccgagaacgtccgcgggattctcgccgtggagtggctgggcgcctgccagggcctggacttccgcgagggcctgaagagttcgccgaagctggagcaggctcgccgcctgctgcgcgacaaggtgccgtactaccaggaggatcgcttcttcgcccctgatatcgaggccgccagccagttgctcgccagcggttgcctgaacgcgctgctgccggcccggctgttgccgagtctttga

SEQ ID NO: 339293 - DNA, 435 bp, Pseudomonas aeruginosa
atggcccgccgcaaagacgatcgaacgctggacatcttcgatgttccgcagccggcccgcgctatacctggtgagtgcaactacgccgcccaggtcagcgaactggtcagtgaaattctgaaggcttgcgaccttgaccgttacgaggtcgccgcccgcatgtcgcgcctgtccggcgatgacgtgagcaagaacatgctcgacgcctggtcgagtcccgcccgagctgatcacaacttgcctttctaccgagccgccctcctagaggacgtctgcgcgagccatctgctgaccaactggctggtcgatgtgcgtggcggccgcgtggcttacggccgcgatgcactgctcgccgaactgggccgccttgagcggacccgcgaggaagcgagccggcaggcacgtgaactcaagcgacttatgggaggtatctga

SEQ ID NO: 339294 - DNA, 1104 bp, Pseudomonas aeruginosa
atgacccagggcagcgacagcaagccactgatcgaacggcgctcgatcgactacatcccggcgaacgagcgccacggccgcctctacagccagttcaccctctggctgggggccaacctgcagatcaccgccatcgtcaccggcgccctcgccgtggtcctcggcggcgacgtgttctggtcgctggtcggcctgctcatcggccagctcctcggcggcgcggtgatggccctgcacgccgcgcaggggccgcgcctggggctgccgcagatgatttccagccgggtgcagttcggcgtctacggcgcctgcatcccgatcgccctggtgtgcctgatgtacctgggcttcaccgccaccggcacggtgctttccggccaggccatcggccagctcaccgggctcagcgacagcgccgggatcttcatcttcgccgccttcatcgtcctggtgacggtgctcggctatcgcgtcatccacatcatcgggcggatcgccagcgtcctcggcatcatcgccttcgcctacctgttcagccgcctgatgctgctcagcgacatcggcgacctgctcgccatccgccatttcagctgggcctcgttcctcctcgcggtgtcgctggcggcgtcctggcagatcgccttcggcccctacgtggccgactattcacgctacctgccggcgtccacctcgtcgtggaagaccttcctcgccgtcggcctcggctcggtgctcggcgcccaggcctcgatggtcctcggggtgttctccgcagccctggccaacggccagttcgccggccgcgaggtggcctacatcgtcggcctgggcagcagcgggaccgtcgccgcgctgctctacttcagcatcgccttcggcaaggtgaccatttccacgctgaactcctacggcagcttcatgtgcatcgcgaccatcatcagcagcgtacgcggccaactggagatcaaccgcgtgcaacgcctgttcttcgtcctcgcgatcgtcggcgcctcgacgctcatcgcgctgctcggccagcactcgttcctcgctgcgttcaagtccttcatcctgttcctgctgaccttcttcaccccgttgtag

SEQ ID NO: 339295 - DNA, 1023 bp, Pseudomonas aeruginosa
atgcccccgcttcgccagatcctcgccgtcctcgccctgggcgccagcctcgccagccagaccgccgtcgcggcggaatgcccgtacccgggcaaagtggtgttcgccgggctgaactgggaaagcggcatgttcaccaccgacctgttgcgctacgtactggaaaaaggctacggctgcgagaccgacgcgctgccgggcaataccgtgaccatggaaaacgccctgcgccagaacgatatccaggtcaccggggagcaatgggccgggcgtagcccggtgtggcgcgcggcggaggaggcgggcgaggtgttctccgccggcgagacggtgaagggcgccaccgagggctggtgggtgccggagtacctggtcaagggcgacccgcaacgaggcatcgaggcgaaggcgccggagttgaggtcggtcgccgacctgccgcgctacaaggcgctgttccgcgatcccgaggagcccgccaaggggcgtttctacaactgcccgaccggttggacctgcgagatcgtcaacagccagaagctcaaggcctacaggttgcaggacagctacacgaacttccgcaccggcaccggcccggcgctggatgcggcgatcagtgcggccttccggcgcggtgagccggtgcttttctactattggtcgccgactccgttgatgggccgtttcaagctggtgcaactggaagagccgccgttcagcgagaaggcctgggccaccctgtccgatccgaagaaccccgaccccatcggttcccgctcgttgccggcgaagatcaccattggcgtttcccgcgatttccatgacaaggcgccggcgttggtcgagctgttccgcaaggtcgagatccccttgccgctgttcaacgagctgctcgccgacatggcgcagaatcatcgcgaggtcggcgaggtgcgtgcgcagttccttcgccagcatcgcgaaatctggagccactgggtgccggccgaagtcgccgcgcgcctcgatacctccctgaggtaa

SEQ ID NO: 339296 - DNA, 282 bp, Pseudomonas aeruginosa
atggccgtgctccagacccataaagtcgtggcgcaactgcccgcgtcgctggagccgaacgcgatctacttcgtccggcgcagcaccggctacgaccagttcgtcaccaacggcgcgggcgtggtggtggcatacccgatgaacgtccgcatccccgcggctgtgccgggctatctcgccgacggctccatgctgaggctcacgatgaaccctgacggccaactgccggcctataccgccgccggcgctcaactcaacatccaggtgctgttcaatggctga

SEQ ID NO: 339297 - DNA, 327 bp, Pseudomonas aeruginosa
atggaaaggaccagaattagcggtattggaatgatgtggttcaaaaacgccactcaatacgcccagttcttggcgatcttcgaagacgctcacgtcatgcctaccacctactctcagtggttcaagcgcgcgaacggagcttatgaacagttcctgcgccaaggtgcttttgtcgtgaaagcacaggcaagcccggaagagttcaaggcctggtgcgccaagcatggtcatcagctcaatgccgacggacgcatggcattcggcagcttcaaggccatggagaagttcagtcaggcgaatcccggtcacgaacaacctggatcctga

SEQ ID NO: 339298 - DNA, 198 bp, Pseudomonas aeruginosa
atggccgtacttgtgatcctggatgcgaatccaaacgagcccgaaggctggcgatttctgaaagccgacgagtacgacggaacaggtcactggaacgataacaggactttccccactactgatgatgccgatgcgtggattcaaaagcatgcacgcaacggctggtacgcgctgatcggcggcgaagacgacgagtag

SEQ ID NO: 339299 - DNA, 249 bp, Pseudomonas aeruginosa
atgctgacgtatcaggaacaaaccgaagttctcaccggcctgctctcccagaccgccctcgctcggatggcgttcgctcagcgactcatggctccggccgagatcgagccctaccgcgtaattccgcagggtcgcggcttcttccacatcgtcgagacggccaccggccgggtgcgcgggttccgccgaagccacaacgaggcatgcgcatacgccgagcggttgaagcaccagcaggccgacaagtga

SEQ ID NO: 339300 - DNA, 1032 bp, Pseudomonas aeruginosa
atgtcaggcgcctgctacaacgaattcgacccatatgccgctcagtggcttcgaaacctgatcgccgccggccacatagcacctggcgacgtagacgaacgctcgatcgaggatgttcacccagatgacctcaagcactacacacaatgccacttcttcgcgggaatcggcgtctggtcgctcgcccttcgccgcgccggctggccagatgatcgacctgtttggaccggttcctgtccttgccaacctttctcctcggcaggcgaaggagctgggtttgatgacccgcgtcatctctggccacattttgcctggctcatccgccagcgccgccctggagaagtccttggtgagcaggttgcaagcaaggacgcggagccttggctcgaccttgtacaagctgacctggaagccatggaatatgccttcggggctatcgcgtttccgtctgcgggcatcggtgctccgcacatccgtgaccggacgtactgggtggccaactccgacggcagcgctggccgacaagggcgtcagaaccttcgagggcggccttctggaggccatgcgaaaccacggtccggaccttgcagcagtatcgtgcttgacgggatggcccagtccaacagcatgcgactcgaacaggagtccttcacaggaattcaaaacaccgaacatcacgctgaatcatgctgcggtactggcagcctggccaaccccgaatgcgggaacaccgcagagcctacggggaaatggccaggacccagaaatccgcaaggcgcaggggcatcagatcaatctcaaggatgcagtgcgctatctgatccacgaccagccggcccggttaacggtttctggtcagatgctgactggctcttctgccgggatggaaagtggcggccagttgaacccggcacattcccgctggctgatgggacttcctcccgagtgggacgcctgcgcgcctacggaaacgccatcaatgctgaagcggcgacgcagttcatagccgcatacctcgacgctacctcatag

SEQ ID NO: 339301 - DNA, 291 bp, Pseudomonas aeruginosa
atgcgcacgaaacccttccgcccgcctcagcggcatgagatcgccggccttcgctactaccgcactgcctcggcctacaactggctcggcatcaccatggcgcacccgacccgcgcaatccagttgctgctcgagcagtgcgagccaggcgtgctctcgccgatgttcgagattgagatcgacgcgatcctgcgccaggccgacgagtacgcgaaaaccggccaggtgctcgagcgcgagcaactgcgcgaaatgctcatgcacctggtctcgaaagccgcgggcgactga

SEQ ID NO: 339302 - DNA, 4026 bp, Pseudomonas aeruginosa
atgagcttagtcaaatatcctgaattcgcggtgctccttgttgcccttagaaaggctaagggctggaagcagaaagagtttgccatcacagcaggcgtcacccagcagacggtaagtcgatgggagcaaggagtctcccgtccaagggcgaaggaactgccgaacctcgctgccttgcttggtgcagagttgagtgcgatgacggccgccgccgcatatgcgctgccggattccagtagtagccagcctgaaggtgcaccgacatatgacgttcccctcccgttgcattccttgcggccggacagcttcgagaatttcagtgctgacttcctagctcgctattaccgcagtcgtgctggtgtggtgaatcgctttggcggtactggcagcaaacagtacggcattgatatcgaggtgcgtggaagctccttcggcgtgcataccttccagtgcaagcgagttgaggagttcggggcgcaaaaggttcatgctgctgtggctgagcacacatatgtatcagaccttaaggtcttgttgctttccaatattgcgagtccgaaggcccgcacggccatcgtgcaacatgcgggttggcagctatgggatcggatagatatctctgcgaaatttcgtgagttatctctggtcgatcgaagagatttggtcgacatatattttcgtgggcagcgccaagctcttcttggtgagcctgaatcggggccgtttcagaagcccgaagatttttttaagggcttcaccgatcgtgatcgttttttcaatcacgcgtggtcgttggtgggcagagaagaagagctcgaaaagctgacagagtatgtcctcgatgacaacctgttggttacgatgctcttgggggcgccgggtaacggtaagactcgattgctacgagaagtcgttgagagggtgcgcgaacaacagccagatatcggcattcttttcgtctctccaacggaagacgtaaaggcgcagcatttagaagaattgggccgcggtacgaagctgttgattattgatgatgctcatgaccgtgatgacctggctcagttgatgcggtatgcgtcagtggcagagaacgaagcgaggctgctgatatcgctgcgatcatacggtcgggctatggtacgtaaccaagcggcacttgtagcgatggacagtccccaggtagcgactgtggaattaaaaccacgctctaagcaggacgcgaaggtgctcgccacgcaggtattgcaggcctccgaagggccgcttgaggcggcggagatcatcgcggagttgacctatcccacacccctcgtgacggtgttagctgctcagattgtcgccaaagagaacgtttcgccggcattgattggcaacagcgaggacttccaggggcacgtgcttgccaggcttgaagacattatctctggcaagatcgtgacggggcaggatgtacccaagcttcaagccgttcttcggatggtcgcattgttgcagccggtggtgttcgatgatccgggttttcttagcatcctgcgggaggtagaggggctggagcacgaagattctcagcgccttcttcgccttctgagtgagggtggggttctctttaagcgcggccttcgtcaccggctggctccagatttgctggctgactccatcattcagcgtaatttcataggtgtcggcggggcagtaacctctaaagttgagtacgtctttgatctcgctgatgcggagtacttgaagcatctgctggtcaacctgggtcgtctcgactggcgtttacgcaacggggataccgagggcggtacattgctgtccagtatcgtccgtaagctccagtggcatggtaagtatcacaatccgcatattcacgccgtcgaggcggtggcctactaccagccacgcttggcattaaatttcgctgagcggcttatagaagaaggccatggtgatgacgacggcgtgtgcgggatgattcgaaatgcagtcttcaactcggatgttctggaagatgggtgcgtgctgctatggcgggcagggcgaggagactcccgtgcactaaactcgcaaccgaatcacggaattcggattctgagggaactcgctgaattttcaccaaataagcccgtggattatgtggagcgggtggtggcttttgctattgagctcttggatcgtcctgtagccctgtctgggttttacacacctttcaccatattagaaggggcgttagggaccgagatggaggaggttacgtcgagtaatcgcagtttaacgattactcgataccaactggacttcgagctcgccaagactgtgcgggcgcgagtaatcgacgtgatagtgagctccatagagaaaagtctcccacgtaaggcatttcttgctgcggggctgctgtctgaagcgcttcgcggccctattcatggcggcgaagatcatgaggcatgggatgcggcgcacgctgaattgcttgaacgtgtgcatcgtgtgctcgacggtgccacagttcatccggtggtgttggttcaggcagggatatctgttagttggcatgctttttacagtgacaagccagagtgtcgttctagggcgcgggctatagtcgcattgttggctcgtgacctcccgacccgcctgattaggcttatcggcgatgcgtgggggcatcaaacgtgggatagcgacgaatcatttgagcgcaaggctcacgaaacggagaccctcaagctgataactaaccttgcggtcgagtttccgaatgcgatggacttatacaagtttttggatcactggctttgtgagatagataaggcgacaggtaaagggtggggtaactcgcatatttttgttagtcgcttgctacaagaccgtgcggacttggccaaagtggtcatggccatgcagtctgatactcagtctcccttggacaatttctcgggggctgcactagcggttcttatggcacatcagaaccgccatgatttgattgctgagttgttggcgtctgattcgatgcgtgcttgggagatggtgtcggaggcgtatgcgcgtcaggccgatgacttcttcaccgatgcggatttgccggttctacgacgcattttccagtcaaatgaaccttcagttttacgcaacgctgcatctatttctcgtcaggtcgctaggcgtaatccagcattagcggtagagctgatctgcacagccaacctgattgcttgtccttccgccacccatgacttcttcatgctcctggcgcatcgcagtacccttccggcagggaacatcagctctgttcagtggcggatcctattgggagcgttagagcggctgcttgaactcgatgatcattgggtgatcgagtttctcaagcaagctattgagacggttccggcagacgttgttgagatgctgaaacgaagattgcaagacgttggccgctgcctcgggtataggtcgatgcgcagggatcgtaacggtgctgggcttgggttgctgtctcatcctgacggacgtcgactattgcaggagcttcttacatgggctgtggatagccaggcagacgaaaagctagcgatggatataggggcctgtgtatcggggctttgcggtaagtatggttctgaggttctcgatttactgctgaaccttctaaaaggtggtggccaggctcacgtgaatgtcatcgcgagtacgctacgaagtgcttatcaatcgttcgtgattgatgagacaccgtttgttcgggagctactaagtcaagcggaactcatcagcgataaagccgtaaaagatatctcctcggcgttatggtcgtccgcagtctcaggtgggcgtactgggcttgccggagagcctttcagggaggatgtgctattgcaggagtacgcagaaaaaactctcaagggaatgagcaggatggacccggcttaccgactctacggctggcttcttcagtacgcaaaggacaacattgagcggcaggcagacgagaagcgctcgatggaacttgaggatgagtag

SEQ ID NO: 339303 - DNA, 243 bp, Pseudomonas aeruginosa
atgatgagtacaaccaaaaagctgcggctgggcccgttgcccaagaccgagagcgtcaaactgaacttcacatgcccggccagcttgaaggctgacctcgaccactatgccgcgatacatgcacaggcctacggcgaggtggtcgatgcggtgacgttgatcccatacatgcttgaggcattcctagcaggtgatcgggggttcaagcgggctgagaatcaacgctctaagccccagccttga

SEQ ID NO: 339304 - DNA, 330 bp, Pseudomonas aeruginosa
atgcgtagcgttctcgtgctctcggttgccttgctggcggcttggggtcggtcgccctgcgagtatctggccgaaacgctggccgccaatcccgcgcggctcgcgacgttgcgtgcggagtgttcggccgactggcaggcggtgggcgagggtatctgtagggccgccgccgaagcgtaccggcgccgcttcttcaccggccactccggcccgggcgagtacgttgttctggaggcggtaccgccggttccaccgaccttcgatgagcccggcgacgaggtggccgaaagcgctgcgtggctggttgtcttcaaggaggacgcaccatga

SEQ ID NO: 339305 - DNA, 264 bp, Pseudomonas aeruginosa
atgaagaaaattatgccgtttctctgtgtcctggcccttgcggcctgcggtcagcctgaaacaccgacgacgtcggcgttgcctacgattgatgagctcgtggtcgatcccgcacgactgaaagagctgcgccagcagtgcaagctggagcgcgcccagctgggtgacgaactgtgcaaccgtgtggccgaggccacgcgcaaacggttctatggcgatgggaaagtgccctacacgctgccgaaagagccgcccaagctctga

SEQ ID NO: 339306 - DNA, 654 bp, Pseudomonas aeruginosa
atggtctcggtgagtatctgcacagcaatgttgccattttacgacaagtattggctggggaataaggaaagcaccatccccagcatcttcgcaggtatggctctgctcacggttgttactacttggtgctggactttactgtcgaggcgtataggtaaacacctagcctttattgtggctacagtgctctatgcagcagcaaccgcgtctttatggctcattatgtacggtaacgtcggtttagcatttgcaatcatcctgttcggcatagccaatgctggccaacaattattttgcttcgcgattgttcctgacattatcgcgctgcagcgagcgaggacgggaattgccgaggaaggtgctttcactggactttggatatggggagagaaagttggtttggctatcggtgccgggctcagtggtctggttttgcaactagtcgggtttcagcagggcgcgggtgtccaggtgttggagcagagtgagaccgcattgtatgggattctattgatggccactttgctaccggcgctggtttgcttgctctcgataccagctttgctgtgttctgccaaagctatgtctgggctaggtgggcgtgatcatttgtcaaacaaggcgcagcagagtcctgggctttcgtctggctga

SEQ ID NO: 339307 - DNA, 2472 bp, Pseudomonas aeruginosa
atgacctcgccaagcgaagcatcgagaaagccgggcttgatcgtgcgtactcgcctgctggaacggctcgagccggggcgctgtcggcgcatccgcttgttacatgcgccggccggcttcggcaagagcgagcttgcccggcagctcgctgagcaggctcggcagccgttgctttggttggatctgcatagttcgccgggtgggctcgagcaattctgcagtcagctcgccggggcgctcggtctcgatgccgaggcttccttcggccaggtagaggaggccttgcaacggcacgtaaatgcattcgtcgtgctggacggctacagcaacgaggcaaccacggacaaatggctcgaacgcctgttcgaggcatccccgccaggtcttcagtggctggtttgcgcacgctgccgacccgcctggcggattggtcgctggctgctggccgacgaactgctcatcctggatggagacgacctggcgtttaccgtcggcgagactgaaatgctgctgtcgaggctgaacatggcccgcagcatttccgccgaggacctgcagcggcagagcgaaggttggatcgccggcattcgcctgcacctgctctcgttgcagtcggtgggccaccatgcgagcggcctattgcaccggaacgcgctgatacaggactacctcgacagcgaagtgatggagtacctgtcagcggagatgctcgacctcttgcgcgtcatcgcccatgcgccattcgtcgacggaccgctctgtaccttcctcgccgacgatccactggctctgaaccggcttctggagcaacaagtcttcatgcaccgtctgccaggctccgaagaccgctttacgttgtttgctccgctcaagaggatccttcaggagcgctacccggaccaagctgctcctttgcttgccgccagcagttggctgcatcttgccggcgctcatgtcgaggccttccgatatgcgctggccattccggacacctcgcgtgcgcttgtgtccatagggcggactgccccgcgcgagctgtatatcgggcagaacctgaactatctgctagaaggcatcgatcagcttggcccggactggctcaaacaacatccggaggctctggagatcatcgccaggtccctgttgatgggggggcggctggatgaggccgaggccaccatcgaactgattgcggagcgagatagcgacctgcgcatggccctgagcgccgagctgtcgctgcatcaggggcaggctcagaaggcccgtagcctgggtttccaggccctcgatgggttggcgcgaaatggcctgtgggcgcagatgatcctctgcttctcatgcctgacccgtgccagccttgccctcggtgacatcgccacggccaggcatctgcagcatcaggggatcgagttgtcgcggcgcaagggcgaagtgcttttcgaatgcctgcttatgctcgaccaagcgcagatcgacgaactcgcaggcaatctgccccaggcccttctggttcttgaccagatcgacttgctgctggcccagaaccctagctccgctctgctaaagggatgcaagtcgatccggcgcggctggttgttgatcctcactggccaggagcaccaagcacgccagaccttggaggatgggatgttgctggtccaggcctgccgtagcccggtgagcgtctacggccatgtcttgttggctcaactcgatgctaacaatggcgatttcgcctcggcgcagcagcgcctggttaatgtgcagcgccagatgcatgcgtggaatgtcgccgaagtcatctatcgcggtgttctgagcatgagcactgccagggtctggctgcggagcaaccattccagctcggcaagccagttactgtctcgactgcgtgagcagtatgaaggcacgcaagccctcacttctccaagttcgtttcccgaactgcacgccctgttgggcttccttcaagctgaggttctgtgctccagaggctcattaggtgatgcaggtcttctacttgacgcagtgctggagtgggcggagggaaacactttcgaagttcttgtctgccaggctcgatacgccttggcggaggtccgccgcatgaaaggtgacgtgctccagtcggagcgacttttcgcctctgcagcggcgatggcggtgcatcaagggcagcgcaatttactcacgggcattcaatcaggagtagtcgaacctacatcggagaacgatattgccgtcatcccccagggtatgccgacacaagaaacggaattgctcagccagcgtgagttggtagtgctgggcttgatagcgaagggctattccaataacgagatcgcctcaatcctctcgctatccctgcataccgtgaaaacccacgccaagcacatcaactcgaagcttaaagccagcaatcggacgatggcggcagctcgagccaaagcccttggcctgctcttgtga

SEQ ID NO: 339308 - DNA, 798 bp, Pseudomonas aeruginosa
atggccgatcacgacgcccagcagtggtatcccaccgcggcctacctctacgtcctgcacctggacgacctggccctggcctgggagtacctgcgccggaacccggagtaccaccgcgattggcaggatcgcccgctccagcccgaggctgcgcagcgttgggggctgcgccagctggaggacccgcgcctggatgcgcgtgatgcgcagccggcctggtttcccgagcacccgcagctgatccagctgtatcccgatgccgaccccatgcccgatgccatggccttcgacctctggcgcatcccggggagcaagtgcctggtccacgacggccggcgactgctgctgatggtgcgttggccgggctgctccctgcgcgtggctctggcaccaggtctggaagcaggcatggcctacgtccatgccgtacgagcctgtgccaggccctgcgcacgttactgcgccctcgcggctgagctggacaagctggctgtcgcggttgatgccgcgccggttgcggtggcccgctgccggccgaccccggccgccttgctggagctgcataccctccaggcgctcgacgccaccctggcgggggcgtccttgcgcgaggtggccgtggggctgttcggcgcggacgtggtgactggtggctggcacgccgatggcggcctgcgctcgaaggtgcgtcgtctggtgcggcgtgggcggacgctgatgcatggcggctatcgccgcctggcacagctcgacgggcacggggagggtcgttcgacgccacccgcaaaacgaccctga

SEQ ID NO: 339309 - DNA, 351 bp, Pseudomonas aeruginosa
atgaccctgtcgctcatcaccgagacggagctcacacagatgctggcgaacggtcgcgctcgggcggcgggccaggttatcgacctgttgccggtggtgcgtctgttcacccccgacgcgcatgcgacctggcttctggcttcactcgatccggccgacgaggatacggcctatggcctgtgcgacgtggggatcggcatgcccgcgttgggcaccgtgaaactgtccgagctggcgtccatcgtcgggccgctcaagcgtccggtcatgcgcgacctgtacttccgggcgacgcgtacgctgtcggagtacacgcggctggcgcagctcaacggctcgatcatcgattga

SEQ ID NO: 339310 - DNA, 867 bp, Pseudomonas aeruginosa
atggtgcgtgacgaccagctcagccgtgcgaacaccgagacacactgggatccttccgcctacatgcagtttgcccggctacgccagcggccggtggtcgagctgctcgatcatatcgagatgcacgccccccagcggatttatgacctcggctgcggcaccggcattgccaccgaattgctcgcccgccgctggccggatgccgagttgcacggcgtggacagttccgcggagatgctcgcagaggcggcgcgcttgccgatcaaggcatcctgggaacgtgccaacctgcagcactggtgtgccgagcgtccgggcagcctgatattcgcagcggcggtgctacatttcattgagcgccacggaagcctgcttccgcgcctgctcgggcagttgagccccagcggctgcctggcggcgcacatgccgaactggcgcgatgcatcctggtatcgcctgatgctcgacgcgctggacagcgccggtcctgctggctctccactcggcagcccagcgctgcgctacctgatgcaacagcgcaatgtgctgtccttagacaactactaccgcctgctggcaccgctctgcgcagaggtagatatctgggagaccgagcacctgcaggtggtggatggtaacgacccgatcttcgactgggtgaaggtgtcagccctgcgtccggtgctcggcgagttggacgaggaggcccggcggcgtttcctcgatcgttacctggaactgctgcaccgttactacccacgggagctagatggacgaacgctgttcccgtttcgccgcgtgttcatcgtcgccagccttgcgccactgaagactcgggcaaacttccgccctaaggatgaagcttaa

SEQ ID NO: 339311 - DNA, 423 bp, Pseudomonas aeruginosa
atggatagccatcagcagcctcgcgccgcggcgcaggccgatattcccctgttcccccagcagacccgggagggcctgcaggccctgctcgacaagctgcagccactgatcgagggccaccgcctggacaacctggtcgacctgctctcgctactttcggatctcatcgacctgctcgacccggccatggtggacaggctggcatcgctcttcgagcaggccaccaatgtcggctggtccgtcggcaacgcagtgcgcgtggccaaggccgaggtgctgcgtgagcaagcgccgaaccttaaagacctattgcggctgttgcgcgatgccgatacccgacgcggcctggcgctagccctggggaccttgcgcagcctggggcgccagattgccgccgagcaggagatcacccatggtgcgtga

SEQ ID NO: 339312 - DNA, 1188 bp, Pseudomonas aeruginosa
atggaccgagttatcatcgtcggcggcggagtaggtggcaccatgctcgccaaccttctcgtggccaggctctacgctgaggtcctcagcggcagagtgcaggtgatgctgctatcggattcgcccgatcactactacaagccggcgttcatgtacgtcgcctttcagcagttcttcctggaagatctgaagcgaccggaacgttcgctgttgcgcccagaagtggagttccgagtcgaccaggtggtccgcttcgatttcgctcgccaagaactgcatacccgcagtggcaagcggcacggctacgactatctggtcattgccactggctgcgtgccggctcccgagcggattgaaggcctgaaggaagccggcgagcacttctaccagtaccagccggcgcgccggctggcggagcgccttgccaacctggagtcgggccggattttcatcacggtgagtttcccgaaaacaccgaacgtgccccaccagtgcgggatcgcgcctgtggagaccaccctgatgctcgatgactatctgcgccgtcggggcgtccgcgaacgtgtggagatcgtctacacctatcccaccactgcccagctgctacgcaactgcctgttcctgcaacggccaacctgcgagatcctgccgagtctattcgagcagcgtggcattcgtttccagcgtggtttcaccttggccagggtcgaccccgagcggcgcatcgcctattccgaagagggcgatgagcagcccttcgacctgctcatggcgacgccgccgattcgcgcagtggatgtcgtcagggagtgtggcctgtcgcaatccgccgccgacgaaggctggttgccgacgaaccatgaaaccttgcaggtgtatggcgccgagcgggtgtataccctgggcgataccgtcgatctaccggtgagcaaggccggaggcgcctgccacaaccaggcgccggtgatcgccagcaacatcgccgctgagatccgcctcggcagcccttgcgcaacctacgacggacgggttcaggccgtcgcacagatgggcctgaacaccggcatgccgctatggtacgactacaggcacgacgtccagccgaccccgccaaccaagcttggcggtctgttgcgccagggtttcaatcgcgggctgtactgggcggtcgctcgcggaatgctttga

SEQ ID NO: 339313 - DNA, 561 bp, Pseudomonas aeruginosa
atggcactggcaacacgggacgcgttaattcaagccgctgaagggctgatgcgcactaaagggtatgcagcgttcagctatgcagatcttgcagacgcggtaggtattcgcaaggcgagcattcactaccacttccctacaaaggaagacttggggatcgcgatcgtcgaagagtacgtctcgcgggtgcaagccgagttcgagcgaatcgagatcaatcaggcaggtgcagttgagaggctcaaggctttctttgtgctcttctactccagcaccgagggtggtctgttgccattgtgtggtgcgctagcagctgaaatggctgcattgcccgacgggcttcaacgcctgacacgacggttctttgatgtgcagttgtcttggttgaccagagtgatggacgaaggcattgccgctggtgagttagcccgggggcgaggggccagagaaaagtcttacttgctgctcagtatccttgagggatcgagcttcatcaactgggccaccagggaaggtgagactgtgaatattgctgtcattcggatgatcgcagagtactga

SEQ ID NO: 339314 - DNA, 972 bp, Pseudomonas aeruginosa
ttgaatggagttcctgcacgtttatgccgttacaggtcgctagacgagagcctgtttcgcagagagatggacgcacttaaggattcatatttgtatgcgccttcgtttcggaagatgaatgatccgatggaggggttctatcagcttggaggtaacgaggactacttccttaagacttggctgggtgcagaggatgagtatcgtaagctccacaaaatggccagtgatatttttgaccggctagccattatctcgctttctcagacaactctcgattatcccctgtgggcgtactacgcatccagtttctctgggatgtgcctagaattcgatacctccattctacaagttggcgggctgcaaggagagaacctcgtcaaggtcgtctaccagtcagaagagcttcccgctctgggcctgatgcgctttgctagcgaaagtggtcgggaagaattagtgaagcgcatttccattaagcgggaggaatgggcccatgagaaagagtggaggtttgtcgttggcgaggaggggaagcgttattacagagatgatgctataaagagagttctcttaggtccaaagattgatcctaggttcgaaagtgagattcttgagctgctatcaaatcggcctgttcaagttcttaaaggaagtatcgagggtatgtctatgcattttgatgtaattcaggatgcatgtgaactagaaaaatgcgaaagggttggcgaaggagcgtttgagccggaaaatgatttgtatggtgaagagatcaaagagtttctcaaggttccttttgaacggcttgtcgagaagtgcaaagagatctcacggctacccaacatggattcgtttgggggagtaggcgtctcaaaagagcgacgcctgtttctctggacgagctaccggctgcgctctggcacttcggcatacgaaagggtgtatttcgatgagtatctcaacccgctaggctag

SEQ ID NO: 339315 - DNA, 174 bp, Pseudomonas aeruginosa
atgagcctagagggactgatcaacgtcgttgctctcgtgctgacggcctacctcctgtgcggcggcgctccgctcaagcaacccaccatcccctcctgttgggtcagtccggtgcaactggagtgttggacgttcgccgcgacgccggccgggagcgcaaggcatgagcggtag

SEQ ID NO: 339316 - DNA, 390 bp, Pseudomonas aeruginosa
atgactagcaaccgtgtttccctggataccgaaagcgccctgacctatctggggcaaaccgtcctcttcgaattggtatgggaacaagaccccgagccgctctggtgtctccttcatgttgtcggcgtcgtcctggcactcgaaggcgttcacagtgatccctacttcctcgtcgtcgcggccaacggcgaggggcgctatccgaacgaattgttctggtccgacattcgcacgattcgggtgatgcggcaccgcgaccggcatggttccggcaacgtactggaccgcatcgcccaccctaaagatccgcgctcaagggccgcgctcccggctcgtcggaacagccccaccgttccggcgaacggaagcacgggcgcagcgaacccttga

SEQ ID NO: 339317 - DNA, 1872 bp, Pseudomonas aeruginosa
ttggcaactgtagttccgcagcacaaaaatgttaaacaatgctttcagagccactactccctcccgtactttcagagggagtacaaatgggaaccaaggcatctagaagagtttaccagcgatatccaagaggcattcctggataactatgaccagaaagatggtcgagctgcagtttctcaatatagctcctattttttgggttcgattattaccgcgccagatcaggatggcaaaatccctttgattgatggacagcagcgccttacttcgatatttattcttatggcgtacctgtatagatacatagaagataataaaatttctgatgcagccaaccttagcgatttactctggaacttaaactacggagtaaaagactacactattgaattcagccctgtcagaaaagacatatttgacaaatacctgaatacaaagaagctaggcgctgctgctctgaaggacgcagaagatgtacaagatcttgacgagagcgataagaaaattctccaagcgctccgaagccttgagtcactcatagatacagaagtaattcaagccctcccgtactttgtagactacttgcttggcaaggttagcctaatagacatttctgtcggaagtgagtcagaagcacacaaagtatttgtgagcatgaatgacagagggcttcgtcttggacctatcgatctgctcaaaggccagatcctatcgaaaattgacctaaacgatgacgcgcgtgcctgcaacgctatctggattgataaggtaagcaagcttcgagcggatgacgcagaaggtgactctatatttattcgtactttattcagagcgcagtgggcggacacaatgcgcggaaagaataaaggggatcaggccggcgactttgatttaataggcgatgcatatcatcgctggtttcaagacaactcagccaagcttcagcttcaaaatggcgatgactataaaaaattcattgagaagactataagcaaatttgcagatatttacagattcattaagactgcagaagacagcctaacttctggctacgaagagatctactataactccgcgagaagatttagccttcagtcgatgattcttttggcatgtacaggcgttgatgaccttgaagccgactggaagcacaaaatctctcaagcctcgaaacttctggatcttatcctcacatccagatccatcgaaggcaagcaaaataactacgacaatttaaaagagatctctttccagataactaaggatataagaggaaagtcgaaggtagagctagatgcatacgttaaacaggagtggccaaggtactatgcggctctgaacggccttgctggcgtgaaatataccaaggcagataggagcgacattctctactatctagcaagaatctcctgctacatcgaaaatgacttcgatactgccaacaaaacagagttctctgtatattggcagcgggatcgtggcgcaaaaactttcgacatagagcatttgcttaagaaaacctacgacgttaccagtctaccggcaaaccacggcttcgcagatgccaaagaatacgatgacaggcgcaatttacttggagcacttaccctgctccctcgtgcgagaaacagatcacttcaagatgaacgctactctaataaacttgccgtctacagcacagaaaacaccctcgcaaagtcgttctgcgatggattttatcaaaacaacccaaagctaacggcttttttggctgcgaatcccgaagtgcagctaaaagcaattggtgacttcacgtcagccgatattgacgagcgcgcaaatgtctatatggctgtggcgaagaaaacgtggagatgccccattgtgtag

SEQ ID NO: 339318 - DNA, 1035 bp, Pseudomonas aeruginosa
gtggatattctgcaaaaggcactggacaaaatagtctgtgagtatgcgcaagaagccgatggagatgaggcgctagaagcgctagaggaagctctgaaaaatagctacatcgagattcttgcatccactccgataaaagttcttgattcaataaagaaggcggctgcggacggtgggcttgaagagagaagaaatctgcacaagggatttgttgagcgaaattatactcgatggaaagagggatttgactcgttagaagttttaatagaaatctgctcggaagccggggaatctaacgctcaacggcttgggtcaaacgagctaattcatgacaatcgctatggcgccttgatgaggctgcatgctaagggttgcttggtggcccgcgagatattctgtctgcttttaaacggtttcgcagatggagctcatgcacgatggcgcgctttgcatgaactgtcggttactgcaatgttcctgggacggtgtgatgaaggtactgtcgagaagtacttcttgcatgagtgtgttgagtcctataaaggtgcgctgatgcaccgaaagtatgaagaccggcttcaagccaagggtgttaatgacgaagagctggctgaattaaaggcacttcatgattcagtggtcgagaaatatgggcaggattttaaaaattcatatggatgggctgaggcttttttaaacaagaagcgtgtgaattttcttgatattgaagagtatgtagggcttgatcattggcgcccatactataaatgggctagccaaaatatacatgcaacggcaaagacgctgacttgctcgcttggaatggttgaagcgaaagaggaggggttgctggcggggccgagcaactcgggtctgacagacccagctcattcaatggcaatttccctggttcagctgactacggttctgttgagcgttgaccccaacctagatgatttggtgagcatgaatatgatcaagacactgatcgatgagattggcgacgcttttctccggggtgctggccttgcatga

SEQ ID NO: 339319 - DNA, 1293 bp, Pseudomonas aeruginosa
atggcaaagccctatcacatgctgcgcattaccctgaagcccaatggcgagttcgtggagtcggagagcggtcgcctgttcttcgatgaccagcgcaagcgattcattgacctgtccaacgtccggttgctgcgctgcggcgtcgacaccgttcgccagttgtacaacggcatgattcgccctgaagtcatggcgctgttcgagcagccggaagagttcgtcaaatttgctggccaccagtgggccaagggcagggtagggcgcgactcgggctatcagtaccgtctgcagaacgccgacatgggcgtgatcctgctgatcaagaaccacaacgtgaagctcgagaacatcggggctcacctcaagttcgagatttcccctcacgccctggatggggcggatccgcaatcactccaacgcctgatggatgacctggcgcgggctctgctgacgcactgcgaaaccaatcagtgtgccgtgcacctcgccctggatgtgcaggggtgggagcctccgcgcgacatcgtggagcacatgcattgccggtcgcatcgggtgcgccagattaccgggattgagcgcattgagttcgacagcagcgcctctgtttacggtcgcggtgagacgtacatgttcggctctgccagtggcctgcaactgtgcatctacaacaaaaccctccaggcacgcgccaccgacaaactcgattactggagcaaggtatgggcgtcgctgaatggtgatccgttcggtgatggtgacccggcgtacaagcctgaagaggatgtttggcgtcttgagttccgcttccaccattcggtcattcagcagttctccgaaggctccacgctgtcctctggtgaggtgatcggttgccgcacctatgccggcctatgtccgcacctgcaaggcctctggcgctacgcctgcgacaacttccgtctcttcaaatcgaagtcccgcctcgatccgttctggaccctgatcttccaggatgcaaaggtccaggtggaagccgatccgctgattgatcgcaccgagtaccgccgctactacaagaccgcacagggcttctccggcaagaactgcgagatgttcctgggccagttcgtgagcctcatcgcacgggagcgcgtgaacataaaaaaggctattgaggtcggcaagacgctgccgttctggcacgtgatcgaggatcactacaaggccaagggcttcacgactgtcgacctcgaaaagcacatgcgcaagctgctgaatgaccggtatttgcgacgggggtactccatctag

SEQ ID NO: 339320 - DNA, 390 bp, Pseudomonas aeruginosa
atgagtaactcaccgatctccctggatgctcagagcgcgctgccttatctgggcaagaccgtcctcgtcgaactgggctgggaggacgaccccgaaacggtctggcgcgtgctgcgcatcatcggcgtcgtactgccggccgagggcgtgcgtgacgaaccgcacttcatgacggtgccggtgggcgtaaccgacgaattcgcgaatgagaccttctgggacaccattcgcacgatcagggtgatgcggtaccgcgaccggcagggttccggcaacgtactgggccgcatcgcccgccctgaaacatcccggtcaggggccgcgctcccggctcgtcggaacagctccaccgttccggcgaacggaagcacgggcggagcgaacccttga

SEQ ID NO: 339321 - DNA, 222 bp, Pseudomonas aeruginosa
atgagcaacggcaaggagaactggaacctcgacctgtgcggcatcgccaccttcgcgcagatgtgcggcgtgacgtatgacgaagcggctcagtgggcagaagacggcaccgtcccgagcatacagatgggctgcttccgcatgatcaacctgatccgcttccgcgccgatctggagcgcggcaaagccaccttcgacgcaggggactacagccatgagtaa

SEQ ID NO: 339322 - DNA, 216 bp, Pseudomonas aeruginosa
atggaactggaagagctgaaccccagcgccctgatagggccgcagcaggacatagaaccgattgagcattgggcggagcgcaacggcatgagtttcggcatcgcccgcgcctgggtgtaccgcggcatcttgccctcggtgaagttcggcaagttgcggatggtcaacagcgcgctgctgcgtagctggctgctgcaacaggagtgggtggcatga

SEQ ID NO: 339323 - DNA, 852 bp, Pseudomonas aeruginosa
atgaacctaattgaaaaaacttctcgcgagcacttttcaaaaagcttcacctccttaagcaatgaagtttttgataatgactacatagagaccctgggctcgactggaaaaaacccaagggtcgagacctgctcttttagatcaacagtatttgttcgctgctactttagaaacgtaacgttcgtaggctgtaacttcacggcagcaaaatttatagactgcaactttaaagaatcaaaatttatcggctgcgtgttcaattactcaatgttcagacgaacaataattgacgccaaggagataataccaaacctcccaagagagccaaacatccaacgagacctgttgagaaatctacgagttgacgcccgcgagcttggcaatgcagaagacgagagcttctatataagaaaagaaattgcagcaagcgaaaaatttcacttatctgcattcttgggaaaagatagattctatcgagagaaatacggccacattgagagactgggcttcttcttacagtggtgcatatcaaaaatatccggcctcgtatgggggaacggtgagcgccctggtaggattgcagcattctgcttgcttttaattattgcaatgtccgcctttatatttctttacaacggaaactctaccgagcttctcacatccggcaatgccacccccgtattacttcaagcattaaagctttcaactagcgaatttctcggtataccttacgaggcaacagattacaccttaaagatacctttcttattctctgtagctgcgatatcactaagatatgtgattattggtcttttggtttcagtattctttagagttttctcaagacgatga

SEQ ID NO: 339324 - DNA, 699 bp, Pseudomonas aeruginosa
atgaagacgaaagaatccggaatattagatttgcggtactttggatcgattatcagagaagactttgattacgcgagcgacgctgacatattgtgcatcgtcacagacaaggctgcagccgacctcaacggaatttctaaattactcgacagcgctctagtaacagaccgggagattgatctttccgtttatggcgccgacagaatttcagaaatgtacaaagagggccacttgtttgcatggcatatatacctacagtcgaaaccaattactggccacctaaactttctagagaacctaggagttcctggagaatacaccaaagcaaaaatagatatagagaacctcataaaaattgtacaggactctcacttatcactaatggatgactcttgctcgccggtatacgaggcagggctattatatgtagcaagtagaaatattggaatttccgcttcatggaagtcaagcaacggattagatttctcaaggcatgctccctacagccttattcttaatggacaagataaaggcttgccgctgaaaaaatcagaatatgctatgctgtgcgagtcaagacatgcatccacacggggagtatacccaccaagcatcacccgagaacaatgcattgcaatatgcgaaattgtaataaggtgggctaaagaggttcttgaagagatcaaggtgagcttatga

SEQ ID NO: 339325 - DNA, 123 bp, Pseudomonas aeruginosa
atgagaaaagctctgaccgccctcggcattatcgccgtcctcgtcctggccgtggtagggctggtggagatattcccgatcctccgcacgctggcggcctggcagacggggtgcttcggatga

SEQ ID NO: 339326 - DNA, 471 bp, Pseudomonas aeruginosa
gtgaacaccgaacagttcatccgtgactcggccgcgcgcgggctttcccggcgcgcaacgatgcacgcgctcggcatgggcccctggaagttccgggagctgctgaccctgatgccggagatcacttggccggcacgcggatgctcagccgaccaccagcgtgcgaacgagcagaagcgcgggcgctgcacaccggcgcaggccgcagcgctggagcgcgcacacgaacgctggagcgagagcagacgcttcaccgtcgacggcgtgaccgggaccatcgccgagctggtggagcacttccagagcccggtccacgcaacgaccgtccgccgccgcgtcgccgccggcatgagcctgcgcgacgcactccttaccccgcgccagcagcccaagcccgggcgccggcatccctggaacaggccaacttgcgattttgcgcaagttgccgtgtcgcagcaggtgcagccatga

SEQ ID NO: 339327 - DNA, 1020 bp, Pseudomonas aeruginosa
atggacctggaacggaatctcatcaacctgcacgaggacctggtgtccggctcctaccgcccagatcgctccatctgtttcgtggtcacccgaccgaaggcccgggaagtttgggccgccgctttccgggaccggatcgtccaccaccttctctacaaccacatcggcgccagcattgaagcgaagttcatcgctgacagctgcgcctgcatccccgggcgcggcacgctgtacgccgccgagcgtctggaggcgaaggtgcggagcgtgacacagaactggaggcgaccggcacactacctgaagatggacttggcgaacttcttcgtcgccatcgacaagcgtgttctgaccaaccagctggtgcgcctgatcgacgagccttggtggcgccgcctggcgctgcaggtcctatggcatgacccgcgcgtcgactacgaggtgcgcagccgtagagggctgttcaacaaggtccctcagcacaagaggctgacggcgcagacggcgcacctcgggcttcccatcggcaacctgagcagccagttcttcgcgaacatctacctgaacgaccttgaccagttcgtgaagcaccagctgcgggcgaagcactacatccgctacgtcgacgacttcctgctattgcacgaatcgccgcagcagttgaacgaatggctggcggcgatagaggccttcctgcctgggcttggcgcaaggctgaacccatcgaagaccatcctgcagccggtcgatcgaggcatcgacttcgtgggccacgtcatcaagccctggcggcgcactacccggaaacggacggtgaaggaagccatgcgccgggtagctgctgcgccagcagacgatcttctggaagtggccaactcctacttcggtctcttccgtcaggcctcgcatagccaggtcgaccgcgccgcgctggcaaatgtcctgctacgcagagggcgttcgatcaacggcgcactcaccaagacctaccgcaaaccgaccaaggaaccctctgcatga

SEQ ID NO: 339328 - DNA, 357 bp, Pseudomonas aeruginosa
atggcgatgcacaccgagctttccatctacaaggccgcaagcggtctattgcagatggccacgaacctcacccggaacattccgcgcgaactcaagcagtcgttggggcgcagggttatcgacgagtgcgttgacgtgctcatcctcatcgccagggcaaacgcagcgcgcgacaagcgtccgcacctgaccttgctggtcgagaaagtccaggtgatcgaactgctcatgcgcctgttcaaggacaaccgctttatcagcgtctcccagcacgccatgacgatggaggtaaccgcctctatcggaaagcaggccaatgcctggaaacgcaataccgcaaccgcgcccgctacctga

SEQ ID NO: 339329 - DNA, 609 bp, Pseudomonas aeruginosa
atgcaagcagcagcacaggaagcaaccatcctccctgaaatcggtcaggcctacggcggaggtttcgtctcaggcttctacctccaggatggcaagcgttacgtctccatcaccgccggtgccgagcatgagctggtcggcgagtggggcgagtacggcgtcaagatcgaaggcgcggacagcctgaccgatagccgtgcgaacactgaggcgatggccgcctccggtagcgaactggctcagaaggttctcgcgctggagatcggcggccactccgactgggctatcccggcgcgcgacgtacaggaactgcagtaccgcaacttgaagccgaccaccgacaagaactacgcctgtggctgcgacggcgagaaccactccagccttccgcccggcgacctgtacagcgaggaatcgccagcgcagacctccgtcgaggccttcaaggctggtggcgcggaagccttccgacccaactggtactggtcgagcacgcagcgctccgccaaccccgccttcgccatggacttcagcgttggctaccaggactacttcgtcaagtactgcgagcttcgcgtccgccccgtccgcagcgaaatcattcagtaa

SEQ ID NO: 339330 - DNA, 624 bp, Pseudomonas aeruginosa
atgaaacgagaaatgatcaccgtaaagacaccggaaggcctggttctgaaggttccggcacacgttgttgcaaccacgttcgtcgctgcagccctggctcatgtcggtcttccgcaaatccctgccgtacctgctgcgaatgaaacgacttccagcgaccaggccagtccagcgcttggcaaatactggcccggacaaggcggccacaacggcggtttcgtgccggcccgcgaaggcgttcccgcccactacctgatctttgctgcccaggacgttggcgatcatgcctggggcggtcgtggagatgagtcggacgcaaccagcaaggtagatggtttcgccaacacccagactctcctggccgagggcaaccacccggcagctaccgcgtgcaccaagttcgaggccgatgggcactctgacttctatctaccggcagcagcagagctgtatcagggctggctgaacgctcccgagttgttcgcgaaggaccgttggtattggtcgagcacgcagcgctccgccggctacgccttcggcgtgctcttcagcggtggcggccagggctccaccggcaagggcttcgagcttcgcgtccgccccgtccgcagaatgttcatttga

SEQ ID NO: 339331 - DNA, 222 bp, Pseudomonas aeruginosa
atggcattcgtcgaggtaagcaaagagcaatttttccaggctgtaggcggccccgagaacattcacccgacgccgtaccccgattgctcggagtggaagaacctgagcactcacgaggtcgttgggcgctctgagcccggctacaaaagcgcgcacgggactccgcatcgttattggctgactgagcagttcgctaaccgcaaatcgatcaagacagcctaa

SEQ ID NO: 339332 - DNA, 183 bp, Pseudomonas aeruginosa
atgaagaccgtagtttttagcgacaccctcaaaaaactgtcggttgggcaaaaggtgtacgcacaaggtggaggccacggcgtcatcagcgaaatccgcgagaactgcgcattcccggtgttcgtcaccttgaacagcggacgcaaggacgccttcacggctgctgaaattttccctgcctaa

SEQ ID NO: 339333 - DNA, 597 bp, Pseudomonas aeruginosa
atgcatacgtcgaatcctcgacacgaaacccgcgatgccgtgctgatcgccatcgccgaggacatgatcgcccggaccagcatgtcgcaggacgggttcgccgaacgcttgaacatcgaactgaacctgcgggcgccggaacgctgccgggccaaggattacccggacctgaaggccctggaaggggcggccaccagtcacgtcgactacgcccggatctacaagaactggagcaagcgggtggaacgctggctcgacggcgacgtcgagatcccagcctggattgaagagtcctgggtacaggcactggagcaaccctggcgcgagcgcgcgctgttggagttgtccggtcggtacggcctgctcccggtgcgtccggtcgtggcagagggcatggatgccatgaaggtgttcggcgcactgatgcgtcgcctcggtgatgtcgccggcgtcggcaccagggtcttcgacgacatgatcctcgatgcgcgggatggccagttccttccggacctgatcaacgccctggactccactgcggcgaaatgcacgacgctgagccggatggctaagtcggttctggcgggcgaagggtga

SEQ ID NO: 339334 - DNA, 597 bp, Pseudomonas aeruginosa
atgacggctactgttttggatcatcagcctatgaccatcatcaaactgtcggggccgctgatccgtgagtttggcagggagcacagacgcttcctcgacaccgggaccacacaggaagcattcagcgccctgcgcaataccctgccgggtttcaaggaagccattcaacgcctgcagaacaagggcatgcgcttcgccatcttccgcaaccgcaagaacatcggccaggacgatctcagcgccggcggcacgcgtgaagttcggattgttccagtgctgaccggaagcaaacgggctgggctgctgcagacaatacttggcgcggtgatctttaccgcatcattcttcgttccaggaatgcaggggtgggggcaatctcttggagcctcgctcgccctcggcggcgtcatccaaatgctcagcccccaagcacagggcctgaagcagagtgcggcgccggagaaccttcccagctacgccttcggtagcgccagaaacaccaccgccagcgggaacccggttccgatctgctatgggaagcgccgctggggcggggcgattatctcggcttcgatttacgccgaggacaaggtgtaa

SEQ ID NO: 339335 - DNA, 237 bp, Pseudomonas aeruginosa
atgagcgttaatctggaacaacgtatagcagcaattgaagccgttttttccacgcatgcctcagccaacactaatgcgattatcgaactcatcagtgccgtgaaggaaattccaggattcgaggcggcatcatttaagaaggggctgcttgatgctcgatcggtaagcatcgaaggcggaagccaagagcattacaaccaactaatcgacaacttcatagaagctattgagagataa

SEQ ID NO: 339336 - DNA, 174 bp, Pseudomonas aeruginosa
atggcgcttttcctgcgtggcaatcagccgaccgtcgtggcggacgcttgcgcgacgcggccgatccgcaccgacgctgtgtatgtgccagccgagatgctgcacgaggccgcactggcgacgattgccgacctctacgcggtcgtggtgcgcttgggcgcgtcgttgaaataa

SEQ ID NO: 339337 - DNA, 429 bp, Pseudomonas aeruginosa
atggatctgcccggtctcggcggcgaggtcgtaaggcgagccccggcccccatcatggacgacatggatgacctttgcgcccgcagcgcgagcccgcgccaggagctcctgacggacaacggcggtgcgtacatcgccggtcacacgcgcgcgattgctcggccccttggcctcaagccagtgaccacgccgtcgtgcagcgcgcaaagcaacggcatggccgagagcttcatcaacaccttcaagtgcgactacgtcagccgcataaacttagcggacgccacaacggtcatggcgcagttgcacttggccttcgagcacttcaacaatgtgcattcgccttcgagcctgagaatgcggtcacccagagaattcaggcaacatcaacagcgaatcgcccagaccgggagcgcgtcagccagcgtatag

SEQ ID NO: 339338 - DNA, 2430 bp, Pseudomonas aeruginosa
atgaaccacgagcttccctgggtcgccgagcgcgtccgcgtgttccgcgagtctaatcccgagttcgcccgctgggcgcgcggccacggccccatcacccacaacgatctcacgcaactgcgagtccacgatctcgcacaggtgctggttgccgaaggcaaggcgagcgacacaaccgcggtgtatcgcacgctctggtcggcggaccgcctggccgtggcaggcatgtggttgacggttcacatgacctatgccgaccgggtctatcccgatggccgggggatgagagccgaggatttcaaggagacgccggaggggcataccggtgggtcgctgaacatcgtgccggcctatgtcggctacctggccgcgaacgcgctcagtgggttgacgcgtggctggttgatgggccagggccattgcgtcgcgggcattgatgcctgcaacctgctggtgggcaacatgacgccgcgccacgccgagagatacgaccgcagcgaaagcggcctcacgcgctttgcccgggatttctatagctacgcgatcgacgcacaggggcgtcccgcctcgccgctgggcagccacgtcggcccgaatacggcaggcggtctgtccgagggcggctatctcggctttgccgaactgcagtacgtgcacatgcccttgcccggcgagcggctggtggtgttcctcagcgacggcgctttcgaggagcagcgtggcagtgactgggcgccgcgctggtggcgggcagaagacagcggcttcgtggctccgttcatgatcctcaacggccgccgcatcgaacagcgcagcaccatgcagcagcaggggggccgagaatggttccaccagcatctgcggctgaacggcttcgacccgatggagatcgacggcaccgaccccgccgcgttcgcctgggccgttcacgcgatggaggagcggttgtcggcctgcgcggctggagtttcgcagggcaccgttcagtacccggtacccctccactacaccatcgccgaagcgcccaagggattcggcttccccggtgctggaaccaatgccgcgcacaacctgccgctggaggggaacccccgggtcgaccagatagcgcttcagcagttcaacgagggtgctcgcgctctcttcgtgccgtcgcacgaactcgacgaagcggtggcactactgtgccggcacgaagtgcagcatcgtcccctggagcgggaccatgccctggcgcaccgccaggtggcggcccccagacttccggttccgcagtggcatgttgcgggccagggcgaggtctcgccaatggcggcactcgacggagccttcgcggccctcgtccaagccaacccacagctgcgtccgcgggtaggcaatccggacgagctgcgcagcaaccgcatgggccagacattggacctgctcaaacaccgcgtcttcacgcccgaaccgggcctggcggaggccgtcgatggcgccgtgatcacggcgctcaacgaagaagcggtggtcagcgcggcgctgggcaacaagggcggcatcaacttggtcgtctcttacgaggcatttgccgtcaagatgctgggcgcgctgcgccaggaaatcctgttcgcgcgacaccaggcgcaggcaggcacaccacccggatggctgtcggtggtcacggttgtgacgtcccacacctgggagaacggcaagaacgagcagtcgcaccaggatccgacgctggccgaagcgctgttgggcgaaatgtccgacacctcgcgcgtgttgttcccggtcgatgccaacagtgccgttgcggcgctgcgcgcggcctacgcctcgcacggccagttctggacattggtcgttcccaagcgggccgtcgcgagccagttgagtgccgagcaggccgaacgcttggtcgatcagggtggttgggtggtgaagccctgcgacgcccccgacgtgttgctggttgccatcggcgcataccagctgcagcaggccctgcttgcggcgcggcgcctcgaagccgctggacatcggaccgcagtgacctgcgtcatcgagccgggccgcttcagagcgccccgcgacgaacgcgagcaggactttgtggccggcgaccaggccttgcgcggcctgttcccggagactgccgccgtgcgcgtcatcgtgtcgcacatgcgacccgagccgacgctgggcctgatgcgccggatcgatacaggggcgcggcagacccgtgccttgggctaccaggcgcgcggcgggacgctcgatgtggccggcatgctgttcgcgaaccgttgcacttgggcgcacgtggcggccgaggcggctcaagggctcggtgtcgatccggtgagcttgctgagcgtcgaggagttggcggccgtgcaggggcatggcgacccgcgcgtggtgatggccccggcttga

SEQ ID NO: 339339 - DNA, 240 bp, Pseudomonas aeruginosa
atgacaacttctcaccgcaccgggccgaggttttggcgctcgcgatggttcctgggctttctggtctttctgagcgtgagcgtgtacctgctgctgacggaacaccgggcgcactacttggccgcgctgccgctggtcctttttgctacgtgcgtcatcacccatggcctgatgcatcgccatgccgcaccgggtgatggtcgcaagccgaattcttcgccccagggagatcgcaaatga

SEQ ID NO: 339340 - DNA, 360 bp, Pseudomonas aeruginosa
atgaacaccacgacacgcatcagcaccgcagaacgccttggccgcaccttgggtcgcggatggcgtgcctacgtgcgcggcgaacgccgggcatcgagctggttggtgtccaagggggtgccggctgccggcgccaccgcgctcgtgtgggtggtcaagctggttgcgctcggggtgctgctgtacaccactttctggttggccatgctgctggtgtgcgtcatgatcgttgcctggatggcccgcaacgccgacctaggcgaagagttgcccgagccagagtggcgaaacggaccagcaggattcggcctatacacctacgacggttttcgcattgatcctcatgtcgaggacgactag

SEQ ID NO: 339341 - DNA, 1878 bp, Pseudomonas aeruginosa
atgacaagccggatcggcagtcctgacacacaagccgatctagatgttcgagcgtgtctcgatcggatgccgccacgctcgtttgtcatggtcgccggtgcggggtcggggaaaacgacctcgctgatcaaggctatcgcgcacctagccgagacccgcggtcctgccctgcgccgcgccgggcaacaaatcgcctgcatcacatataccgaagtcgccgtcggtgagatttcggccgatgtcggggcctcgccgctattccacatctcgaccatccacagtttcctgtggtcagtcatccggccgttccattcggatatcgcggcttgggtagccacccgcatcgacgagaagatcgcggagcgacgcgcacactacgacaagcctcggactcaggcaaaaacgaaggcccgcctcgaacaggagatcgcagatctcgaagccgatctggctgcgatcagtgaagtagagaagttcgtctacggcaccggcagcagctacgctgaaggcatccttggccatgacgatatcctcaagctcaccccagcctgcgtcgcagcgcatccgctgctgagacaactcgtcgctaagcgctttccctacatcttcgtcgatgagagccaagacaccaatccggaggtcgtcgaggcgttacggcacattgcgggcgaacatcctggcctgtgtgtcgggttcttcggagacccgatgcagaagatctatatgagcggagcaggcactgtcccgctgaacgacggctgggcggagatcacaaagcccgagaacttccggtgcccgacatcggtgctcggggtcatcaatgcaatccgcgcccctggcgacggtcttgagcaggtgcgtggtcggacgataaccgttgatggcatcgagcagccggttgccggtacctccaatctgttcatcctgccggcggacgcggagcggagtgcgcgcctcgcggccattaggcagtggctggccgccgaaaccggcgacggtctgtggctaagcgacgtgcgggaaggcgatgtccgcctgcttgtactggtgcaccgcatggcggccaaccggctcgggttccctaatctgtatgctgcgctcaatgaccgagcccccatgagtctgagtgaagggctgagcgatggcacagcctggccgctccgtccacttgtccagcacatacttccgctcgttgtcgcggcgcaagcgggtgatcggttcacagtgatatcgaccttgcgcagcgaatgcccgaggcttgaaccagcgcggcttcgagggcaagcgacggcccccgttcttacagcgctacagcaagcgctcgacgggcttgtcggtctgttggcagcaggatcgcaggcgactatccgggacgtcttgacgcatgtgcgagataacgagttgctgcgcctcgatgatcgcttcgccatgcatctggttgcagagcctgtggatgacggcagcagcggcttcgagaacgttcaagcctatctggcatgcggtgtcgacgaactctgggcctaccggcgctactttacagaggagtcaccgttcgcgacgcatcatggggtgaagggtgcccaatttgagcgcgtattggtcgtcatcgacgatgaggaagcgggcttccggcagtattcttacgggaagtatctcgggtacgtccccctctcggacaaggacgaagccaacctggcggcaggtgaagagtccgtactcgatcgaacccgccgcctcttctatgtgtgctgctcgcgtgcaacgaaggacctggcagtcgtggcctttgtgcccgatgtcgcagcggctcgcaccgcgatcgtggcgcagaatctattccccgaggccgtaatccgaggtgcggagcatctgggctga

SEQ ID NO: 339342 - DNA, 2337 bp, Pseudomonas aeruginosa
atgcatttgaagaagttggccgtccggaatttcaggcggctgcgaaacgttgtaattgatcttgcttccgacatctctatttttgtcggtgccaacaacagcggcaagacatcagtcgggcacgcactccagttattcactggcagtggccgcttcaacattcacgactttagtgccgaactttgggccgacatcgttgcgtttggtgagggcgatggcgaggcgagccttcccacgatggaaatcgacgtttggttcgaaatcggtccggacgatgttcaccgcgtcatcgatcttcttcccagccttgcttgggaaggcaagctggtggggatgcgtgttgcctacgcgcccaccaatcctgcggcgacgcatgcacgctatgtcgaagtgcgccagcgcgtgctcgatgcggtcgctaagggtgaagacggagcacccgccttcgatccctcgccacgtaacctgcgggagttccttcgcgacaggctacatgacgaatatgagctgcgctatttcgtactcgatcccgcgcggttcgatgcgaagatggtcgcagaggctggctatgacccagccactctcaccggacgcgaccggagcggccgtgagatcttgaacggccttctccacattgacttcttgaacgcacagcgccatctctcggacggcccaggtggctctcgcgccgaggatctctcccgtgtactcagtcgcttctacgggcgcaacctcgaacagaaaggcgaagatatcgaagcgttgcgcgccctcgcagcatccgaagtctcgcttaatgagcatctcgaacgagtgttcgaaccgacgctcaagagcttgtcgaagctcggctatccgggcctctcaaacccgcgcatgatgatccgctcggccctcgaccctgcccagatcatgagcggtcgagatggcgcgatcgttcactatgcgttgggagccgatgacgggaagcccgacccgcctaccttgcccgatcggtataacggtcttggcttcaaaaacctcatcttcatggtcgttgagctgctcgacctccacgctcaatggctggcgatcgaggaaaaccgtccgccggtccacctgatcttcatcgaggagcccgaagcgcacctccatgcccagcttcaacaggccttcatacgcaaggtgatggatatcctagcgctcaagggcgaggaccgcacgcactatacgagccaggtcgtcgtcacgacccattcgactcatatcctttacgaacgaggcttccggccgatccgctattttcgtcgaagccgtgcacagaatgtgtcgacctccgatgtgctcaacctctcggttttctacgacagcaccgatccggacatccgaagcttcctcgagcgctatttgaaactcgcgcactgcgatctgttcttcgccgatggcaccgtgctggtcgaaggcaatgtcgaacggctgctattgccgcagatgatcgccaatgccgcgccgcggctgcaatcgacctatctcaccgtcctagagatcggcggagcgttcggctaccgattcaaaacgctgatcgagtttctcggactgacaacgctcatcatcaccgatctcgacagcgtgttcggtccactggggcaggatggcgagggtgcggcacccgctggtcaaccggaagccgcggaaccagccgccgagaacgcgcaggctgccggcgctgacgctgaggacattgacgatgacgaggaggatttgcctgtggctgcggagaagcccgggaaggcgtgcatagccggtcatccgggcgcggcgacgtccaatcagactttgctccaatggctaccgaaatgcgacacggtcgccgccctgtgggaggcgacggctgagcagaagatccaggcgaggacggacgacaatgacgctttggtacgcgttgcctatcagtgccggaccgatgtcacttggggcggagaaaccctggcgctagccgggcgcacgctggaggaagcattcgcactcgaaaatcttgaatggtgtcaggacaagaaccgtaagccgcttcagctccgcatcgccaaggccgacgagaagaacctgaccacgcttgcggaacgcatccacaagcgcgtgcaggctaagagcttcagcaagaccgacttcgcgctcgccttgttagccgaagatccgagcagttggtctgtcccaacctatatcgccgagggcctgagctggcttgagaccgagattgcgccgccggaaccggacgaggaccagccgcatgaggaacagccgcatgaggacgcgccccagggggcaccagtcgccgccggcgacgaggtagcggcatga

SEQ ID NO: 339343 - DNA, 738 bp, Pseudomonas aeruginosa
atgcatttcactgcaatgagtagaaacttggagcgcatgcgtgccgctcttaccgaatggatgattaaagaggaaatcctgggggatgcgttcttcgtcgatatcgaggcttggagagctcgaaacgagccctatgggaacgactcgctcttagtcttggtgttcgacagcagcacgcttcataccatgttgaactacggtggcgacacgatggagttcgacgatctggttgagtcgttcggattctggtacgagcttggtcactcttggaacatgggcttctaccctattgaggggtatgactactcacggctttcaggcacctatgcatccaagctgcaagatgaaaggtggcgtaagaaggcagcaaccgtgaagaagcgggcaggacatcaatgtcaggactgcggagccacgaagcctttggatgcccaccattgctactacgcaaatatgcgagaaggcttcgagccgtgggaatacccactcagtgccctgcgtgctttgtgtcgtgagtgtcacatccggcgcgagagatcagagatccggctacgtgcgtttgctgcgtccctgacgagcgaagaacttgacgcgctgcgccccgccatcagtcacgccatctattggcaccaaaccgcagcggtgttctcgtccctttccgccctggggccagaagaacgacacctacaggcagcgctggagattctcagaaacggccgaaacgatcccgaccgctga

SEQ ID NO: 339344 - DNA, 219 bp, Pseudomonas aeruginosa
atgagcacgacccgcaagctgcgactcgggccgctgcccaagaccgagagcgtcaagctgacctttgtttgctcgggcagcctcaaggcagacctcgatcgttacgccgcgctgcacgcacagacgtatggcgagacggtcgacgccatgacgctgatcccgcatatgctggaggcgttcatggcgggggaccggggatttagacgccacgcaaggtag

SEQ ID NO: 339345 - DNA, 1287 bp, Pseudomonas aeruginosa
atgagcctggacgacacccccgacctcgccacgccgcagacgggcaaggtcgcgccggaggcggtggcgctgcgtgcccagccgcgcccggtcacgcgcctgaaccggcgcacgctggccatcctcgccggcagcctgtcggtcgccgtgcttggggccacgatctggtcgctgcaaccgcagcggcgcggtacgggtgagcaaaccgagctttacaacgtcgatcgcgtctcgaagtccgaagggttggatacgctgccgacggactactcgaagctgccgccagccttgccgcccgatgtgcccgagctggggccgccgttgcccggcgaccttggcccggccatcgtcgcttcgcagcagccggtgacgccgggctattcgccgccaggccatgatcccgaagatgccttgcgcaaggaggcggacgcggcggcggcctcgtcggtgttcttccgctcgggcgcccagggccaggccgccaccacggtcgcgcaagctgcgccgggtgcgcctggtgttgcaaacacactcgcggccttcgctcctctcgctgccgggcctgcctcgacggcggcccagcccgccgacccgacgaccgtgcagaaccggcaagaccagaaagaagcgttcctgaaagccggttctacggaaacccgcaactccggcaacctggcgctgccggcgtctccgtatcaggtgatggccggaaccgtgatcgcgggcgcgctggtgacgggcatcaagtcggacttgccgggcgacgtgatcgctacggtgacggagcctgtctacgacacggccacgggccggcatctgctgattccacagggggcgcgcatcctcgggcgctacaacagccaggtcagctacggccagagccgggtgcaggtggtgtggaaccggatcattctgccggacacgtcctcgttgacgctggacaacctggccggcaccgacccggccggctatgccggcctggaggatggtgtcgattggcattgggatcgcatcttcgccggcgccgccctgacgacgctgctgggcgtcggtgccgagttggcctcgccggggaaccgccagaacggcgaccgcgtcatcatcgccggacgcgacagcttgcaggacagcgtgaaccaggtcggacaggaaatgacccggcgcaacctcaacatccagccgacgctgaccgaacggccgggtttgccggtgcggctcatcgtcaaccgcgacctggttctccgcccctatcagccgctgttcttcaaccgggggagttcgagatga

SEQ ID NO: 339346 - DNA, 888 bp, Pseudomonas aeruginosa
gtgcaggcccagccgctgcccgagccgcctgcgccggtggaggtggtggccgtgcccgaggtgctgccgatgccggcgcagttgaagccgttgcccgaagccgaggacgccaagcctgcgccggaaccggccgacgagaaggtgcgcgtctcgcgcgccaatgccgaggcccgcgtcgcgcccacgcgcgaaggctacgtcaatgcgattcaggtgtggcccttcaccgatggcgcgctctatcaggtctatgcggccgtgggccgtgtgaccgtgatttcgctccaaccgggcgaggaactggtgacggtcgctgccggcgataccgtgcgctggatcgtgggcgacacgtccagcggcagcggtaccgacctgcgcgtgaacgtgctggtcaagccgatccgctcgggcctcaagaccaatctcgtcatcaccagcagccgcaggacgtacctgctggagctggcttcgacggaaaagacctggatggcgtcggtgtcctgggagtacccgcgcgaccggctgctggctttgcagcgccaggcgcaggcggccagcgccgccgcgccggtggactccggcctgtcgctggagaacctacgctttcgctacgcgatcagcggtagccacccgccctggaggccactgcgcgcgttcgacgacgggcagaaggtctatatccagttccccgccggtatcgcgcaaggcgagctgccgccgctgttcgtgatcgggccggaaggcgacgggcaactggtcaattaccgcttccgctcgccgtactacatcgtggatcggctgttcggcgccgccgaactccgcctgggcggagacaagggcaacgtggtgcggatcgagcgcacggacggcgttgcgcggaggaactga

SEQ ID NO: 339347 - DNA, 1242 bp, Pseudomonas aeruginosa
atggcaaaaagaaactctacaaacatacctagaattgaagctctaagagttgaaaattatcgggctcttcgggaagttgttctgaatgatttaactccgcttactgtactattggggcctaatggtagcgggaaatctactatattcgatgtcttcaactttctatctgaatgctttaagtttgggcttcggtatgcttgggatcgccgtgggcgtgggcgtgagcttaagaccagaggggctgacggaccaattgtttttgacttgaaatacagagaggctccaagatcgccgttaattacctatcacttggctattgatgaagggccgcgtggtcccgaagtagtagaagagtggctacaatggcgtagaggaagctccggaaagccttttcgattcttaaattttgtccgaggcattggggaggcggcgagtggtgacgctcctgatgaaactgacgtgcgagttcaaactaatctccgttcagctgatctcatcgctgttaatacattaggacagttttcagagcatcctagggtagcagctctacgtgaattcattacagattggtatgtttcatacctttctattgatcagactagaagccagccagaagccggacctcaagaaaggttaagtaaggggggcgaaaacctacccaacgtagtccagtatttgaaggagcaacacccagaacgtttagaagagattttctcagttcttcaagagcgaatcccacggcttgaaagggttgaagcagatcctatgcctgatggacgcctccttcttcaaatcaaagatgccccctttgatcgtccagttctttctaagtacgcatctgatggaactttaaagatgctggcttacttgacggtcctatatgaccctgaaccccctaaatttattggcattgaagagcccgaaaacttccttcatccccgtttgcttcctgaactagcagaggagtgtagggcatctgccgagcgttcgcagctattgattactactcactctccattcttgctaaacgccatgagaccagaagaggtcagagttttgtatcgcgatgagaatggatttactcaagtaatacgagctagtgacctacctggcgttaaagaatttataaagcatggttcatctcttggatatttatggattgaaggtattttaggggtcggagaccctttgacaaatcatggagcacctaaagtatcaagaaaaaggaagcaagatgcttga

SEQ ID NO: 339348 - DNA, 639 bp, Pseudomonas aeruginosa
atggagcacctaaagtatcaagaaaaaggaagcaagatgcttgagaagcttattgtcctcgttgaggaatattcaatggaggttgcactggattcaatattgcctaaggttattggtgatgttgagtttcagattgttaggtttcaatgtaaagatgatttgctaaagcaacttcctaagattctcaaaggctactccgcttggatgccagacaactggaggattgtggttttagttgatcgtgatgatgatgattgtatcaggcttaaacagcacctggagaatgtaagcgcacaagcaggtttagtttccaagacggctgcccctcaaaatggaacatttaaagtagttaatagaatcgcaattgaggagcttgaagcatggttttttggtgattggaatgcagttagagcggcttaccccaaggtgcgaagcaatgttcccaaaaaagccccatatagaaaccctgacgccattttgggagggacttgggaggctatagaaagggaactaaaagccgctggatattttaaggccggcttgcgaaaagttgactttgcaagacaagtcgcaaaagagatgcagccagagattaatacctctaggagttttcaagtatttttaaccgcagtaacctag

SEQ ID NO: 339349 - DNA, 1278 bp, Pseudomonas aeruginosa
atggttaccctcgctactcctccgtccactatcgacggtatcaagcgcctggcaaaggccatcaagcgcgaacttggtattacccactacgaagctctcgaagtagccgcccacaaggcaggcttccagaacttcctgcacgctaaacgcgcaattgccaagactgcccatcaaagtcataccgcctatgtgactgtgtactggcgtgatctcggatctggcgtagcttccgccgggcgatacaccgtagaggttcgcctcaagcacccccttcccgagctgcttgctggcggtccacgggtcggtggcccttacctgagaaagtttaagctcgaggcacccgatcacctcgaaatgcgtacggatgcacccagccagatcagtgcaatgcagtacctggatcaagccagtgctgctctgctcttcatgagcgccactggccttgtgagagtgttccggcgagaaaacgtcgaggctatgaatgggttggaaaaggtgcccaaggccgatcacatgactggctgggaggatcccaaaaccggtgattggttactgctggatgagccctacatttcgccgatcgacgggttcaggaaggactggctgcaggcacacggactgtatcaagtggcgccaagttggccgggactctactaccccggcctagcagtgccatacctgatttcacctagtcaggatctgctcgcaaaggtacaagcccaggtcgaagaaattcctgatagcttttatcccaagggcatgcctcaggaaatgccttacgactctaagtttattagcccagcccgcgtcgcctccggaaagccttggagatctcgcgaaatgccagttaccggcgttagaaatggcgcgatagcgtatggcggcgcacccggcgttcgctctagatggcgcccggcgcggagcgtaccactggagatgcacacaactattgggcctatcctgcataagctctgcaacagttcttctcgtgccgctggcattacatcaaggatttacgagaagttgaatcaagtgcgatcgcgcctcgaggattgggcttacatggagcatcccgaaggcattacggcagaggtcgacgccaagctctactacggaccagcagttgatggctatagcactccgcaagacagcctcaaggccatagagactgtccgagatctgctccttaaggggtatggggagtgcaagccaagagctcagatgctggccaaggttgagtctgctgtcgcggaccttcagaaaaaggtaacccattaa

SEQ ID NO: 339350 - DNA, 558 bp, Pseudomonas aeruginosa
atggtcgatttgggagagtgcccgtccacacggttgccccgggagttggaggctttcgcagcggcacttcgcggtctgaaggagctagggtttgtgacagttcacgtggcctctggagcttacccagagagcctggtcgacgttacagccatggccgagtgcgagaggcacgactggactctctggaaggagctcaacgccatggccccggaactgctgttgggatactccgattacggtatcttgtcgccgaaatggaccgaagagattctgaagaaaattgcgaagaaagtggtgcttcggtacacgcgcgacaaggactggctgatcctaaaggcggcgggtaagaagaaggaagactcgatcaacctgtcagtcattttggtaacgacttacgctgcagacttccggggagctgatttctctctaggagataggcaaatggctattcgagcggacagcaaggtgccctatcgagagaagaaagccgggcctttagcccacatcgtggaggcctggattcaccacattgcctacgtgcttaagaagcagtactga

SEQ ID NO: 339351 - DNA, 1038 bp, Pseudomonas aeruginosa
atggaagacgcttcgatcccagtgacagtcaaatctgctttcgacagcctgaaagcagcgggatacccgcggacctacgtcgagaagctcttgcccgactggtgggacaacagtcttttcaaaaccaccgccggcgccctgcagttcgcgttgatcctgaagcagcgcctgggtcttgaagcaagctttggccaggatggccacctgcagcttcaaccggactcccgccacatcagattcaagcgacgctcagataccaaagactcggagcttgccgttgcggccagcctcggtacggccatcgcgaagctggcaatgttctgcaccctaaagccttacgtcccgctggcagatgatatccccaccttgcgccgagagatcctcgccagcaccggagcttcccatgtcaattttgacgggctgctcaatctctgctgggatcacggagttcccgtgctctatctcaaggagctgccgagagcgactaagcgaattacaggcatggccttgagcatcagcgggcgacccgcaattgtcctgggcttcgcaagcccccagcattcgaggcagctattcgtgctcgcacacgagcttgggcacattcttcgcgggcatctgggtgaggatggcgtgctgatcgatgaggacatcgctgagatcgcagacaccctcattgatatgaagacccagcgcaaagacaccgaggaacgcgaagcagataccttcgccctagctcttatcagaaatgagtacctcaatcctttggcggcaatgggccggctgaactcaccaaccgctttggcggcgagagctgctgtgcttggcaaagagttgggcatcgaggctggccatctgatcctctcgtatgccaaagagcacaacgagtgggctcgggcaaatcaagcgctggagtacagcccgtcccagaaaagtgccatcgacgtgatcggaatgcactttcgaaaaggagtggagttagaggccttgagccaagagaaccaggagtacctcctgtcagtccagggattcggagagtga

SEQ ID NO: 339352 - DNA, 456 bp, Pseudomonas aeruginosa
gtggagcgcgaagggcgagagctgctcgccgaacatcgacggcaactgcgccaggacaaagccaggccgatcatcgatggcctgcatggctggatgcttgggcagcggcagaaggtgccggaaggttgcgcgatcgccaaggcactcgactacagcctcaagcgctgggcagcgttggtgcgttacctggatgacggcaacttacccatcgacaacaactggatcgagaaccagatccgtccctgggccttggggcgctccaactggctgtttgccggctcactgcgcagtggccaacgtggcgcagctttgatgacgctgatccagtcagcccgcctgaacgggcacgatccgtacgcctacctgaaggacgtgctcatgcgcctgccgacgcagaaggccagcgccctgatcgagctgctgccgcataactgggtacccgccggcaaggtgtga

SEQ ID NO: 339353 - DNA, 126 bp, Pseudomonas aeruginosa
atgcccgttcgcttacatttcgcgagcgcttgctgctggccagtcgattcggcagataccaccttctacggtggctactacggcgacccgcgcaacgtgatgctgaccacccagtatcgcttctga

SEQ ID NO: 339354 - DNA, 1473 bp, Pseudomonas aeruginosa
gtgtgcgccaaagtatcccacgtgccacacaaccagctcgtctatgccatcaccgagttcgacctggacgatgccacgctgctcacggcgggcttcagcgtgcagaagaaccaggccgactcacctctgcgtaccggtctgcagacgttctactccaatggccagaagaccgacttctcccgctctgccagcagctcgccagactggtcgtacttcgacgtgaacaagagcaatgtcttcgtctcgctcgaacaccagttcgacaatggctggagcgccaaggcggaacttggccacaccgagtacgagttcgacgaactgatcaactacatgaatggggaaatcgatcaagcgaccggcgccggcgcctacctgtaccccaaccgctggtccgcaacaccgcgggaaaacaacctggacgcctacctcaccggccccttcagcctgctcggccgcgagcacgagctgatcgccggcatcaccctgtcgcgttaccgcgaaagcacaccggaccgtggcggctggtatggcccatggaccggctacgacggcagcatcggcaacatccaccagtggtccggcgcggcaccgcgaccggacaccagcccgatcggcaagaacctgatcgaggaaaaccaatacgccgcctacgccaccagccgctggaacctgcgcgatgacctcaagttgctgctgggcggccgcgtcaccgactggaaacgcagcagcgacaacactccttacgagggcacgcccaccagtaacgaagagaatcgccatggcgtattcctgccctatgccgggctggtgtatgacctgaacgacacctggtcggcgtacgccagctacacgaaaatctttaacccgcaggcctatggcatcaaggggctggacggcaaaccgctggacccgcaggaaggtacaggctacgaagtgggtatcaaggctgcgccactggatggacgcctgaacgccagcctcgcgctgttccgcatcgagcaggacaacctcgcggtatacgcaggtcagttcgatacctattacccggaaaagggcaccaccaccgaaggcctggaactggaaatgaacggtgagctggccgatggctggaacgcctccgcagggtatgcttacagcgtcagccgtgatcaggatgatgagcgcatcgtcaccaacatcccgcggcacagcctgaagaccttcaccagctaccgcctgcctggcgcctggaatcgcctgaccctcggtggcggggtgtattggcagagcaagattggccaggacctgcataccttcgagcaaggtagctatgccctggtcaatgtgatggctcgcttcgcggtcaccaaccagttggacgtcgcagtcaacgtcaacaacctgttcgaccgcacctactacagctacgccgatagctggagtgtctatggcgcgccgcgcaacctcatgacgacgctgaactaccacttctga

SEQ ID NO: 339355 - DNA, 804 bp, Pseudomonas aeruginosa
atggccaccccctctcaagccgttcaagtatgcgaagcgattctccgggcgaatttggagtacaaccaggcacataaaatctggccaagcattaatcgcgtgcttgaactcatgctcgctcgtcgacacgagttgagcgatgcctatgaggagctccatgactctctcgcccaccgccatcgcgccctagagtcattcttcgacgtgttcacctcgacacccatggcgtggagtccggagaagatgagcgaagcgcgacatgcgcgcaaagagctcattgatatcaacacgcggatcgccgcggtggcagaggatctcgcccaactgctcacccggcgcgacgatattaaggaaacctctggtttcagctgcgagaccgtctaccacgctctcgatgcgttggagctagccgctgagtcggagggcaatcaccttttcgaatggcatgtaaaagaaggcttggatgcgctgaggtaccagtacgacctgaaatactggccgccactaagcgcggtcgttgaaaccattggtgaagatgcccgaaacacagaagtctatgcgcaggatcccgccactgcgtcggccacagaaagtcgccgcccaggactttccgatttcctgagggcattcttcgcccgcatgaaggaaaacagcgtcagagaacacggcttcattccgaataatttcagtgtgtctgataacaccctggcgtcgctgatcaattgcgcccttgatcttgatgcagacaagctcattgatggtggtttcgttaagcggttccgacagcgcgagcgtgagcactag

SEQ ID NO: 339356 - DNA, 2523 bp, Pseudomonas aeruginosa
gtgcagctcgctgagcgtgctccgacctacgcgttagcgatcaagcacatcaacaactgggttgagtccattgaagccgccttagcgaaggcaaaggcagaccgccgctggttcacgcgtgaacagcagggcgaactgctcgcacgccgaccaatcctctcggtgtccaatatcgagctaaacgaactggcctcgaatacagagctccgggcactggcgaaactcagtcttcaggatacggagtccactctagaaaattggcgcagggactggatttcaacgtgggctgaagtcaaccaaacccatacccaaaacgaactggaggctagcgctcccctcctctcgaaggtcgaaagccgaccactcaccgaagagcaggccaaagccgtaatctgcttcgacaatcgagtacaggtcgtcgcctctgccgggtcaggaaagacgtccattatggttgccaaggccgcctatgccataaatcggggtatcgccttacctagtgagatcatcctgcttgcgttcaacgcagcagctgcggaagagcttgcggaacgggcagagcgctcgttcaaacgcctgggaatggacaacatttcggtccatgcgaagacgttccacaagcttggcctcgatatcatcggcaaggctacgaacaaaaaaccaaacgttccagactgggcccacaaggacaaaccatcgcttgagaagatggccttgatcgtcgatcagctcaaagatcgcgatccagtatttcgcacccgatgggatctatttcgactagtgttcgggcgcgacattccccacttcaacaacaaggtcgacagcaaagctcaagaagctagcccagatggaacctacactctggacggtaagtatgttcgcagcatggaggagtgcatgattgcgaactggctcttctataacggggtgccctacgagtacgaaccgccttacccacatgacaccgcaacggctgagcatcgccagtatcacccggactttttctatcccacactcaacctataccacgagcactttgctctggatgggaacggccaaccccctccccacttcaagaaatacctgagtggtgtggactggaaacgcgctcttcacgcgcagaaaggtacccacctaatcgaaacaacctctcaccagattcgccagaacacctggatggagcacctcactaaggagctcaccaaaagaggggtcaccctagaccccaatcccagccgtcccatatctggcctgggccaagcgccaattgatcacagcgagctgcttagcttgatgcggacattcatccgccacgccaaaagtaactgcctctccctatccgaccttctaggcagagtgcagcagctgccacacgccgccttccagcaccgctacctgaagttccttgagattctcgcgcctgtatgggaaggctgggacaaagccctcaaagcagagcaaggaatcgactttgaagacatgctgaatatggcagccaggcacgttgaaaacggagcctattccccgccctaccggctcgtaatggcagatgaattccaagacgcatcccaagcaagggcacgtctgtgcaaggcgttagtgaaggcccccggtcggcatttcttcgcggtcggcgatgactggcaatcaatcaatcgctttgctggcgccgacgtgtcagtcatgacgcggtttagggagttcttcggcagcgaccagattctaaagctggaaacgaccttcaggtgcccccagaagatctgcgacacctcgagccaatttgtggtcaagaaccccgctcagctcacaaagaacgttagctccgtgacacccgcggtaggcactgagctcgtcgcgtatcaggtgaatgaaccagcagccttgaagaaagccgtcgcaaaatacctgctcaacctagcgcgccaaatctcggaaggaaccatccctccgaaagcaggcggcaaaataaaggtgtatgtgcttgggcgctacaacaaagacgaagagtacgttcccaaagactggcagagtcagtacggcgacctcattgagctctccttcctttcaatgcaccgctcaaaaggcgcggaggcagactatgtgatcctgcctgcaatgcttagccagaagcgtaatagaagcttccctagcacgagagccgatgacccgctcatttctatagcaatgccacagggggatagctatcacctgggcgaggaacgacgactgttctacgttgctctgactcgagccagaaggtctgttgcgatgttcaccgtggcgaaccaggtgtcaacattcctcacagagctagagaaagacgagcaggtgaagattacgccgctcgaaccgccgggcccttcctgcccactgtgcaaaaccgggagcatcatcacgagatcaagtgtgaacggagacttcctcacttgctcaaacttcccggcctgccggtacaaaccaccgaagccgcagcctgccagacgtccgagattcgccaaagagcataacgtacgatcaaagtag

SEQ ID NO: 339357 - DNA, 537 bp, Pseudomonas aeruginosa
atgtacgacattcatcagcacaagcacagctatgcaatctggactgcctcccgcgcctggaatcgaaaattgaaaggaggcgacctagcactggcccagcgcctgattggcgtcgccggcctggaaagtgtgcgtggcccggatgatatcggtgagaatgtggatgcatggctgctggagcggatgcggttgatcgtcgagtacgcagcgcagcaccagattctcgggatcaactacggcagggcccagaagctggtcaacatctacctgaagaccaagctggtgtgcggtgggcaggaagcccacccgaaggtggccaagttgcatccgccgctcgaccgggacctgttcgcaggccttcacgccgagttccgcatccagaaaacgactgatgccacgatcgctttcgctgcagcgcagaaagcgtgctcggcctggacgaacttcgagctgcaggactacctggcgcacatccaagcgatcaagcttttcatggccggcaagccactttggatggtcgagcaatactggcggtag

SEQ ID NO: 339358 - DNA, 480 bp, Pseudomonas aeruginosa
atgaacgataacgacgcctggtgggaagctgccaaggagctgaatcctagtgacttcatggggtacatccattgccggatctatctcgccatggaagagctaatgtgcatcggctcaccgttcgacgtagtgtccatggctgaatacctagaaggcgatgagcgctatcaagaggcgggcggcttgcgcctgattgctgaaatggcggctggtacccctacccgtcgtctgcaagtgcctgtactggctcgcgtgattcatgcctacgggcagctgcgatcattcgcgggcccaccacagcaacgccgaatcgtgtgcagtctgctggcagctaaagccaacggctggtttcatggtagatcctggattgttaccgtagaggatatcgcccgcagcggccgaaagattcctggcgagcttttggggcaacgggtgtgctacgtgtacggagagaaggctgttgccttgctgtcagaatga

SEQ ID NO: 339359 - DNA, 2397 bp, Pseudomonas aeruginosa
atggctggcatcggctcgtgcttaaatccgcctttgagttatacggcgcgaatgcgaaagaggccgacagagatggggaagagaatggataccactttgatggaaacggatgccaatgatgtcatggagatgtcggttctggagcactggcgcagcacctggacggaccttagtcgtacggaagaggtaaccgctcaaggccccagctttgtgctgtggcactccgacacgaacggttttgagagtccaggtttcttcttctctgctgatgctattgatcaactgatccccaccgatgagctgcgggaagcagtgcgcgcgcgtatagacgagattgaccacgcgcgcgcgatggctgtggtgctggtctttaaagaggagggtagagcagctgtgaccgtgatagcgaagaccgcagactgcaagccgcaggcctggtttgaaatggcgaagatccgaaagacctcagttgctgacaaagtctggataccgcttcgcgccgactcagtgctcgataaagaaggtgaggttggctatgaaggccgtctcgaagagtacttcggagttggctcggtgatgttcgagctgaggcatcgcgaacagctaaacgatctgggcacagatgatgttcttgggaacgcctttgcaggtggtccggaaactcaatatgtctggccagagagcaaacactcagcggagccgggcagtgccggcgggtctcagaaggcctcacatgcccaggccgagcaagatggatggcttgcgtccttccgcgtgcctttcacctctctgaagctcgccctgagcatccggctgtcgaagttggctcccgcaactccgcctgaattagtaggaacagaaaagccggaacgaatcacgatcaactactgggcaggtgattgggcaagtagctgctccgatgcggtaggcaccgggctagtgatcgaccagagctttgaaggagaggctcccagcgagtggcatttgcatcaggactttgtgatctctctgggactgcagcgacaaggtgatagttggctccgcccaaccgaaggttttcaagagatcgtgaggctaacacgtgacgccaacggtgcccccgtattgcttgaggtgcgtaccgagcaccttcgtgactatctgaaggcgcgggggatgtttctactgatttcgagttatcgagaacgccagcagaccgtatcgaatgcatctcatatcaactgggcttcagccgttgttgaggacgtctcggactcggacaaatgggaggggatcaaccaggccatccatgaaggcggtatgcaatatggttcctcgaccgctgtcttccatgcatcccgcaccgacattgattccgatgatgaggtgcctgtgctcggacttccaaatgacgagtctgttgtttccagatcatggacggtcaagcaccagggacggaagctacactgcttgagaggcgcgctttggaaaaccgaggttgtcgagcctggcctggtaagtgaacggatattgggtgagcccccccttacaagggtagattttgcggtagatggctcaggtgggcgacttcatggtgatgagctcatcgactgtggccgctggctgtggttccgcccaaccgtcactgctcttctcagcagctatcgagggtcctcgctaaattggtatacccgagataccggcatcatcggtatctctcgcgggcacagtgtccattttgggttgaacgatctcggccttctcaacgtttatgccaaagacattggccaacttccactttggcagcaacgggtgtgggcaggggcaaatgtggtgccggatgggggcgtttcagccgagcttttggcatcgcaggcacaagctacccccgccggtacgaaagctccggagatgcagctacggccggcatatgacgggctcaatgcggtgtttcaaacgctaaccgggcagcctttgttcggtgcgcatcatgctgttgatgacatcttcagcaggatccaccgtttccgggcgttggaaaaaaccggtgtgctcgaactagccaaagatttggctagggtcacggttgagtcgttgaatggagacgccttgtcggtgctcgccgctcctccagcgaaaatgaagccaggctcagtcaaacatttggaaattgcgttgcagaaagtagtgagcttggaggaggcaagagcgttgactaaggtgcttgtaggtatcaacgagctgaggcaggcggatgctcacttaccctcatctgagcataccaaggcgtttattttggttggcgtcgattcacttaccgacccgctggtgcagggtcgtatgatgctggagtcgctcgttgaatcgctggctcaaatgaagcatgtctttgcccaatttcctagcaagggaagctga

SEQ ID NO: 339360 - DNA, 363 bp, Pseudomonas aeruginosa
atgctcaaatactcgctcgacaagctcgtcaacatgatcctgaacatcgcgaccgctgtgatcaccgcctatctgctcagcaagatgccgccggccgagccagagcgagccccgaacttgatgtatgcagtgaccctggagcgtccagcgtctcaggtgtcagacggctttgttggccgcgttctcttgacccttcagggcaggaaagaaatcggtcacaggcaacaccaggcgcagcggtttgcctacggaggggacaaagccaagtttgtcctcgtagtacgacgcagctttggcgtctttggcatcgacaacgaggaacgcaacgccggcatgcttcgagattgcgtaagtgcgccatga

SEQ ID NO: 339361 - DNA, 729 bp, Pseudomonas aeruginosa
atggacggcgataagcagtggacctggcgggtgcgagtgacatgggaaggggatgagtcggctttaaactatctgcgcgagaaattcgacctgatggagttcatctactccgactcttccaggctctacttcaacctatccggtgaggtgacgcccctcgcgtacggtgacgcggagagacaggcagttactgagctcaagcaagcgaatggcttgattgaggccaccaaaatctccgggcgttttctcttcgcagcgattgagcgaaatgaagccgcgcgtgcaccgacccaggtgctccgcatgaccggctttgaggcaactgccttcgggttcccgacgattcgtaccagcgaatccagtactcaacccaaaagcagcgttcccgtgatggcaatcatccacgccacacctaggctcgcctatgcgttacgcctcctcgatgatgtccgtgataacgattggggccccatctataaggtgacagagcttctctatgagaacgtcagcgctcaactgaaagactggggaattaaaggggccttacgggatgtaaaagctgccgcgaacaaccctggtctgacgggggatcattgccgccatgcagttgcgagtggagaccaggccaaagctcagatcacgtttgaggaagcgaaggccgcggtcctggaaggcgtgaaccgttggattgcccatctggatcagcaggggtcgcagagcaaaggctga

SEQ ID NO: 339362 - DNA, 4080 bp, Pseudomonas aeruginosa
atgccggaatctgcgctatttcatatgaccatgaatcagtctagccctcccgacgaactgacaccccggcaagtaagggcagcacgagcccttcttgcgtggtctcagcaggagctcgccaagcatgctggcgtagcgacctccaccgtggccgatttcgagcgaggccaccggccccctttggccaacaatgctttggtcatccgcagcgccctggaaagcgcaggtatcagtttcccgccacaaggtgctgtgataggtccggccctgccgcccattgccgctgccgagcgcccaggtatcccagttcgatgggtgacttcggaagatctcgcgggatgggcgggtagtaacgatgctgtagcgagcatgccaacgctgcttgcttacttggtctatgcgaccgaaggtgccggtgtttggcgacgattcccggcagatgagagcgtaaggtttcctggctacgatgggttgacctcaggtccaacacgcagcctctatgtcccccaaggggagaccggctgggaaattacaacccagcggacgaacatcacggggaaggccacaagcgattacacaaagcggacgatcgagcctctaccactggatccgaagaacgccacctatgtgtttatctccacccgcccgtggcctgcgaagcacgagtgggtgagcgagaggaagttggaggcgaactggaaggatgtccgtgcctacgatgcggatgacctggttcattggatcgaacaaacgccatctgttgggttgtggctcgctactcgtttgaacaagcgacctgcgggcgtgcgtgagctgagtgacgtttgggatgagtggtctcgtgcaacggagcagccgctttctgaagacttggttcttagcgaccgagaccagaactcagcagagatcctccgctggctgaggggcggcccttcaatgctgtcgcttcaagcgaatacagccgaagagattgtcgctttcttccatgccacgctgaacatgctgcccaaagatgcctcgatcgcttaccgggtacgctgcgttgtcgccacaactactgaggcggcccgagcgctatcagatgcaccgggcccgttgattctgttgatgatggagccggaaccgggccttgcgaaggttttgatcgatcgtgggcattatgtactccagtgctatgacgatcgtcaggtttctcaaggcgatctgcgtgcgctggaaagaccatcgcgtgaggggatcgtattcgcgctgactaaagcggggattcaggaggcgaaggcggattcgcttgctcgggagtgcgcaagaaatctgactgttctcaggcgcctcatgctttcagcacctgggcggcttccccgatgggcaaatgaacctccgtctgctgcactgcgcgctgcgctgcttgtcggcggctgggacgatggatctgaagcggactgcgaacgaatcgcagaggtggctggtctgccctacgaccgcgttgctgcggacttggctccacttgttggaaactttgacagccctcttcagaaggtaggttcaacctggcgggtgaagtctccaatggatgcctggatgctgcttgcttctcgtctcaccagcggtgacgtgagcaagttcgagagcgttgctcttgcggtattgggcgccgaggatccccgatttagcatgtcgccagaagagcgctggatggctcccttccgagaaattgcgccgagctactcaggtctgcttaggcagggcgttgggcaaacgcttattttgcttgccctgtggggggagaaggcgatccttgcccaaggtgccaagcagagtgccgatcgtatcgttcgtactttgttggcgggcgccaatcaagcacgatggtggtcacttgcgagtgatttcagactgctagccgaagcatcgccaagtgagtttcttgatgcgctggacgagagcctcaaacgagatgatcagccgctcagagcactttttgttatcgatgaggggataggaggaggagcctcgcatttgtgcgaccttctctgggccctggagtccctggcgtggtcacccgctctgcttacgcgcgtgtctcgcgttctcgcaaggctagatgctatcgacaatacaccggcgcgatacatgaaccggccgcgaaacagcctgcgaagtattttcctgctgtgggggccgcagacgtttgcgcctttggcgaccaggctcaaaaccctcgatgctctgagggctcgcgaaagtgatgccgcatggagacttatgctgggcattcttcccagggggcatgactcgttcacgccctcgccaactccgcgctggcgagatttcacgccagataaagtcgaggaggtgagctggagtctcatcaaccgaggcgtactggaaatctccagtcgattgatctctgatgccggtagcagtgcaccacgctgggcaaaattgattaagcgcctccccgatttggtgtcggggcctgtggatgtgatttccgagcttggggcagccgaaaagtcgatatcggatgaagctagccgcatggttctctgggaggccatccgccggtcgctgagccaacatcgacagcatcccggcgcagagtgggcgatggccgaagatgtcctcggtaggcttgaggggatctacgagcgcttcaccccatctgacaggttcaaacggattagctggctctttactagtggtgcggtcgttcccagaccctcttctggctgggagaacgagcgtcgcgatcttgaagagctcaggaaacaggctgcagatagcctgtttcgagagaaaggggggggcgctgttcttgaacttgcacgtcagctcgagtacccaggcatgcttggtacggctctctatgacagtgggttatctgagcctgacctccaggcgctcctggaagcggccttgccgaatggcaacgcaagcgagcaggagtttgcccgcggtctcattgcgccgagtttccacttcaaaggaaagcaatggggtgagcagctgatctcaaaggccctcgacgctgcatggggtcgttcgtcagtcctcgctattttgctagctattccatcgcaagagtggacttggggccaggcgcatcgggcaggcgatgagatcgaggaagactattggaaggctgtgccggtgttttggccgagcgaccagaaggatatcggctacgccattggcaagctgatttcagtaggtagagcgagggctgcactggcgtttgcggggcgcgacaccatcgctcacctgccaacagcgatgctcgtaggactgctgaacgaagctgttacgcagcctcatgaggctacggctgatccgaacgaaggaacgatgttccagtattacgtcgagcagatattcaagtctcttgatgaacgtgctgacctagaggacagcgtgctagcgcttctcgaatggaagtacctgcaggttttggagcactcggctcggcctcccaaggcgattctcgagtcgctttcgaaggatcctcagatgttcgttcacatgctgactgctgctttcgcacctagtgaggagtatcaaggggcggaagacgctcaggagcagcgttctacgagtgtcgcgcgccaagcatatcggttgctccgtgtgtggaatctggttcctggtacgcaaagcgatggttctatcgataagaatgcgttgagcaaatggattgtcgaggtgcttcgcttggctaaggacaggcaccgtgagggcatcgcgatgagtcagattggcgtgattctatcggcctcaccggttggcgcagacggtatttggccggcagaagccgtgcgggaagtcatcgaacagttcgaggacaaaacgctcctggacggatttctggtcggccagatagaccggcgaggggtcacgaccaggctgcttggtgatggtggtgcgcttgaacgggccgagatggctaagttccggaaatgggctgaagcactggagtcggagtatcccgccacggccgcagccctggaaaaaatcgctaggcgttatgaagccgaggcgagccatcacgacgatagcgcagaacgacaagaatggaggtattag

SEQ ID NO: 339363 - DNA, 1308 bp, Pseudomonas aeruginosa
atgtcgaaaacttacgaagtacgggtggtcagtacccagaagaaatattccagggaattccaggtcaagaacgaattcgaggatggctggaaatcggtcctgcaacgagcacacggtacccctgtggtctgcctgtgccccggcaagggtaatcgctatctctcggtgaaacatcgggaggggagcgacaactatcaccttgcccggtacgccaacaccggtccggagcatgcaaacgactgccgattccatgctcacgccccagagcgatcaggcctgcagggctacgctgagggagttgtagaggaggccgatgacaacaccctgcgcatccggctagcccatggccttcgagtcaaagaagcgtctcccgccgccgatgacgtggccgacgttccgcgtacgccgggggttaagaagccttcgatacgtctgctcgggctgctccagctgctgtggttagaggctggattggccaactggtacccactgatggaaggcaagcgaacgcccgcgaatgttgcctattgggtatctgaagccgcaaagcgtatccgggccagccgaatgacggtgttcgacgtcttgctgatgtcggccaagaagaactcccgcatggcgaagcgcaatgctgaggtcgtggagctggcgcaggagcattcgcgcaggctcattgcggtgtcgccgctggcgtccttcaactcggaacgacgcaatctcttgacgctttctgtctcgggacccttcgggatgccgacgatggacattcgagcggaggttcggcgccgagttgaacgtagctttgcttctgagctagtcgcgtgggagtctgggcacgaggttattgcgatcgcgcagctgaatctgaagaaggggcgctacgcggatgtcctggatttggcgctgatgcgcgtcagcgaccggatgattccgctcgactccggctacgaagccacaattgaggaaaagctccacgccgagggacgcgccttcttcaagcccccacgctttgaagctgaggatgaaatttttcctgacttctggctgctagacatgggccgtgacacgcaatatcctctggaggtattcgggatgaatacgccgacgtaccagtcgcgccgacagagaaagattcgttggtacaacggtcagttcggttccgctggctggtggcactgggatgccttcatcgataccaaaggggaggggatcccaggcttcccagaacgaacgatcgattaccgcagtagagaaaatgaagaaaccgccggcgaagacgtaccggaatctgtagccgataccgaatag

SEQ ID NO: 339364 - DNA, 261 bp, Pseudomonas aeruginosa
atgaaaaccaattttgctgtgctcttatgtcttctggccttggctgcctgctccgatgagaactcaaagctccgaggccaattcatcgctggctgcatccagagtggagctcccaaatctatttgcgcctgcacatttaagaaactggaagagaaatacagccccagtgagctgaaagctctgaataccccctacaaggctccaccggatagcttcctaagagacacaatgcagttcgccctagcctgcagatccgaataa

SEQ ID NO: 339365 - DNA, 366 bp, Pseudomonas aeruginosa
atggaacaacaacatgaacaggactcggcaagctccgaaaccgacctcccaatcagtccagcggtaattggctgggggctggccgccgtagtcttttcgattctctgcatggtcttcaacaactcgcctttggtattgggtgcaggattcttcgtgaagtttcttgcggtgatcgtaggttcggtattgggactgatcggtgccttacttggtgatgccatccgtaagtttgcccatccggatgcggtctataccaatggcggcatcctcaacctgatttggataaaggtgttctggctcatgggaccgcaggtgattggcctactggccggggtcttcatcggctgtgccatcgtgctgcgctag

SEQ ID NO: 339366 - DNA, 459 bp, Pseudomonas aeruginosa
atgaaaaagaacagagcactcgcactgctttccggctttgccatgtgcattgtggctaccgacaccgtatttgccggcacctacgagtggacctccgcatatacccagggtgtcgaagagcacctggtcgacgacggcaacggcaacgaactgaacatctcctgccctgacgacgaaagacccgtaacggcctatgcaagcatcactggcaagcagtactcctccgataaaggggatggcttcgacgtgatcgtcgacggcaccacctatagcaatcccttcttcacggactgccacgtctgtggcgccaacttccctgggttctgggcagcactgcgcaaggccaacaacctgcagatcagcgctgaaggcaagacagtgaagctgccgaccaagaacctgaagaaggttctgcttccctatagcaacaagcaaaacatctgccggtcagcctggtag

SEQ ID NO: 339367 - DNA, 570 bp, Pseudomonas aeruginosa
atgcaggacgcaaacaccactatcgaaacttcctggttctacgaagagaaaggcgagcgcaaaggcggtttcgaccagcagcagatcatcgccctgatccgcagcggcaagctgacctatggatcgatggtctggaagaaaggaatgccagggtgggcgcagatcgagcagaccgaactgcgccagcacttggaagacatcgcaccaccaccactgaccggcgcaggcgtgaataacaagatcatctggctgctggcgttcgcgccaatcattggctacctgctggaatccttcgtcgcgggattgctaggcgcgaccgaagcccagtgggagcgagccatgacggagaaccgttactggtacgtgactctgctattgaacatcgccctgtcggttctcgactccaagcgactcaagcaagccggccatgacataagccgcttcaaaggctgggtgttcgtggtgccggtctacctctatcagcgcgccaagctgctgaaccagaacctcgcctacttcatcacctggatcgtgtgtttcttaatcagcatcggtgctcaccaagcctaa

SEQ ID NO: 339368 - DNA, 345 bp, Pseudomonas aeruginosa
atggccaataacgacttgaaacgtctggcggtgctcacgggtaaggcgattgccaagcaccgaatacgaatgggattgacgcaagaagaggtgggcgttcggttagggattggaaacgaagcggtctcacgaattgagcgaggacttcgaaagcccaacattgagcgcctaatcgagttcgcgagcattttcgaatgcgatttggcggagttattgacggaaatgagtccacggactacggagcaatcagcacgtatccatgacttgcttgcccagttggcaccagaggatcgtcagctggtgatggatatcgtggaacgcttggccggtaggctccggtcctaa

SEQ ID NO: 339369 - DNA, 855 bp, Pseudomonas aeruginosa
atggctcgtcgccgcagaacctcgctcatcgaggacctcattgagattgctagccgcttgccgtggtgggtaagtctgctcatcgctttgggcagttggctcattctccatcctattgctaacagtcagcctgaagtccccaaagacttgcaccagatggggcaatcagttgccggtcagctcattcgcacttttgcctttttcggccagttcgtgttgcctgcggtattcgttctaggagccattggttctttggttgctagggcagaacgcaagaagctgcatgcaaacgcggcgaacgcgagagagcctgggcaagtaatcgaaggcattagctggcgcgagttcgagctgctggtcggagaggccttccgccgcaagggatatacagttatcgaaaagggcggcgatggaccggatggtggcgttgacctggtgttgcatctgggagctgacaagtatctagtgcagtgcaaacattggaagtccatcaaggttggcgtcacggtggttcgcgagttcttcggtgttatggctgcggaaggagctgcaggaggctttgttgttacatcgggtagatatactgctgaagccaggaagttttcggaaggtcgcaatattcaattggtcgatggtgttctactcgaacgatggatcaacattcgctcggaatctagatctgccacccagcaaaatgctgacgcagatataaatgctatccaatcagaaagcccaagctgtcctgtttgcaatgagcccatgatcgctcgaactgctaagcgtggggcgaatattggtatgcagttttgggggtgtcaagaatatccggcttgtcgagggggaagaaataaatag

SEQ ID NO: 339370 - DNA, 1338 bp, Pseudomonas aeruginosa
atgtcgattcctccagagcatagtggccgttatgtctatcacttttcccacatcgataatctaccgaatttgctaaggtcgggatttttagcaaataatcataaaggctttccaagatttgggcatcactcaattgcggcttcgggaatccagaagaggcgtgcagaaatggccgttccttgtggacccggggggtgtgttcatgattatgttcctctctattttggcgcgatcagcccaatgctgcttggcgtgattaacgcaaaaaacgtagatcagatggaaattctttattttgaatttcctatatccatacttcagcgtggtgatgtggtgttcaccaatgcatcggcgaatacggttattcctccgcagttctttgataatcccgatgagttgtgtaagttgaactgggaggctattgatagtcgtaagtgggggaatgtcaatgatgacttccgacatcagcgaatggcggaagctcttgtgtatgggagtcttcctctggcggcggcagcgcgctgcgttgtatggaatgaagggataaagaagcgggtagaggatattgttgcggaagctggtgtgccttttccagtgattgaattcgaatccccagaaagacgccactggtttactaattttcaggaggcagcaaggaaggggacgagtatagttacagggccgcgagagatatcaatgatattttcggcggcttgccaggaaatgctctcggatataggtaagcaccaggagtctgctgaatttgaggatgaggtagaacttttaaatgcactaagggaggactttgggtgtcttgctcaaacggcagagttggttgggcttaaatccgaaaatggcgtacataaacgaactgttgatgtccatactaaggaagttgtggcgaagttgctctcccttcgtgagtatggtgagcttaaagaggggcagcgagtactggtagagcttgcggcatatttgcacgatattggtaaagggccgcgctcccgctgggattttaatggcggattacaaaaagttgacccaaatcatccagttggcgctatgccaatgatggtcaacgtactgaccagggtggtcggaaatgtctcggcgataaaggcaacgacccttgccaagctagtttgctatcatgatcttgtcggtgaagtgcttggaaaggagcgagatgcacggcaaattttggatgttgtcgataataaatctgagctggatatgctctttgcgctgggcaaggctgatgcaacagcgttagctgagcattggtgggatgaaaccggcgcagaacggttgtatgattggtgtctcgagtctatgtaa

SEQ ID NO: 339371 - DNA, 1380 bp, Pseudomonas aeruginosa
atgattagttttcttgatggagacatgttcgagactcctgcggatattcgagtgaataccgtaaactgtgttggagttatgggggctggggtcgcgctggcttttaaaaagcttttgcctgagatgttcaaggattataaaaaagcttgtgatgctggcttggttcgtccaggaaagttgcatgtatggcgttctttgacgggcgattgggtagttaattttccaacaaagagggactggcgagatccttcaagatatgaggatatcgatacaggtttggacgctctgtatgaatttcttgctccactgggaagcgtaaccgtaacaattccagctttgggatgtgggcacggcggattagactggggacgtgtttctcagatgatcagagagaaactttctgatttaccggcaaacctgttggtattttcgccctcagaatctaggcgggttggcactgctacagctggcgaggatgaaagtcttgaagtaaagcgcgcagggtatactgcatcttcattcgcgagtttttctaataaaactggctctactatttatgctaagggtgatttgggagcgctaaacgagccctggatatctgtttttccttcgcgcaatccctctatgagagagatgtcggctcttgaatcaatttcttcggagctttccaggaaaggagatggtattaccgtcgctctgatttataacaatcgttctagtgaagatgtagctagagtttttttagatcgcggaatgaatgttgtaatgatccttccttttggcgtgttaactaggaagaaaatagcggtggaagcggggggcgattgctcgggctcaataacgctaatatctgctgtggccccgggtgaaaagtggagtcgatttaccttggccggtgccacagatatcctaagtggtaattcatcggcagcacttttgtctgacccagaagtaggctgggttttgaagagatctaattctgactggcgacagctcgcaaagttcttcatacgctatgatgttatgtcaaacgagagtagaagtttactggctgaggcaaatgcttttgcgattggtcgacgttcgacagatggtgcgccgaatgttgagaatcttttaagtgcatatagaggtgagccagtattttctgacgggcgtaaggatggctgtgctgatgtagatagcaccgaaagtctcggagttggaaaagagcttgtctcattgactgttgatcttgacaaatatccctttgagctgtgggtgaagatactagagtccgttaggtatagcggggcgcaagggttggttcttaaagttgatgttgaggatgagggggcagcaaagtcattgagagaaattatttctttgataaagcattag

SEQ ID NO: 339372 - DNA, 228 bp, Pseudomonas aeruginosa
atgcttgttataacaagttataccgtgatggtaaacgccatgaacgatcaagcggaaataccgaaaacgcatatggatatggcgccacccgtgcgtggctctcgccggccaaaggaccggcccgcagcgcggaccggcccgccccctcagcgcagcggccgccagagggtgaaggctaccggcggcgtccagccgctgtttgaggtgtgcgcctgcaggcagagatag

SEQ ID NO: 339373 - DNA, 981 bp, Pseudomonas aeruginosa
atggctttggtgggtagacgcgatggtcgcaatttcggttatggcaggcaattgagctacgcagggccgcaggcgcttaaggacatgttcggcggcggccactacggcacggtcaaggcgcactgtgatcggtggcaggcattcgtgaagtggtgccgctccgaacagggaccgggtatcaacgatgcgcggcaggttgatcggaaggtgttggccgactatgcggcgtatctacacgacatcgttaggcgcggtgaccttgctgttagcaccgcacaaaaccgcatatccagcgttaacaggaccatggcagcgcttcgcggtgatcagtacgtgaaactgcccagtccgagcaaggcattgggtatgcagcgcaccggggttcgacagtcagtgccgcaaggccaggatcgcgagcacgtgaagcagatcgtcaacgcactttgcatccaacatcatcaacgcgctgccgcgattgtgctgttggcgcgagccaccggcatgcgcttgcgtgaggccatcttggctgacctgccacggcttagccgtgaggctgacggtctaggaaagcttaacattcaggaaggcaccaaaggcggtcgcgccggtgcttcggcgccgcgttggattccggcagacagccatgttcgagatgcacttaagtttgcacgccagatttcgcctgcgggtagccgcaacctgatagcgccaaacgaaagctacctgaatgttctgcaagaaatcatcagccctgcgcggggcatcctgcatgcacacaacctgaaaggcttccatgagctacgagcggcgtacgcatgtgagcgttatgagcaaatcacccaacaccgcgcgcctatcaacggcggccaatgccgccaggttgacagcaaccttgatcttgaggcccgaaggcagatcagctatgagctggggcacggtcggatcgatgtggtcgctgcctacatcggaggacggatatga

SEQ ID NO: 339374 - DNA, 276 bp, Pseudomonas aeruginosa
atgagtaagtcattcgatatggaactgttcttggctggcgtgctgaccgggtcgcgcgcaacgcagcaacgtcatgtgcgccaggcgaagacgattcaggttgcaatcgcagagcgctggcagcgggaaaccccatggacttggcaaaagaagcatgtggtgtggtttcttgagaatcgcttgagcgatcacagtcatgcaacgcagtattactacgtgctgacggtccgactgctagcgcgacgcctagaaacgtcatgggttttcaagctctga

SEQ ID NO: 339375 - DNA, 291 bp, Pseudomonas aeruginosa
atgctcaaacgccaccgagaaaccctagaaaaccggcttgaggagatacagacgtggggctggactcaactgacctggggtgaactctacctctggtacgcggctgaacggctctcagtgaaaacttataagcatattttggaaagttatcgcgagcttcgcgatgacgaggatgccagcctgctagtaaccacggtggcaggaggactaatttttacgccccccgcacaaacctctcaaattgaagatgtcattgaacacggcttcgacaacgcgcccaagatcggatga

SEQ ID NO: 339376 - DNA, 1416 bp, Pseudomonas aeruginosa
atgtctctacctccgatacttgtcgcacagaatcaggtttcaactggtgtagatcaatttaccacagcgctcaccggatacctaaaccatttaggtcttcctactaacaacgtcttagtgccagttcatgagcggcagcgtgtcatcggcaacctaccggacgtaattaatagtattgatttgagcaaacgcgccgagtcactatacatttcgaaatttatcgccgcctgtggcgcgggtctatttgacgcagcattaaatttcatttgggatgaaacagtcgtaagtctgcgcaataaggtggcccgctttgatctagagtacttctacgacagcgtcattacagacgcgacgcgcaggagcaaactccgcgatgaggatgacttagtaaaaattgaagaatgggagcttgtgcgtggctgtcacgtaacgggcatcctatctgatataggatatcgtcatttagactatattagagacatgcgaaactgggcgagcgccgcacatccaaatcaaaatgagcttagtggtctacaattaatctcatggctcgaaacctgccttcgagaggtgatcgctaaggaacctgagcctgcggcaatcgaggtcaagcgttttttgcacagcgtcagaacgcagatccttacagagcaggacgctcagcatatccgagcgggaatggagcgtctcccggtagatataattaaatctcttttgagagcaatatttggaatgtacaccgcggacaatacatcaacgcaggtgaaaaccaatatccgttttatcggcagtaagtgctgggctctagcgccggatgacacccgctatgaatgcgggttccgtttcactacatttgctgcaaacggggagaacgggcggaaagcacttgctcatgagttcctaaaaggagtggacggacttgggtacctctcgccagactcgctggcggtagagatgtcagtatgcatcaacgcattgtttaacgctcatagtggtttcaacaattttcacaatgaaccagctcatgcacggaatcttctagcctacgtcccagcaaatggtcaaatccccgaaagcgtccgcgttccgtatgtaaaaactctaattatggctagagtcggtaatggatacggcgtttctgacatggctatacctaattatcaatctatgatcgcccggtttggcgaggacgaattcaaagaatttgtaaaactcataattgatcgccaatttcaggcccgcttgacactgcgaaattgttccactcgatttaaggaacttgcagctagtttcttgccgctgactgcaaaccaaattacccacggagcactcacttctatcatagggagcactgaccagcacttgccgaatttggggcgtgaaacagcttatacccgcatagtctctgcttattga

SEQ ID NO: 339377 - DNA, 873 bp, Pseudomonas aeruginosa
atggcctccctgatcgactactacagtatctgctgcatgttgaagctaggagttccagaggaaaaaattaagaaagtacaatatcgctcgctcagcaataccttcataattgaaaaagcctctatacccaagtctgaaaaagactcaacaacaatcgataccatcctcaagcaatacgcagaagcgactgaaaataataaaaacttcaaatcgctcataggagatgactattggattggctttctagggagggctataagtcatacattaaaggagtatggtgcactagaggatagtaccttcgagctagcttacgatgaggaagaggatcgaattaaggtaaaccctaaagtggagcagtattatttctacatgcgccccctgttgtgcaatgccgctaattccatgggcctaaagcacaatatttacatagatataaacaacttccttaagcacaatgcagtcccatacttgacaaacaatatcgagaagtttacaggcgaagagcgaatattctcgtatttcgaaatcagaaacgaccaatcctcccttcttaaggaaggcgttttaaaagatcttttgttgtcggatttcctagatttaaaagacagcctcaagtccaaggagctcaataaggataactatgaatttctttgcccgctagaaaaaaagtgggggcttggccgggttttgacattggatcctgtaaatggctacatcgatccgaacgatgatatcttatacttttatattggtggagtactggtggcaaaaacaaaaactgcaatgtggatcgatgctgataaaagtttacttactacattgcaagaactgaggcgagagatagatagaggccttaattttaaattctaa

SEQ ID NO: 339378 - DNA, 1764 bp, Pseudomonas aeruginosa
atggcaaccccaccctatcccgaggacgagcattcgagacaggcctacgtcgaccaactcggtctgctggaagaaggtgcggacgaggtattcgaggaaatcctcgccgccgctacgtcctacttccagacgcccatcgcgctcatttccatcctcgaccatcagcgccagtggtttcgcgcgagcatcggcctcgatatccggcagacgccgcgacgggattcgttctgcgcctatgcgatcctgggcaagggagtattcgaggtggccgacgccaccctcgacccgcgcttccgggacaacccctatgtgcaaggcgaaccgcgcatccgcttctacgccggggctccgctggccaccgcggaaggtctcaacctcggcagcctctgcgtcatcgaccgggaaccacgcgggccgctggccgagcgggacgtcgccatgctcgagcacttcgcccggctggtgatggcccgtatccatacgctccgctcgaccaactacatcgacgagccaaccggcctgtacaaccgtctccgcctgcaggaggacgtttccctgcgcctgcagcgcgacggcgccctcaccgtgatcgccgccgacctcctgcccctcgccctgctgaataccatcatccgtacgctgggctatcccttttccaacgacctcatgctcgaggcgcgcgaccgcatccgcgcggaactgccggatttcactctctacaagatcagcccgacgcgcttcggactgctgctgccacggcagcaacaggaagaaaccgagtcggtctgcctccgcctgctgcgggccttcgaaagccccgtcgtatgtcgcgggatcccgatcaaggccaacgtgggcctcggcgtactaccgcttgccgacgatcccctcgacggcgatcaggactggctgcgcctggtggtcagcgcggccgacgacgcccgcgaccgcggtgtcggctgggcccgctacaacccgccgctggaccaggcccagcagcgtgccttcacattgctgacctcgctgtcccaggcgatcggaaccgaagaaggcttccatctggtgtatcagccgaaaatcgacctgccgacaggcaggtgcacaggcgtggaagcgctgctgcgctggcggcacccgcaactcggcttcgtcagccccgccgaattcgtgcccctggcggagaaaaccgcactgatgcgccccctcagcgactgggtgctgcgccatgccatggcccagctggcgcaatggaacgcacggaacatcccgctcaggctggcgatcaacgtatcggcatcggacatggaagacagcagcttcctggaagaggccgtcagactcgccaaaacctacgacatcgacctttccgccctcgagctggaattcaccgaaagcgtactcatccgcgacgcctcggcggtcggctcggtgctgctgcgtgcccgggagcttggcatgggcatcgcggtggacgacttcggcaccggctacagcaactggacctacctgcgcgatctgccaatcaccgccatcaagctcgaccaatcgttcacccgcgacctcgccggctcgccgaaggcgcagagcgtcacccaggcggtgatcggcctggccagccagttgggttatcgggtggtcgcggaaggcatcgagacccacgacaccttccacctgctgcaggcctggggctgccacgagggccagggctatctgatcgcccagccgatgctgccggagcaactggaggactggctgcggcgttag

SEQ ID NO: 339379 - DNA, 687 bp, Pseudomonas aeruginosa
gtgggaaaagccagacggtggtgcctgcgacccggttccactcaagcggcatccctgctgatggctcgcattcactcctatgtggtgcgatacgacagtggtttcgcgcccaaccctttctatggctactgcacgcttgcgacctgcaaacccaatatccgccgatccgctgacatcggtgattgggtggtcggcagtggcagcaatgatagaactgtccgacgtggcgggcgtctcgtgtacgcgatgcgcgttaccgaggcgatgacattcgacgaatatggcgcagatccacggtttgaatacaagatgccgtaccgcaatgggagtcggaagcaaagttgcggggacaacatctacttcagggccgcgcctggagccgcttggcagcagcgagactcatttcattcccgccccaatggcacgctcaacccggaccatgttgcccgtgatacgggcgtcaacagggtcctgatcagtaatgattttgtgtacttcgggggcgagggtccggaatttcccgaggaactgaaagaccagcaagatcggcccttatgcaaaacgggaataggtctaaccacctttgacgatgcgcaactgattgcgaaccttgagaaatggattcgcagctttgacgtgagcggttatcagggcgctccattcgaatggctgactcttcgcaggtga

SEQ ID NO: 339380 - DNA, 486 bp, Pseudomonas aeruginosa
atgccacggaaaatcttctatagcttccactatcaacgcgacagttggcgcgcctccaagatacggaatattggtgttgttgagggcaaccaaccagcaagcgataacaaatgggaagaagtgaagcgaggcggcgaggccgcaatcaagcgctggatcgacgatcagctgcaaggacggacatgcacaattgttctggtcggagccgaaacggcgaatcgcccctggattcgatatgagattgagcagtcatggaatagtggcaagggactcttggggatacgagtccataagctgctggaccacaaccagcaaccatcagttgccggggccaatccatttgactcatttaccttgaacgacggtagaaagctatccaccgtcgtccgcatgtacgatccaccaggggccacgagcagtgcggcctataaccacatcagtgacaacctgtcgggctggattgaagcggcgatcgctgcgcgctaa

SEQ ID NO: 339381 - DNA, 225 bp, Pseudomonas aeruginosa
gtgaaagagttgcgcgaagtccacatcaccaagatccgcatcggcgaaataaccttgatctttggccaagttcaaggccgccccgcctggcgacggtacgggcagaactttggcggcggggtggaattgcctgaagagttcatgctcggcttccactccttccatgccgccgatgaaaacagcggcaacgagatcatcgcgcgacagcatttcttcccgcattag

SEQ ID NO: 339382 - DNA, 669 bp, Pseudomonas aeruginosa
atggaggaaaccatcatcaacaacgacgatcgtttggagcacatgctccaccgctccaatgccttgcacgaacgtctggatgaactactgggcgacgccgatttcgatggatcgccccgtggcgagtcagctcttggcatgtgcctggtcgctatggagcatgcaacagcgatgcgagcattgatggcgctgcgactaccctcgtccgccgtcggcctcatgcgcctgcagttcgaggccctgacgcgggcaatgtggctgctctacgcagccagcgacgcagcgatcgacaagctgctggcgccactgacgctgcagagcgaacaggcggccaagaacttgcctggcgccagcgaaatgattgagcagatcggcaagcgagtcggacaaggcgcgccggcggctgcgcaccaaatgctttcgcatttcaaggatgtgacctggcacggcatgaactcgttcgtgcatggcggcattcatccactgcggcgcagtgccgacggcttcccggtcgatcttgcgctacaggtactgcgcagctcgaacggtctgacgaccatgaccggcatgacgatggcagtcctcaccggcgacgaggccgtggccaagcccgtgagtaagatccagccggcattcgccgactgcctgccggatctcctgaaaccttga

SEQ ID NO: 339383 - DNA, 885 bp, Pseudomonas aeruginosa
atgtcggctttttatatccttaccgccctctactttataacgccagcaatacttgctgtagcttccaataaagccgagtcattaagactcatagagaaaaataagctctttaaactctccgagaatgccaagagcacgaaaaacctactctcccttaccatctggctaagcctctacattgccgttctcgccactggttataaattttttacgggggacccataccgaggcgtagccttaactgcctttacgataaccactatatcctctgtaactctaagctttgtgtacttcaaaggatttacgatctataaaaacatatccttcttggccaacataactttggcctacatcacattgtgggttacttggtattgcggaaccatcgcaagtgaatatatcagtcgaaaaacaggactaagcgcaacggaaatgccttcaggtgtagcgggacttacgctactttatacccctgtgctatggggagtgataatggtctatgcttttctaatcctctatatcatagcaggcatagtattcacccttaaaaacccaccaaaaaaaataaaaaatctcacgcctagtgaaaaacttaaccacagtcaaagtgtatttatttcattaagcctcttctgcggcttagccttctgcacaactttcgtagccagcatagtaattgaaacccctagaagcgaactattcaaaaaaattgaaatgaatatcctctatacttcaggctaccctttaacaacaaacacatgcagcccagaagctcccaaagagccaaatcggagatacgccatacttacctccggaaaactggcaatcgcagaaaagaaaacggaaactaaatatttatattcagtcactgactgtcgccagtaa

SEQ ID NO: 339384 - DNA, 1767 bp, Pseudomonas aeruginosa
atgagattcattggtgcgtttgaggacctaaagttaaaactttctagcctggaagagctgggtgagtggagtcagctgaatggaaatcaatatcaatttagaactatgagcagaggtattctaaattggtatccatccacagggggattctttttccaaggtcgaactgagccaatggagcagcttaagcgcttggtaggggagatcctcgatgccgatgatgagggaccaccctctattgaagaaaaagcagaaattgatgcggcttttgatgcgctctctgtagaggatgacagcattcaagagtcgtatttaaatgactcatactctgactcagagcttgtgatcggtttggttgggtcggttggtactgacttgaggtccgtttcgggaataatagaagatcgtcttaaggcatttagttatacatgccgggtggtaaaggtttcttctgatgtcattgatgagatggtagaggttaagctgccgccaaatgggggggaatacgagagaattagtacctatatgacagagggtaacagtctgcgaaaaaaatataaagatagatcgatattggcactgggtgcggcagctaagattaaccagattagggagggggccgcacttagacgtaatgcatttattattagctctcttaaaacgccgtatgaagttcagcggctaagaaaaatttattctcaagggttttttctaataggtgttcacgcggatcttgcgaggaggcgtaagtatctgatggatgatcttcggatgtctgaagaaaaagcatcgaatcttataatgagagatgctgatgaggacgatccagatggccaacatacgcgtgatacataccacctctcggatttctttgtaaattatgatggtagtggtgattcgctcaaggctcagctttggagggtcatagatattttatttggtcagccatatgtgactccgacatttgatgagtacgcaatgtttatggctttttccgcttctctccgctctgctgacttatcccggcaagtaggggcagtgctaactcgagatgaaggaatcatttccacaggggccaatgatgttcctaaagctggcggcgggttgtattggcctgaattagatcctgaaagtcataaagtagtggatgttaaggatggcagggactactgtcgtggcgtcgattccaatgctgctcaaaagagtttaattgttgatgatattctggaaaaggtccctgctgaatatcggagcacattagcgccaattctgaagaagagcagaattaaagatattaccgagtatgggcgagttgttcatgcagagatggaggcactactgtctgccgctagagcgggtgtaagcccaaaatcagcgactttatattgcactacctttccttgtcataattgcgctaagcacataatcgcagcaggaattaagcgggtcgtttacgttgagccttatcctaagagtaaagctcaagagtttcactctgattcgatatctttaaagaaagacggagatggagtgttttttgacccatttatcggtgtaggtccacgtagcttctttaatttattttctacaaatttaggaagtggttacccgattacacgcaaaacggatgatgggcaaaaggttgactggatggaggcagatgctaaattgcgtactcagatgctaccttgttcttatatggaacgtgagcgcatagctggatcgcttttgtcaaggtatctaaatggggatggcgatgaacggtaa

SEQ ID NO: 339385 - DNA, 663 bp, Pseudomonas aeruginosa
atggctcgtcgccgtagaatctcgctcatcgaggacctcattgagattgctatccgcttgccttggtgggtaagcctgctcatcgcttttggcaattggctcattcttcatcctatcgccaatagtcagcccgaggtccccaaggacttgcaccagatggggcagtccgttgccggcccgctcatccgcactttcgcttttttcggccaattcgtgttgcctgcggtattcgtgataggcgccatgggttccgtgcttgccatggctgaacgcaagaagctgcacgcaaacgtggcgaacgcgcgagaggccggacaaaccagtgaaggcattagctggcgcgagttcgatctgctggcgggcgagactttccgccgcaaagggttcaccgttgtcgaaaaaggaggtcgcgggccggacggcggcgttgatctcgtgttgcacttaggtacggaaaaatacttagttcagtgcaagcagtggaaagtcatcaatgttgacgttacagtgatctttgagttctttggtgtgaaagttgcggagggcgccgctggaggctttgttgtaacgtctgacagatacaccgctgaagccaaagaatttgcagaaggacgcaatattcaattagttgatggcaaattgccagaacgatggggtttttaa

SEQ ID NO: 339386 - DNA, 351 bp, Pseudomonas aeruginosa
atggccaagtaccgcatatcccatgatgcccaagcggacatcgtcgatatcctgcgcttcacccacaaccgattcggcgatgccgcgcgccggtgctaccaggccctcatcggcaccgccctggaagcggttgcgacagacccactgcggctcggcagcctcagccgcgaagaagaggggccaggcctgcgcagcatccacctcgtttactgccgctcgatgcccaacgtcggtaaggttgttcggcgcaggcacttcgtcttctaccgggtggcgacagctcaggtcctcgaggtggttcgcgtgctttacgactcgatggatctggatcaacacctgcctcctcgatga

SEQ ID NO: 339387 - DNA, 1980 bp, Pseudomonas aeruginosa
atgaccgaccgccgcgacgacgatttccgcatccgccccaatgccccgaagaaccgaggccagggcttcgtttccaaggtgctccagcaggcaggcaaggccagcagcggcaagtcctcggtgcgccgtcctgggacggctgggggcaccgggaggggcactggccagcggcccggctcgcgcctggggcgcggccacacggcggcgcgcttcgccggggcgaagctgacgcccatgtcgcggcgcgtgaccatcaagaccctgctggtcaaccagcgccaggtcagcccgcagtcgctcgccaagcacctgcgctacatcgagcgcgatggcgtgggccgcgatggcgagccgggccaagcctacgggccgcagaccgatgccgccgacctcgacgccttcaaggaacgctgcgccgatgaccggcaccatttccgcttcatcctctcgcccgaggacggcgccgagctggaagacctgcgcacctacacgcggcacctgatgggccgcatggaagccgacctgggcaccggccttgattgggtggccgtcaaccactggaacaccgacaacccgcacacgcacatcgtcgtgcgcgggcgcgacgacaccggcaaagacctcatcatcgctggcgactatatcgccgatggcttccgccatcgcgccgctgaactggcgaccgaatggctggggccacgcaccgagctggagatccagcagaccttgcagcgcgaggtagagcaggagcgatggacaagcctggatcgcacgctgcaacgcgaagccggcgaggatgtccgagtgcagatcgaacggttcaacgaaccgcggctgcaacgccagcgcctgctgctgatcggccggctgcaacgcttgcagcgcctgggtctggccgacgagatgcagcccggcacctgggctgtccattccgatgccgaaaagacgctgcgcgccctgggcgagcgtggcgacatcatccgcaccatgcagcgggccatgcgcggcgagccgcgcgagctggcggtgttcgagccgggagacgatggccgaaccattctcggtcgcgtggtcgcgaaggggctggccgacgagctgcgcgaccggggctatctggtcatcgacggcgtggacggcaaggcccattacgttgcactcaacgcccgcgacgagctggcgaactatccaaccggtgccgtggtggaggtgaagggatcggctgacgtgcgcgcggccgacaagaacatcaccgcactggcaagcgatggcctgtaccgcaccgaccatcacctcgccatcgcgcaggggcaggccgcaccgggccgcgacccgcaggaagtcgtcgcagcccacgtccgccggctggaagccctgcgccggacgggcatcgtcgagcgcgtggccgaagggctatggaaggtgccggacgacctggccgaacagggccgccgctatgacgcgcagcgcctgggcggcgtggcggtagaactgaaatcgcacctgcccatcgagcggcaggcccgcgtgatcggcgccacctggctcgaccagcagttgatcggcggcggctcgggcttgggcgacctgggctttggtggtgaggccaagcaggcgatgcagcagcgcgccgacttcctggccgaacaggggctggccgagcggcgcgggcagcgcgtgatcctggcgcgcaacctgctgggcacgctgcgcaaccgggagctggcgcaggccgcgaaggacattgccgccgacaccggcctggagcatcggcccgtgtccgacggccagcgcgtggctggcatctaccggcgctccgtcatgctcgccagcggacgctacgccatgctcgatgacggcatggggttcagcctggtgccgtggaaaccaataatcgaacaaaggctgggacagcaactcaccgccaccgtgcgcaacggtggagtgtcttggggatttggccgggagcgtggtttagcgtga

SEQ ID NO: 339388 - DNA, 798 bp, Pseudomonas aeruginosa
atgctatccactggtggttcacgcgtcggcgaggacgtcttgttttccctaagccatcaaacacaggtctccgatgtagagatgcccccgcacactcaccgcgaaggtcaactctacgtggtggcagaaggctcaatgattgtcgcaacagcccatgaaacgtggctagtagcgcctgggcaaattgggtggataccacccgaggtgacacacagcgcacgtgttcacgggacaatgtcaggctgggtgggccatcttgcccctgagctatctttggacctccctggccggccgacggccttcaggcaaagtgccttatcagccgcaatccttgaaagattgcctgggagcggagtgtcctccgcgagcgacaaacgtgagcttcgtctgctagaggccctcgtcgatgagttgggtttgctcccgccccagcctatgtgcttgccgtaccctaagacttctaggctcgcggatatcgcaagaaaaattattgatgacttggcagtagcaaattctcttgacgacatggccgcgctagcattcatgtccaggcgaagtctcacgcgccagtttcgggcggagactgggatgtcaatcgtggagtggcgtgatgccgctcgcatgcagcgggctgtgcaattgttggcagcggggcatagcgtgaccagcatcgcgtatacgctcggatacgatggagcaagcagattcatagataaattcagtgcaactttcggcgtcacaccgaagcagttctcccttagatccatcagaaatccgctgcgcgaagatgctgattga

SEQ ID NO: 339389 - DNA, 816 bp, Pseudomonas aeruginosa
atgcaactggatatggatttgtgcagccagcacctaaaaacggttactcaactactaagagaaaatccagcagaaagaaaccttcgagatgcagggggaatgatttcctacgtcaaagaagccaactctcgggcgtgctctttactcaagaccgcactggcagaggcatacccggatatttcttggggatattctgagcgcacaggtgcgtcgttcagcaacggctcgggttccgaggcgtcctggatctatgatccaattgacggcgcataccattatcttatgggtctcccgttgtggtcgtcgtctctcgcgctggtagtgaatggagaaaccagggctgcttttgtctacgatcctgtcctggacgaaatgttcacagcggtcaaaggcgaacaggcgtcactgaatggaagagaaattagatcgtcagatcgaaagctgcttgaagccgcagttgtcgctacgacgatgccatcttttaaattcgacggaagggatgcaaccgacgcgaccattgcgtctatacagaaggtcgtcccggctgtgttttccttacggattatggcgtcgtcatcacttcagcttgcatatgttgcggcgggaagactcgacgcctactggtctatggatggtgacgtagaggactggctggcaggtgcgcttttggctgaagaggccggcgcattggtcactaatgcagaatcaggaaatttcacgattggggataaatcaattgtcgcgtcagggcagaacctatccacacaaattgcacatttgctaaaaaaagaaacggaacccgataatggcggatag

SEQ ID NO: 339390 - DNA, 621 bp, Pseudomonas aeruginosa
atggcggatagaaaatatggagagcctgcgcccccaactagcgaaaggatttcgggcgcagattggtatgggcaagagttgctaagaaaagaatatagcaatacgctttttgtcgacattgacttaactgaagtgcagtccagtggctgcgtctttaatgaatgtaccttccggcgagcacgctttaacgcatcgatccacaaagacagcgcttttgtaaattgcacgtttgtgtcgtgcaatttcttcgacagcaagttcttggaatgtaaactcttgggcagcatgtttgatgactgccaatttcaccacatgcaagtcatcggaggcgattggggctttgtgggattacccggtgccgatttgagccgagcatcgctcttgggtatcaggttgagggaggccgacctcacaggggcaagatgccaaggtggaacaattcgcgacacagacttatcgggtgcttggctgcatagtgcggatttttccgaatgtgaccttagaggaagtgatctgagttctttggagccggaaaacgttcagcttaaaggcgcaattattacgatcgaccaaacaataattgttgctcaagctcttgggtttgaggttagagttgattag

SEQ ID NO: 339391 - DNA, 888 bp, Pseudomonas aeruginosa
atgcctgtaccctactgggacgaccagcgcatcttgcttgcggtgctaagagcgggcagccttctgggcgctgctcgcgttcttggcgtaagccagccgaccattcgaaggcgcattgaagccctagaaatcgccttgggggtagcgctttttactcgctgcgctgccgcggttgtacctacacagacagcactcgaccttgttccccatttagaggctatggaacgagcgtcttctgcttttcaacgtggggtcagtgcagacgccaatgcacttgcaggcactgttcgccttgcagccagcgaactgttgggtgtcgaacttcttcccactatgctggagtcattgcggacagatcaccctatgctgtcgatcgagttggcactttctgatcgagtcgaggatttgatcgagcacgaggctgatatagccattagaaccgtaaagccgactcatgattctttgattgctcgacgtcttggagtttccaaagtcggcctctatgctaagcctgaatttcttgaggcaaacggagagccaaggagccttgagcagctccgggagtgcccattgattacgccagatagagcatcagacgactgggcaactcttttgcagctcggatatccatctcatagtgcgaaagtagtcctcagggctgacaatcatttagcacagttggcagcggttcgatcaggtcttggcatagggccgtgccatagcatgcttgccaagcgttatcagctcacccgtgtgcttgagcaggatttcaacctggatgtagatgtgtggattgcaatgcctgaaagctcgcgaaatatagcgcgagtaacagcggtattcagatgtctagctaacgcaatgagtgaccttcttgcggagagctaa

SEQ ID NO: 339392 - DNA, 279 bp, Pseudomonas aeruginosa
atgaagaagatcgttccgctgttgctaggtgtcgccttgactgcctgcggccaatctgaggtgcctcagaaggccaatacgtcggaggcggatattgcaacggtggaagaactggcggccaatcccgaacggcttaaagaactgcgccagcagtgcaaaaccgaccgccccaaggtgggagacgtgctctgcaatcgagtggcggaagccacgcgcaagcgattctatggggacggcgaaacgccctatacaccgccgaaagagtcgccaaagttctga

SEQ ID NO: 339393 - DNA, 639 bp, Pseudomonas aeruginosa
atgatcgttgctttgctcaaccagaaaggcggcgtgggcaagaccacgctcgccacgcacatcgccggcgagctggcgatgcgcggccagcacgtcgtcctgctggacgccgacccgcagggttcatcgctggactggacgcagcgcagaagccagcaaggcttgccacggctgttcagcgccgtgggacttgcacgcgaaacgctgcatcaggaagcgccagaactcgccaggcgggccgatcacgtcatcatcgacggcccgccgcgcatcgcggcactggcgcgctccgcgctgctggcggccgagcgcgtgctgatccccgtgcagcccagtccttacgacctgtgggccagcgccgagatggtggcgctgattcgcgaggcgcaggtctttcggcctgcgctgcgcgcggccttcgtcatcaatcggcgcgtcagtaccaccgtgatcgggcgcgaagcgcgccaggcgctggccgatcaaccgcttcctgcgctgcgctcggaagtgcatcagcgcatcgtgttcgccgacagcgtggccgctggccggcttgcacgcgagacggcgccggacagcgccgccgcccgcgaaatcaccgcgctggtggacgaactgctgcggtggccgacatga

SEQ ID NO: 339394 - DNA, 858 bp, Pseudomonas aeruginosa
atgtccagcaccgcgctgccgtcccggcagcggccgttgcaggagcgcgaacagctcgacctgttccgcgccctgcccggcgacatggcgccgcgcgacagccaggatttgatggcctatccgttcttctcgctcggcaagtccaagcgggtcaagcccatcgacttccgcgcgggcaatgtgacgatccgcgtagagggcacgcaggagcacggcatcgccacgatttgggatgcggacgtgctgatatgggcggcctcgcagatcgtggaagcgaaggacgcgggcttgcggccgtcgcggctgatgcgcgccacgccctacgagatcctgcgcttcatcggacgcggcaagtcgctgcgcgactaccagcgcctcaaggctgcgctggatcgcctgcaatcgaccacggtggccacgtccatccgcgagacgaccgggcggcgcctgcaccgtttctcgtggatcaacgaatggaaggaactggccgacgccagcggcacaccgctgggcatcgagctgattctgccggactggttctatgcgggcgtgctcgacgccgccctggtgctgaccatcgacccggcgtacttccggctcacgggcggcatcgagcggtggctgtaccggctggtacgcaagcacggcggcaagcaggaatacggctggcaattcgacttccgctacctgcaccagaagtccggcagcactgcgaagccctacgacttcgcctgcgacctgcgcgcgctggtcgcgcggcagtcgctgcccggttacgtcctgggcatcgagaggatgccggacaacggcatggaactgctgacgttccggcccgtgccgcagacggcacggggataa

SEQ ID NO: 339395 - DNA, 759 bp, Pseudomonas aeruginosa
atggtcgatccccatcacgtcacgcattggtatccaactgcggcatacctctacgtcttgtggctggatgcgctcgcactggcctgggaatacctgcgcaggcatcccgactaccggctcgactggctgcgccgtcaccgccgacctgaagcgcatcgctggggtttgcgcctgctggaagaccccgccctggatgcgcgcgacgcgcatccggcctggctgcccggccatgccgccgtggtgcagctctaccccgatactgatccgccgcaggatgccaccgccttcgcgttctggcacatcccaggtcacaaacagctattccacgacggcaagaagctggcgctgatcgcacgcagcccaggccattgcctgcgctttgccctggcgcccggtctggaagacggcatggccgtggcctatgcccggcggggcggcactgccgcggctgtgcgcggtcatgcgtccggcacggccttcgctgccaccacgcccaggccaacatcctccgcgctgttggagctgcacaccttgcaggcgctcgacgcgactctggcgggcgcgtccttgcgcgatgtgggccaagcactgttcggtgccgacgccgtggccgactggtacagcgacggtggcctgcgctcgaaggtgcgccgcctggtacggcgcggcgatgcgctgatgcgcggcggctatcgccgcctagcacagcttccgccgcttgagaagggccgttttgaggacgacgcaaaacggccctga

SEQ ID NO: 339396 - DNA, 2007 bp, Pseudomonas aeruginosa; identical to SEQ ID NO: 323971

SEQ ID NO: 339397 - DNA, 279 bp, Pseudomonas aeruginosa; identical to SEQ ID NO: 323970

SEQ ID NO: 339398 - DNA, 555 bp, Pseudomonas aeruginosa
atgctgatgaaccaggcgcgcaacctcgccagcctgccgtccagcgtggtcggccagttgcgcgccaatctggcgacgaccgagcggctgatcgcccaggctcgcggcttggcctacgacgtgacgaatctggatcgggagttcgcacgcctgtatcccgagcagtacgccgccacggtgagcggcgaccagatgtaccgcgacgcgcaggagcgttggaagaacaccctcaacggcttgcagaccacgatgcagatgcaggcccaggtgtcgcagaacctgggcgaagacgaaagcgtgctggccgatctcgtgggcaagagccagtcggctcaaggtgcgttgcaagccatgcaggccatgaaccagttgctggcattgcaggccaagcagtcgatccagtcgcaacggctccagatcacgcaggatcgtgcggcctcgctggaactggcgcggcaggcggcggccaccgagcgcgcccgcgaggtgcggcgacgtttcctgggcgatggcacgcagtacacgccgcagcgcgtggatttctatggcaactga

SEQ ID NO: 339399 - DNA, 555 bp, Pseudomonas aeruginosa
atgctgatgaaccaggcgcgcaacctcgccagcctgccgtccagcgtggtgaaccagttgcgcgccaatctggcgacgaccgagcggctgatcgcccaggccaggggcttggcctacgacgtgacgagtctggatcgggagttcgcgcgcctgtatcccgagcagtacgccgccaccgtcagcggcgaccagatgtaccgcgacgcgcaggagcgttggcggaacacgctaaacggcctgcagaccaccatgcagatgcaggcgcaggtgtcgcagaacctgggcgaagacgaaagcgtgctggccgatcttgtgggcaagagccagtcggccgaaggtgcgttgcaggcgatgcaggccatgaatcagttgctggccttgcaggccaagcagtcgatccagtcgcagcggctccagatcacgcaagaccgggcggcgtcgctggagctggcgcggcaggcggcagccacggagcgcgcccgcgaggtgcggcggcgcttcctgggcgacggcacgccgtacacgccgcagtccgtgaacttctacggcaactga

SEQ ID NO: 339400 - DNA, 321 bp, Pseudomonas aeruginosa; identical to SEQ ID NO: 323978

SEQ ID NO: 339401 - DNA, 1386 bp, Pseudomonas aeruginosa; identical to SEQ ID NO: 323979

SEQ ID NO: 339402 - DNA, 444 bp, Pseudomonas aeruginosa
gtggcgctggcctacatcgaaccgcgcttcaagctctacctgcgcttcggcgaacctgcgcgcacgctccagctcgaccgctggcggcgctgcgcggtgttcctgccgggtgccatgttgtgccgcatccggtggcaggccaacgactacggcacgatccgctggcagctcatggtgatgcaggcttgcacgccgctcgacgcggcgcagcgcatccccggcgtgcagccgggcgcgcgcctgctgctgcacgccgagggcgagatgcaggtgcgcgccgtgctggagcgcatcgacgccatcgaggcgcagggcatcgcgcctgtcgccgcttcgcccgcgtactggcgcacgctcgccaaccggctcgctgcgcgcctgccactgcccgaatacaccgccgagcggcacgccgcctggctgaccgggagggcgctgccatga

SEQ ID NO: 339403 - DNA, 603 bp, Pseudomonas aeruginosa; identical to SEQ ID NO: 323959

SEQ ID NO: 339404 - DNA, 189 bp, Pseudomonas aeruginosa
atgactcgcaccaccaccagccgcccgcgcatggcggcgatctactcccccggcacggtacgcgcccaccgctggcatggcgatggcgacgtgcgcggctaccgcccgccctcgggctggtcggcccgcgccgacctcacagacattcatcccatcacgggccgcgccttgccgcgtgccgtgtggtga

SEQ ID NO: 339405 - DNA, 609 bp, Pseudomonas aeruginosa
atggccgtgctgcattacctctttgcgcgtttcgatgaacgcttcgacggggcgcccacgctgctgatcctcgatgaagcgtggctgttcctcgatgacccggtgtttgccgcgcgtatccgccagtggctcaagacactacgcaagaagaacgtcagcgtcatcttcgccacgcagagccttgccgacatcaaggattcgagcatcgcgcccgcgatcatcgagagctgcgcgagtcggatcttcttgcccaacccgcaggcgaccgagccgcagattcgcacgatctacgagggcttcggcctcaacaggcggcagatcgaaatcgtcgccaccgcgcagcccaagcgcgactactactaccaatcccgcctcggcaaccgcctgttcgacctcgacctggggccggcggcgctggcgtttgcgggcgcctccacgccgcaagaccagcgggacatagaccgcgtgctgctggacgccggcgtacccggtttcgcgggcgcctggctgcgccatcgcggcctcgattgggcggccgacctgctgccctcgttccccggcctcgcgccgggttccctcgctgaccaaccccaggagaacctgtcatga

SEQ ID NO: 339406 - DNA, 465 bp, Pseudomonas aeruginosa
atgagccactaccgcctcaacttgttcatccagccggagcacgccaagcgcctggacgaactggccgccaagaaaggcgtgtccaagtcgtccatcgtcgcggcggcgctcgcatcgtggctgtcgcccgatgccgccgaccagcgcgaggcggccattgccaagcggcttgatcgcctgacgcgccaggccgagcgcatggagcgcgaccagaacatcgccatcgaaacgctggcgctgttcatccgctactacctgaccgtgagcacgccggttcccgaggcgcaccaagacgcggcacgcgcgcagggcaaagcgcgcttcgagcagttcaccgagcagcttggccgccacctgctgcggggccgcagcctggtgcgcgacgtggtggaggaactgcatcccgacccgatgcggatggaagacgcggcggcagcggcgcaagcgcaggagcgtgcgtcatga

SEQ ID NO: 339407 - DNA, 2643 bp, Pseudomonas aeruginosa
atgtacatcagcttctacagcgagcagatgaacaacccgcagatcaccgactacctgtcgcgggtgatccagcccaagctggcgaccctgcccggtatcgccgaggcggagatcctcggcaaccaggtgttcgccatgcgcctgtggctggacccggtgaagatggccgcgttcggcgtcaccgccggcgagatcaaccaggcggtgcagcagtacaacttcctcgccgccgccggcgaggtgaagggccagttggtggtcaccagcgtcaatgcttccaccgacctcaagtcgccccaggccttcgccgccatcccggtgaagaccgacggcgaccgccgggtgctgatgggtgatgtcgcacgggtcgaactgggcgccgccagctacgacgcgatcagttcgttcaatgggattccctcggtctacatcggcatcaagggcacgcccagcgccaacccgctggacgtgatcaaggaagtgcgggcgaagatgcccgaactggaagagcaattgccgcccaacctcaaggtgtccatcgcctacgacgccacgcgcttcattcaggcctccatcgatgaagtggtgaagaccctcggcgaggcggtgctgatcgtcatcgtggtggtgttcctgttcctcggcgcgttccgttcggtactgatcccggtggtgaccattccgctgtcgatgatcggcgtattgttcttcatgcaggccatgggctactcgatcaacctgctgaccctgctggcgatggtcctggccatcggcctggtggtggacgacgcgatcgtggtggtggaaaacatccaccgccacatcgaggagggcaagccgcccttcgaggctgccctggagggcgcgcgggagatcgccgtaccggtggtcagcatgaccatcaccctcgccgcggtctacgcgccgatcggcttcctcaccggcctcactggcgccctgttcaaggagttcgccttcaccctggccggcgcggtgatcatttccgggatcgtcgccctgaccctgtcgccgatgatgtgctcgcgcctgttgcgccacgaggagaatccctcgggcctggcgcatcgcctcgacctgatcttcgagggcctgaagcaacgctaccagcgcgccctccacggcaccctggacacccgtccggtggtcctggtgttcgccgtgctggtactggcgctgatcccggtactgctgatgttcaccaagaaggagctggcgccggaagaggaccagggcatcgtgttcctcatgaccaactcgccgcagaccgccaacctcgactacctgaatcgctacaccgccgagttcgaaggtatcttccgcagcttcccggagtattactcggcgttccagatcaacggctacaacggcgtccaggccggcatcggcggcatgctgctcaagccctgggacgaacgcgaaaagagccagatggaattgctccatgcggtgcaggcgaagctcaacgagattcccggcgtgcaaatcttcgccttcaacctgccgtcgctaccgggcaccggcgagggtctgccattccagttcgtgctcaacaccgccaacgactacgagtcgctgctgcaagtggcgcaacgggtgaagcagcgcgccagcgagtccggcaagttcgccttcctcgatctcgacctggcgttcgacaaacccgagctggtggtcgacatcgaccgcgagaaggccgcgcagatgggcgtctccatgcaggacctgggggtggcgctggccagcctgctcggcgagggcgagatcaaccgcttcaccatcgacgggcgcagctacaaggtcatcgcccaggtcgaacgcccctatcgcgacaatcccggctggctcggcagctactacgtgaagagccgcaacggccaactggtcgccctctcgaccctgatcgagacccacgaacgggcacggccacggcaactgaaccagttccagcagctcaactcggcgatcatctccggcttccccatcgtcagcatgggcgaggccatcgagacggttcagcagatcgcccgcgaggaagccccgcgtggcttcgccgtcgactacgccggcgcttcccggcaatacgtgcaggaaggcagcgcattgctggtcaccttcggactggccctggcgatcatcttcctggtcctcgccgcacagttcgaaagcttccgcgatccgctggtgatcatggtcaccgtgccgctgtcgatctgcggtgcgctgataccgctgttcctcggcgtgtcgagcctgaacatctatacccaggtcggcctggtgacactgatcggcctgatcagcaaacacggcatcctgatcgtcgagttcgccaaccagttgcgccacgaacaggggctggggcgtcgcgaggccatcgagcaggccgccgcgatccgcctgcggccagtactgatgaccaccgcggcgatggtgctcggggtgatcccgctgatcctcgccaccggcgccggggcggtcagtcgcttcgacatcggcatcgtgatcgcgaccggcatgtcggtgggcaccctcttcaccctgttcgtcctgccgtgcatctacaccctggtggccaggccggatgccccgccaggcgtgacgcaagcggcaaacgcacactga

SEQ ID NO: 339408 - DNA, 1989 bp, Pseudomonas aeruginosa
atgtcgagcctgccttatagaagagatatcgatggattgcgcgcactggccatcttgccggtggtgttctatcacttgggcttgggcggtttcaccggcgggtatgtcggcgtcgatgtctttctggtgatttccggctacctgatcacttcgatcatccggcgcgatcggcaggccgggcgtttcagcttcgtcgatttctgggctcgccgggcgcgacgcatcctccccgctttgttcgttatgatggccgtcagcctggcggccggctggttcctgatggagccgcgggactacgagcaactgggtcgtgcggtgcgttaccagacgatgttcgcctcgaacatcctgttctggaagcaggatggctatttcgacgccgcgtccgaattcaagccgctattgcatacctggtcgttgtcggtggaagagcagttctacattctcttccctctactgctggccgcggtctccgggcgcctgctgcgctggcggctcgccatcctcctcgcgctcctggcgctatcgctggcggccagcgtctgggcggttagccagcgacctggcagtgcattcttcctcctgccgatgcgcgcctgggaactcctggcgggtgccgtgctggcgttgctgccgggcggtagccgcggtcattcgcagtggtccctgcaactggcggccaccctcgggatagcggcgattctcctgccggtgttcttctacgacagcgacactcctttccccggcctcgcggcgctgccggcggtgcttggcaccgccctgctgatctgggccaacggcgccggcgacacctgggttcgccgcctgctgggctggcaaccgctggtctggttcggtctgatctcctattcgctgtacctctggcactggccgctgtacgtcttcgtccagtaccacgcactggaaaccctgggcctgccggcacgcctggggttgctggcggcgagcatcggcctggcggcactgtcgctgtactacgtcgaggcaccgttccgcgagcgcaagctgttcgccgggcgccggcagatgcttggcgcggcgctgtgcagcttgctgctgctgggagtcatcggccagttggtgcggcattacgacggcgtgccgtcgcgtctttccgaggaagccttgcgttatgccaaggcgtccaaatggcgcgatgggcagaccgactgcatgttcgacaagaaggcgctcagtcaggaaagcatctgccgcttcccggcggaactggctgccgaacgaccgctgctggtcagttggggcgacagccattccgcggcgttgagcccgctgctgcgcgaactggctaccagtcgccgactgccgatctggcaggcttcgctggcgggctgtccgccgttgctggggatgctggaaaaggacacttgcctgcgtttcaaccagcagatgctcgagttcgtcgaacagcagcggccgggcggggtgatcctcgccgggcgctgggacatgtatatatacggcgactcgcaggacggtacccgcaacattctccgcgagccggacgacacgccggacagctcgatcgccgaggcgctgctgcggcaacgcctgagcgggatgatcgaaaggctgaacgcggccgacgtacatgtctggctggtcaaggacgtaccgctgctgccattcaaggcaccggcgcggctggtgcggctgagtctgagcggggaggatgtcgggcgcgcacgttttcccttcgctgagcacgctgcgcgcgtcgcctacgtgaatgcgctgttcgatgcgttggccgaaggcaacccgcgggtgagcgtgctcgacccctccagcgtgctctgcgatggcctggattgtttcgccgaacgtgatggctggtcgctgtacatggataacaaccacctttcgacccagggggcccatgaactcgggcctttgttcgagccgatgctacagagcctcgacgactcgaggatcgccagccagaagtga

SEQ ID NO: 339409 - DNA, 261 bp, Pseudomonas aeruginosa
  misc_feature (158)..(167): n is a, c, g, or t
atgaatgacaagtcggtgctgagttgccgcaacctgagcaagagctacgacgaggggccgcaatcggtgcaggtgctgtccggcgtcgagttgaacctgctgcctggggagcgggtggctatcgtcggcagctccggttcgggcaagagcaccttgcnnnnnnnnnngagttcgccgactgggtatcggtcgccctcggcggcctggacacgccctccgccggcagcgtctggctcgccggcgaggaactctcggcgctga

SEQ ID NO: 339410 - DNA, 2454 bp, Pseudomonas aeruginosa
atgcccgattccgtcgctgccggcctgcgcctggcgccagaagaactgacccgcccgttcgctcccgagcaattcgccttcgacaccaccgatgacctggagcccttccgcggcgtgctgggccaggagcgtgcggtcgaggcgctgcagttcggtgtggcgatgccgcgtccgggttacaacgtattcgtcatgggcgagccggggaccggacgcttctccttcgtcaaacgctatctgcaagccgagggcaagcgcgtcgccacgccctccgactgggtctacctgaacaatttcgacgagccgcgcgaacctcgggtgatcgagctgccgccgggcagcgcgaccgaattcagcgccgacatcgaccgtctgatcgacaacctgatgtcgaccttcccggcggtcttcgagcatccggcctaccagcagaagaagaacgccgtcgaccgcgctttcaaccagcgctacgaccgcgccctggactcggtggagcggcgcgccctggagaaggacgtggcgctgtaccgcgacagcgccaacgtcgccttcaccccgatgaaggacggcaaggccctcgatgaggccgaattcgcccagttgcccgaagccgagcgcgagcgtttccacaaggatatcgccgccctcgaggagtacctcaacgaggaactggcgagcctgccgcagtggaagcgcgagtcgagcaaccagttgcgcgagctcaacgaggaaaccatcaccctggccctgcagcccctgctggcgcctctggtggagaagtacaacaacaacccgggcgtctgcgcctacctgcaggcgatgcaactgaacctgctgaagaccgtggtcgaccaactggtcgacgacagccgcaccgacgcccagcgcaagcaagggctgatcgagcagtacgcgccgaaccaggccatcgtccaccacgcgaccagcggcgcgccggtggtgttcgagtcgcacccgacctacgacaacctgttcggccgcatcgagtacagctccgaccagggggcgctctacaccagctaccggcagttgcgtccgggggcgctgcaccgggccaacggcggcttcctgatcctggaagcggaaaagatgctgggcgagccgttcgtctgggacgcgctcaagcgtgccctgcagtcgcgccagttgaagatggagtcgccgctggccgaactcggccgcctggctgcggtctccctgaccccccaggtgatcccgctgcaactgaaggtgatcatcatcggctcgcggcagatctactacaccctgcaggacctcgacccggacttccaggagatgttccgggtactggtggacttcgacgaggacatcccgctgggcgaggacagcctcgaacagttcgcccagttgctcaagacgcgcacctcggaagagggcatggcgcccctcagcggcgcggcggtggcgcgactggcgacctacagcgcgcgcctggccgagcaccaggggcggctttcagcacggatcggcgacctgttccagttggtcagcgaagccgatttcatccgtcagctggcgaacgaggaggtgatccagctcggccacatcgagcgtgccctcaaggccaagcagacccgcaccggacgagtgtcggcgcggatcctcgacgacatgctggcggggatcatcctgatcgacaccgctggcgccgcggtcggcaagtgcaacggactgaccgtgctggaggtgggcgactcggtgttcggcgtgccggcgcggatttccgcgaccgtctatccgggcagcagcggcatcgtcgacatcgagcgcgaggtcaacctcggccagccgatccactccaagggcgtgatgatcctcaccggctacctgggtagccgctacgcccaggagttccccctggaaatctccgccagcatcgccctggaacaatcctacggctacgtggacggcgacagcgcctcgctgggcgaggtctgcacgctgatctcggcactgtcgcggacgcccttgaagcagtgcttcgccattaccggctcgatcaaccagttcggcgaggttcaggcggtcggcggcgtcaacgagaagatcgagggcttcttccgcctctgcgaagcgcgcggtctgaccggcgaacagggtgtgatcatcccgcgcgccaacgtcactaccctgatgctcgacgagcgcgtgttgcaggcggtgcgcgccgggcagttccacgtctacgcggtgcgcgaggtggacgaggcgctggcgctgctggtgggcaagccggtcggtgcccaggacgagaagggacgcttcccgaaaggcagcgtgaacgatctggtcgtggcgcgcttgcaggagatatccgaactcggcatggaagaggacgacaaggaaaaggacaaaccggcggagaaagagaccgtcgtggcgaaggacaaggccgcggcgaagaaggactga

SEQ ID NO: 339411 - DNA, 1596 bp, Pseudomonas aeruginosa
atgaaacgcacggtcgccatcggcttcatcggcgccaccctcgaccgtctcggcaagggcgcggcgcgctggcaaaagtggcggccgagcatcggcctgtgccagcagccggacctgctgatcgaccgcctcgaactgatccacggcaacgacgcccgcgacctcggcctggccgagcggattcgcgccgacatcgccgcggtgtcgccgcataccgaggtccgcctgcagcagatggaactgcgcaacccctgggacttcgaggaggtctatggcgccctgcacgatttcgtcagcgcctaccccttcgacaccgagcgcgaggactacctggtgcatatcaccaccgggacccatgtcgcgcagatctgctggttcctccttaccgaggcgcgctacctgccggcccggctggtgcagacctcgccgtcgcggcgcaaggacgaggcgcgccatcccgagggctcggcgacgctgatcgacctcgacctgtcccgctacgaccgcatcgcctcgcggttccgccgcgaacaggaggaaagcctggctttgctcaagtcgggaatcgccacgcgcaatgccgctttcaaccgctccatcgagcagatcgagcgggtcgccgtgcgttcgcgggcacccatgctgctggtggggccgaccggtgccggcaaatcgttcctcgcccggcgcatctatgaactcaagcgcagccggcaccagctcgacgggcgtttcgtcgaggtcaactgcgccaccttgcgcggcgacggcgcgatgtcggcactgttcggtcacgtcaagggtgccttcaccggcgcgcagaatgcgcgcgaaggcctgctgcgcgcagccgacggtggcatgctgttcctcgacgagatcggcgagctgggcgccgacgaacaggcgatgctgctcaaggctatcgaagagaagcgcttcttcccgctgggttcggaccgtgaggtggagagcgacttccagcttatcgccgggacccaccgcgacttgcgcggacgagtggccgaaggcctgttccgcgaggacctgttcgcccgcatcaacctgtggaccttcgagctgccgggcctggctggacgccgcgaggacatcgagccgaacatcgacttcgaactggagcggcacgcccgcgagcaagggcggcaggtgcgtttcaacctggaggccaagcgtcgctacctggccttcgccggttccagcgaagcgcgctgggccggcaacttccgcgagctgtcggcttccatcacacggatggcgaccctggccgacagcgggcggatcgacgaggcgctggtcgaggaggagatcctccgcctgcgccaggcctgggggctcgatgcgggccgggagccactggccgatctgctggggcagcgggtggaggccctggatctgttcgaccgcctgcaactgcaggcggtgctggaggtgtgccgcggggctaagaccctttccgaggcgggacgccggctgttcgccgtttcgcgccaggacaagcgcaaccccaacgacgccgaccggctgcgcaagtacctggcgcgtttcggcctggactgggcgcagatacgcgcctga

SEQ ID NO: 339412 - DNA, 1011 bp, Pseudomonas aeruginosa
  misc_feature (952)..(961): n is a, c, g, or t
atgtctcgcgccttacttgctatcgaccaccagcaagttgcgctttcaggaggatgcgtcattcgggaaaaccgctctttcgtcccgtacgtttcccgccgcacctatcctgtccggtggcctctctcgccgccgccctcgctgaccgattccgccccgctgccaggagcacgccatgagccacgatccgccgagcaaggaccgccgccatttcctcactaccagttcggtgctgggcgccgccggagtcctgtggtccgccctgcccttcgccaacgccgccagcctttctcccgcaagcaacccaggaggttccatgaccgccgacctgatcctgcacaacggccgtttccacaccgtggaccgcgacaaccccaccgccaccgccgtggcgatcaaggacggcaagttccttgccgtcggcaacgacgccgaggcgatgctccatcgcggcagcgccacccaggtgatcgacctgcagaagcgcaccgtgatccccggtctcaacgactcgcacctgcacctgatccgcggtggcctcaactacaacctggagctgcgctgggaaggcgtgccctccctggccgacgccttgcgcatgctcaagaaccaggccgaacgcacgcccagcccccagtgggtgcgggtggtcggcggctggaacgagttccagttcgccgagaagcgcatgccgaccctggaggaattgaacaaggccgcgccggacaccccggtgttcgtcctccacctgtacgatcgcgccctgctcaaccgcgccgccctgcgcgtggtcggctacaccaaggacacgcccaacccgcccggcggcgagatcgtccgcgacagcagcggcgaacccaccggcatgctgatcgcccggcccaacgcgatgattctctacgccaccctggccaagggaccgaagctgccgctggaataccaggtcaactcnnnnnnnnnnggtcaactccacccgccagttcatgcgcgaactcaaccgcctcggcctga

SEQ ID NO: 339413 - DNA, 1590 bp, Pseudomonas aeruginosa
atgaccgcacccgccgcctcaccctggagtcccctgcgccaagccaccttccgctggctatggctggccagcatcgcctcgaacatcggcacctggatgcacgaggtgggcgccggctggctgatgacctcgctctccgccagcccgctgaacgtggccctggtgcaggtcgccggatcgctgccgatgttcttcctggccctgccggccggcgccctcgccgatatcgtcgacaagcgccgctacctgctcggcgtgcaattgtggatggccttggtggccaccctactggccagcctcaccctgctccagttgaccagcgtctggctgctgctcggcctgaccctgtgcatgggcatcggcaccgcgctgatgatgccggcctggagcgccaccactccggaactggtgggcaaggacgaactgccggcggcggtggcgctgtccagtgtcggggtcaacctggcgcgggcggtcggaccggccatcgccggggtgctggtgagcctggtcggcccctggctgaccttcgccctcaacgccctctccttcttcgcggtgatcgccgtgctgctggcctggaaacgcgaggccgtgccctcggtgctgccggcggaacgcctgttcggcgccctgcgcgccggctggcgctacagccgcagctcgaggccactgcaatcggtgctggtgcgcgcggtggcgttcttcctcggcgccagcgccggcatgtcgctgctgccgctgatcgtgcgcggcgaactgcatggcaacgccatggacttcggcctgctgctgggcagcgtcggcgtcggcgcggtgctcggcgccgcgttcctgccgcgcctgcgcgaacgtctcggcagcgaccgcctggtgctgctctccagcgtgctctacgcactggtgctggtggccctggcgctgctgcgcaacctctatttgctggtgccggtgatgctgctcagcggcgcggcatggatcgccgtgctctccagcctgcaggtcgccgcgcagacctccgtgccggcctgggtccgcgcccgcgcgctggcggtctacatcctggtgttcttcggcagcatggccgccggcggcgccctgtggggtctggtcgccagccacctgtcgatcaccttcgccctgctctgcgccagcgccgcgctgctgctcggcctgttcgcgtcgctgcgctgccggctgccggtcaccgaggccgaggacctcgcgccgtcgctgcactggccggcaccactggtcgacgaagaggtggaccaggaacgcggcccggtgatggtcaccctcgagtacgacatcgacccacaggacgccgcggcattccaggcggcgatggtcgaggtgcgcgccatgcgtcggcgcaacggcgcggtgtcctgggggctggtccaggacagcggcaaccgtcgcctgtggctggagttcttcatcgacgaatcctggctggagcacctgcgccaccaccagcgggtgacccgcggcgagttgcgggtcgaggccgccgcccggcgcttccagagcgccggcgtggaggtgcgcatccgccattacctgcacggcgcggccaggccttga

SEQ ID NO: 339414 - DNA, 1092 bp, Pseudomonas aeruginosa
atgaatctccacgaatatcagggtaagcagctgttcgctgaatacggcctgcctgtatccaagggctttgccgtagacacccccgaagaggccgcagaagcctgcgacaagatcggcggcagcgagtgggtcgtcaaagctcaggtgcacgccggcggccgcggtaaagcgggcggtgtgaagctggtgaagagcaaagaggccagcaagatcctggtggagtcctgcaccgacatcgacaaggagctgtacctcggcgccgtcgtcgatcgttccagccgccgcatcgtgttcatggcttccaccgaaggtggcgtggacatcgagaaggtcgcccacgacactcccgagaagatcctcaaggctaccatcgacccgctggtcggcgcgcagccgtaccagggccgcgagctggccttccagctgggcctgaagggcgaccagatcaagcagttcacccatatcttcgtcggcctggcgaagctgttccaggactacgacctggccttgctggaagtgaacccgctggtgatcaagaaagacggcaacctgcactgcctggatgccaagatcaacatcgacagcaacgccctgtaccgtcagccgaagctgcgcgccatgcacgacccgtcccaggacgacgcccgtgaagcccatgcgcagaagtgggagctgaactacgtcgcgctggaaggcaacatcggctgcatggtcaacggcgccggcctggccatgggtaccatggacatcgtcaacctgcacggcggcaagccggccaacttcctcgacgttggcggcggtgcgaccaaggagcgcgtgaccgaagcgttcaagatcatcctgtccgacagcaacgtgaaggctgtcctggtgaacatcttcggcggcatcgtgcgttgcgacatgatcgccgaaggcatcatcggcgccgtcaaagaagtcggcgtgaaggttccggttgtcgtccgcctggaaggcaacaacgctgaactgggtgccaaggtcctggccgaaagcggcctgaacatcatcgcggcaaccagcctgaccgacgctgcccagcaagtcgtcaaggccgcggagggtaagtaa

SEQ ID NO: 339415 - DNA, 894 bp, Pseudomonas aeruginosa
gtgcacggcgacaaggaagccgtggacggcctgctccaggcgccggaagtgaaagccatcagcttcgtcggctcgacccccatcgccgaatacatctatgccgagggcaccaagcgcggcaagcgcgtgcaggccctgggcggcgcgaagaaccatgcggtgctgatgcccgacgccgacctcgacaacgccgtcagcgcgttgatgggtgccgcctacggctcctgcggcgagcgctgcatggcgatctcggtggcggtatgcgtcggcgaccaggtggccgacgcgctgatcgccaagctggttccgcagatcaaggcgctgaagatcggcgccggcacttcctgcggcctcgacatgggcccgctggtcactgccgccgcgcaggccaaggtcaccggctacatcgacagcggcgtggcccagggcgcggagctggtggtggacggccgtggctaccaggtcgccggccacgagaacggcttcttcctcggcggcagcctgttcgaccgggtgaccccggaaatgaccatctacaaggaagagatcttcggcccggtgctgtgcgtggttcgcgtcaacagcctggaagaggccatgcagttgatcaacgaccacgaatacggcaacggcacctgcatcttcacccgcgacggcgaggccgcacgcctgttctgcgacgagatcgaggtcggcatggtcggcgtcaacgtcccgctgccggtgccggtggcctaccacagcttcggcggctggaagcgctcgctgttcggcgacctccacgcctacggcccggacggcgtgcgcttctacacccggcgcaaggccatcacccagcgctggccgcagcgggccagccacgaggcctcgcaattcgccttccccagcctctga

SEQ ID NO: 339416 - DNA, 849 bp, Pseudomonas aeruginosa
atgtcctttcgctgttccccgtgccgcctggccggcatcctgctggcggcgctgttcgttccggggctggccgcggcggccggctcctgcgagcgcctggtggccaccggcaacccggagtacccaccctacctgtggcgcgacccgcaggatccgaagcgcctgatcggagccaatgccgacctgttgcagcgcctgggcaaggagctcggcgtgcgcatcgacgtgctctacagcggctcctgggagaaggcccaggaagaggtgaccagcggtcgcgccgacctgctcgccggggcctacctgaccctggcacggctcggcagcatggactatatgcatccgccgttcctgatgaccagcggggtggtctgggtgaacaaggacgccgcgttcccgttcatcggccgcgacgacctgatcgggcacaagggcagcgtgctggccggcagcagcctgggcgaggagttcgaccgcttcgccaaggccagtctcgacctgaagccggtgccgagcctgacccagggcttgcaggacctgatgctcaagcgcagcgagttcctcctctaccaggcgttgcccgggcaggcccaggtcgaggcgctgggcatggccgatgacctggaggcgctggaaccggtgctgagcagcgaggggctgtacctgacgctgtcgcacaactccgcctgcaacgatccgtggctgcgcggacaactggcgaaaaagatgacagaattgtcggctgccggcgttcccgtaacgctcttgcaggacaatctcgaacgctggaaagcccagcaattgccggcttccggcgccagttcgactacgcaggaaagtgacttgtga

SEQ ID NO: 339417 - DNA, 1680 bp, Pseudomonas aeruginosa
gtgagtgacgcccagcaggttccggccatcgtcatcctcggccagggcgcgctggataccgcgcggcgggtccaggcgcgctatcccggggcgctggtccacgggctcgccgggcgggtcgaggccgaccgttcctatacggacttcggcgacaccctgcgcgaactgtattgcgccgaccgcccgatcgtcgccctgtgcgccgccggcatcgtcattcgcagcctggcgccgttgttgcaacgcaagggagcggagccgccggtgctggccctggccgaggacggtagcgcggtggtgccgctgctcggcgggctggccggggtcaaccggctggcgcgggaaatcggcgaggtgctggccgtggcgccggcgatcaccaccagcggcgagctgcgcttcggcacctgcgtgctcaacccgcccgccggttatgtcctggccgacctggagcagggcaagcgcttcgttgccgatttgctcggtggccagccggtgcgcgtcgagggtgccgccggctggctcgacgcggcccgtttgccgcgcgacccggcggcggcgctggcgattcacgtgacgccctcggcgcgtgcgccgcgggccgaggaactgctgatccatccgcgctgcgtgctggcggcgctcgaacctgccgacgcggcggcggacgcggtgcgccaggcgctggtcgatgccggcctggccgcggcggcgctcggcggcttgctggccgacagcgcgcggatggccgatccgcgcctgcaggccgccgccgatgcgctcggcgtaccgctgcgcttcctgccgcagaccgatcccgctgcgcgcctgcgccaggccttgcccgccgccgagcaggtcggcgaccggctggcggtggccgccgcgcccttggcgatggaccgcatcggccagcgtcgcggccgactcacagtgatcggcctggggcccggctgcgccgagctgatggtgcctgcggcgcggcgggcactggacgaggccgaggacatcctcggctaccagacctacgtcgacatggccggacccttccgcgccggacaggtgctgcatggcagcgacaaccgcgaggaattgcagcgcgcccggcatgccttcgaactggcggcgacgggcagggcggtggtgctggtatcgtccggcgaccccggcgtgttcgccatggccgccgcggtgctggaagccctgcatggcgctggcgagccggcctgggacgcggtcgagctgcggatcttccctggcgtctcggcggccctggccaccgcggccagggcgggggcgcctctgggccacgatttctgcctgctgtcgctgtccgacaacctcaagccctgggaggtgatcgagcggcgcctggacctggccggcgccgccgacctggcgatggctttctacaatccgatctcgcgggcgcggccctggcaactgggacgggcgctggagatcgtcgcccgccatcgttcgccgcagaccctggtggtgctcggtcgcgacatcgggcggcccggtgagcgcctgctgcgcaccaccctgggcgagctgcgtgcggagcaggtggacatgcgcaccctggtgatcatcggctcgtccactacccgcagcttcccgcgcgccgacggcgaagcctgggtctacacgccgcgctggtacccatcggaatag

SEQ ID NO: 339418 - DNA, 1011 bp, Pseudomonas aeruginosa
atgctcaagcttcacgatttttgcaacagagccccgatcttcgatatccagcggataggtttcgcaacggtcgctgaacgccgccggttcgaggattcccagcggcaggtggcgggacaccagggcgacccgctcgccgctggcggcgcgcagcaggtagccgtccggcaagccgccgttccagacctccaccagttcgcgctggaagctcaggttgagcaaggtggcgcagcagaacacgccgaccggcaggatgcgcttcagcttggcgttcatctcgcggaggatgtcggccatcggatagcccttggcggtcatcccgtagaacacctcggccagcggcatcgcgccgatcgccgccggcaggccgtggccggtgaagtcgccgagcagcacgtgcatgccgccggacggcttgtaggcggccagcagcaggtcgccgttgaacagcgcgaggggcgattgcaggtagcgcacgttgctggcgttcaggcagccggaatgggccaccttgtcgaacaccgccttggccacccgctgttcgttgagcaggtgctcgttgtgccggacgatcaggtcgcgctgctccagcaccgttcgttgcagcaggtgcaggcgtcccatggcgttgatcttggcttcgaggatcacccggttgtacggcttggagaggaagtcgtcgccgcccgcctccaggctctgcaccagcgcctcggtttcgctgagggaggtgaggaagatgatcggcaccaactcctcgccggcctgctgcttgatccgccgggcagcctcgaagccatccatcaccggcatcatcacgtccatcaggaccagttgcggccgctcggtctcgaacagcgccaccgcctccaggccgttgccggcggtcagcacgcgatgcccctggcggctgacgatggtcgacagcagcaggcggtcggccgcgttgtcctcggcgatgagaatcgtcaggctctcgatccgcgccgccgggggattcatctcagctga

SEQ ID NO: 339419 - DNA, 360 bp, Pseudomonas aeruginosa
  misc_feature (4)..(13): n is a, c, g, or t
atgnnnnnnnnnntcgatgatacgcaggtcgatcagaaggatgacattgtcaggtttggcgaccgccaagtccacccaaagcgcctgaagattactcttcgtgaggttgtagctttcgatgtcgatcatctggaggcggatgccgacatcagtgccaggtcgcgacttcacgaaatcaagcgccgcaacgttatgatccgggtgccgatcaaaggccagaacgggcataactcgataattcgacagcattgtcagcacagcccggtactgcgggacaccacccagatcaacactgtcatcgacgtcgaaattgtcgacgaaaaacttgtaatctatgtccttcccacgagcattgcctag

SEQ ID NO: 339420 - DNA, 429 bp, Pseudomonas aeruginosa
atgggtcttggcgaggcggtcggtgacaagaagatcatcgagaacgccgtagccgatctggaaaagatcactggtcagaagccggtcgtgacttacgctcgtaagtccatcgcaggcttcaagatccgtgaaggctggccgatcggcgtcaaggtcaccctgcgtagcgaccggatgtacgagttcctggatcgtctgctgtccatctccctgccgcgcgtgcgtgacttccgcggcctgaatgccaagtccttcgatggtcgcggcaactacagcatgggcgtgaaagagcagatcatcttcccggaaatcgattacgacaagatcgatgcgctgcgtggcctggacatcaccctgaccaccaccgctcgtacggatgacgaaggtcgcgccctgctgcgtgctttcaaattcccgttccgtaactga

SEQ ID NO: 339421 - DNA, 633 bp, Pseudomonas aeruginosa
atgttcgagccgaacgcgcccatctgcgccatcacctggcgcttgctgccctcgccgacggcgagcatgaccaccaccgaggcgacgccgatgatgatcccgagcagggtcagcgcggtgcggaaccgattgatccacatcacccgccaggcggcgcgcaccgcctccagcagttcggcgcgccaggcccccgagggttcgctgctgccctcggcgaggcgctggctgagatcgtcggcctgcaggtggcgctcgacgccggcgctcgggtgcgccgggcgctcgtcgttggcgctgtcgctgacgatctcgccgtcacgcacctcgatgatgcgcttggcgcgggcggcgacgtcgcggtcgtgggtgatcaggatcaccacgtggccctggctggccagctcgtcgagcagcgccatgacttccgcgccgctgtggctgtcgagggcgccggtgggttcgtcggcgaggatgatatggccgccgttcatcagcgcgcgggcgatcgatacccgctgctgctggccgccggacaactggtgcggacggttggcagtgcgctctgccaggcccaggcgctcgagcagggcccgcgcgcgggtgtgccgctcgctcgccggggtgccggcgtag

SEQ ID NO: 339422 - DNA, 717 bp, Pseudomonas aeruginosa
ttgcaacagagccagttgcagaaagtccacggtttccagctctaccgccagcagaaccagggcgtcagcgcagcgctgaacttcggcctgcgacacgcccgcggcgactacgtagccacgccggacctggacgacatcatgctgccgcactcgttgagcgtgcgcgccgcgtacctcgaccagcacccggaagtcggctgcgtcggcgccctggtgatctacatcgacagcgaaggccaggaaaccaagcggcagaacggcaatcgcatccgccagctggacttcgactacctgctcggcaacgcctacgtctgcggcgccccggtgtccctgtaccgcatggaggccctgcgcgcagccggcttctacgatcccgagatcaaggtgcaggacttccagatgaccctgcgcatcgccagccagggctaccagatccacaagctgccggtgctggtcacccgctaccggcgccaccccgacaacctgtcgcggcgctacaaggtgctgctcgatgccgacctgcgcaccatcgccccctaccagtcgcatcctgcctacgagcgcggccgcacggagttggtcaacaaggccctgaaatacgccgtggtcgcggacaagcggcatgcctggcaactgctccgctcgctgccgctgcggcagtggaaccgcaccaccttccgccggttgaagcgcttccttctccatcacgagagctga

SEQ ID NO: 339423 - DNA, 735 bp, Pseudomonas aeruginosa
atgacgcagaccgcctccctttttctccaggactcctaccgggaagagtgtttggcgagaatcaccgatgtcgttgaagatggcctgctgctcgaccagaccgttttctatccccaggggggtggccaggctggagacagtggttggctgacgctggctgatggcacgcggctccggatcgccgatacacgcaaggggacagaagcaggtgctggcagggatgccatcctgcatatcccagctgaaggccaggcaaccgttctccgagcaatgaagcctggcgaggtggttcttgcgcagatcgattgggtgcgtcgttaccggcacatgcgactgcataccgcagcgcacatgctctgtgctgtcctgccctatccggtcaatgggtgcagcatcactgatgagcatgcgcgcttggacttcgtgacgagtgaaccgctgtcccgcgaggccattgatagcgccttggcggcaatggtcgaggcagcacatccggtttcgatcgacaccatgagcgacgatgcactgcgggctaggccggatctggtgcgcaccatgagtgtccaacctccgatgggcgccgggcaggttcggttggtgagtattaaagacaccgacctgcagccttgcggtggaacccatgtggcgaataccgaagaagttggggtggtgcgcgtttccaagatggagaagaaatcagcgcgcacccgtagggtggtactggtactgggttga

SEQ ID NO: 339424 - DNA, 240 bp, Pseudomonas aeruginosa
atgagccgaccaacagtcgttacggtgacggaaacccccaggaatccgggaagctacgaggtcaacgtagagcgggatggcaaaatggtcgttggccgggcccgcgcgggaagcgatcccggcgcagctgcggcgaaggccatgcagatggccatggagtgggggagcccgaactacgtcattctcggcagcaacaaggttcttgcgttcataccggagcaactgcgggtgaaaatgtga

SEQ ID NO: 339425 - DNA, 1722 bp, Pseudomonas aeruginosa
atgccactcgcccgctgggtacccggactcgatagcctgctccactaccgccgcgcctggttccgtccggatgtccaggccgggctgtcggtagcggcgatccagatccccaccgccatcgcctacgcccagatcgccggcttcccgccccaggtaggcctctatgcgtgcatcctgccgatgctgatctacgccctgatcggcagctcgcggcagttgatggtaggccccgacgcggcgaccgcggcgatggtcgccgccgccatcaccccgctggcggcgggcgatccgcagcgcctggtggacctgtcgatgatcgtcgcgatcatggtcgggctgttctccatcgtcgccggcctggcccgcgccgggttcatcgccagcttcctctcgcgaccgatcctggtcggctacctcaacggcatcggcctgagcctgctggtcgggcaactgggcaagctgttcggctacgaggcggcgaccagcggcttcgtcgccggcatcctcgcgctgctggagaacctgctgcacatccattggccgacgctgatcctcggcagcctctcgctcttgctgatggtgctgctgccgcggcgcttcccgcagttgcccggggcgctctgcggcgtcctcctggccagcctcgccgcggcgctgctgggcctggatcgctacggcgtggaactgcttggcgaggtaccggccgggctgccgcaactgagctggccgcagaccagcctggaggaactgaaaagcctgctgcgcgacgccaccggcatcacggtggtcagcttctgcagcgccatgctcaccgcgcgcagcttcgccgcccgtcacggctacagcatcaacgccaaccacgaattcgtcgccctcggcctggccaacatcggcgccggggtctcccagggcttcgccatcagcggcgccgactcacgcaccgcggtgaacgacatggtcggcggcaagacccaactggtcggcgtggtcgccgcgctggtgatcgccgccaccctgttgctgctgaacaagcccctgggctgggtgccgatgccggcgctcggtgcggtcctgttgctggccggctggggcctgatcgacgtgcaggcgctgaagggcttctggaagctcagccgcttcgagttcagcctctgcctgctgaccaccgtcggcgtgctcagcgtcggcgtgctgccgggaatcttcgtcgccgtcagcatcgccgtactgcgcctgctctactacacctatcgcccgagcgacgcggtgctcggctggatgcacggcatcgacggccaggtcgagctggccaagtacccgcaggccaccactcttcccggcctggtgatctaccgcttcgacgcccccctgctgttcttcaacgccgactacttcaagcagcgggtgcttgccgtggtggacggcagcgagcggccgaatgcggtgctgctcaacgccgaagccatgaccaacctcgacatcagcggcctggccaccctccacgaggtgcaacagatcctcaaggcccagggcgtgcacctgtcgctggcgcgggtgaccgggcagacgctggacctgctgcaacgctcgagcatgctcggcgagatcaagccgccgctggtgttcagctcggtgcgctccggggtcagtgcctatcgctactggctgcgccagcaggaaagactcgccgcccaggccgcggctacaagcggaaatgcctga

SEQ ID NO: 339426 - DNA, 687 bp, Pseudomonas aeruginosa
gtgaagaaggaactcaacctccccgagctgaaggtccgctataacctggtcacctcgcagacccgcatcccgctggtgcagaacggcaccgtggacatcgagtgcggatccaccaccaacaacgaagagcgccagaagcaggtcgacttctccgtcggcatcttcgaggtcggcacccgcctgctgtcgaagaagaccgccaacatcaaggacttcgacgacctcaagggcaagaacgtggtgaccaccgccggcaccacctccgagcgcctgctcaaggccatgaacgcggacaagaagatgggcatgaacatcatctccgccaaggaccacggcgagtccttcatgatgctcgaatccggccgcgcggtggccttcatgatggacgacgcgctgctctacggcgaaatggccaaggccaagaagccggacgactgggtcgtcggcggcaccccgcagtccttcgaaatctacggctgcatggtgcgcaagggcgacgcggcgttcaagaaagtggtcgacaaggccatcaccgatacctacgcctccggcgaggtcaacaagatctacgacaagtggttcacccagccgatcccaccgaagggcctgaacctcaacttccccatgagcgaagagctgaagaagctgatcgccagcccgaccgacaaggccgccgagcagatgtaa

SEQ ID NO: 339427 - DNA, 747 bp, Pseudomonas aeruginosa
atgaattacaactgggactggggcgtgttcttcaagtccaccgggatcggcagcgaaacctacctcgactggtacatcgccggtctgggctggaccatcgccatcgccctggtcggctggatcatcgccctggcgctgggctcgctgctcggcgtcatgcgcaccgtgccgaaccgcctggtatcggggatcgccaccgcctacgtggaaatcttccgcaacgtgccgctgctggtgcagctgttcatctggtacttcctggtacccgacctgctgcccgagggcctgcagacctggttcaagcaggacctcaacccgactacctcggcctacctcagcgtggtcgtctgcctcggcctgttcaccgccgcgcgggtctgcgagcaggtgcgcaccggcatccaggcgctgccctacgggcagacctcggcggcccgcgcgatgggcttccgcctgccgcagatctaccgccacgtgctgctgccgcaggccttccggatcatcatcccgccgctgacctcggagttcctcaacatcttcaagaactcctcggtggcgtcgctgatcggcctgatggagctgctggcgcagaccaagcagactgccgagttctccgccaacctgttcgaggccttcaccctggccacgctgatctacttcacgctgaacatgagcctgatgctgatcatgcgcctggtggagagaaaggtcgccgtaccgggcctgatctccgtaggaggtaaatga

SEQ ID NO: 339428 - DNA, 735 bp, Pseudomonas aeruginosa; identical to SEQ ID NO: 324907

SEQ ID NO: 339429 - DNA, 300 bp, Pseudomonas aeruginosa
atgccgaccgtctcgatctcgctcacaccatggggcagccaggcggaggtggcgttcatggtctcggcctgggcggcgccgaccaggtggatcaccaactgcccggtggcctggacgttgcgcagggtgtccttgaggctgccgtcgtcgcgcaggctgacgttaaccatcagggtcggcggctcgtcgctgatcacctggaagaagctgaacggggccaggttgctggcgccctcggcggacagggtcgagacccaggcaatcggtcgcggggtgacggtggaagccaaccagcgatag

SEQ ID NO: 339430 - DNA, 1281 bp, Pseudomonas aeruginosa
atgttgaagaaaaggatttgcctgctggcactgggcatcgcgactgcaagccaggcgatggccaatgaccaagaagcagcaaaggggtttgtcgaggacagccacctcgatctgttcttccgcaatgcatatatcaaacgcgacaagaagtacggtacagaggaccaagcagagtggggccaggctgcaaccgcgaccttcacttccggcttcacccaaggaaccatcgggataggtgtggacgtgttcggtatgtacgctgttcgcttggacggcgggaagggtcgtagcggcgccgccggtatcgacttcttcaagcagggcgacagcggctccgcggcggacgatctgtccaagggcggcgcagcggtgaagttccgcatctccaacaccgtgctcaagtacggcgaccagatgcccagcctgccggtgctcagctacgacaactcgcgcctgctcccggaaagctacagcggcaccctgatcacctccaaggagatcgagggcctggagctgaacgccggtcgcttcaccgcggaatcccgcaagagcgccgaagggcgcgacagcggcggcctgaagagcatcaacgtgttcggcggcaagtacgccttcaccgatcacttcaacgcctcgctgtacgcttccgacgtcgaggacgtactgaagaagcagtacatcaacctgaactacaccatcccgctgcaggccgaccagtcgctgaacttcgacttcaacggctatcgcaccaagctggacagcgacttcgccgaccagaacttcaacggtaaccgcgacaacaagatctggagcctggcggcgtcctacaccatcgacgcccacaccttcatgatcgcccaccagcgcaacaccggcgacaccggctacaactacggctggtaccagaacgccggcggcatcggcgacggcggcaccaccatctggctggccaactcctactggtcggacttcaacgccgaggacgagcgttcctggcaggtcagctacgccctggacttcgccaagtacggcgtgcccggcctgacctaccgcgtagcctacgtgcgcggcgacaacatcaagaccgccgagaccagcaacggcaaggagcgcgagatcttcaaccaggtccagtacgtggtgcagagcggtccggccaaggacctcaccctgcgcctgcgtagctcgtttgcccgcgtttctgctgatgcccgcgatagctacttcagtggcggcaacgaaatccgtgccttcgtcgagtacccgttcagcgtgttctga

SEQ ID NO: 339431 - DNA, 141 bp, Pseudomonas aeruginosa
atggtgccggtttccttgatcttcttcagcgtgccggtgagctcgtcagcgacgaccggagcggacaacagagcggccacgatggcggtgctcagcagactgggagcgatacgcatgaatttcttcctcgacttgttttga

SEQ ID NO: 339432 - DNA, 1233 bp, Pseudomonas aeruginosa
atgcacgtccttgagcgtctgctccgacgccagcgtctcgcccacagctttcttcgccagatggttgaggtccgattcgaggacgtcctgcggcgtggccaccatggtgagacacatcaaggtgtcctcgggcatctggtcgaacagcgtgttgatcgcgtcccccttgcgggtctcgccggtcaggtgcccggtgccgggcggcatgcgcagccggtcggtgatcagcacgcggtgcggcatgccgtcgaagtaccaggccccttgcgccacgtccgagcgcggctgcccaaagaacagccgctggctgaaatcccgcccgctcgccagctcgatctcgccggcctcgctttcctcggtactgtccggatagcgcgccaacgcgtagaagcgctcccggtcctccaccccaggcccgagcagcgtggggcgcgggttgaaccaccgcagcagccagtcgtggacgtcggccgcgaccatgcgccgggcctggatgccggcgttcgccaggccgccgcacaggcggtcgcagacgatgcccagcatctgctcgggtgtctggccgcggcggtttgcctgtccctgtccgctcgcgcggcggtacaccaccatgcgcacgcgccgcgtctggccgcgccagcgcagccgcgtgaccaccgtgtcctcgaacaggccgccgggcttggccacagcgcgcaggtggtggccgaagaagcgcaggtagaactcggtgaacgccgagccgcgcgcacgtggctgcacgtaatcgcgcaaggtctgcatgtactggtcgaagctcggttcgtcctgggcatagagctggagcacccacgggttctcgtccagttcatcgaagctgtcctgaagcgcgttttccagggcgtcgcgggcatgcgcgagccagccgggttcccggccttcggtgcccagcggcaccagctcgtagaaggcggccaccgattggccgtcctccaggagcatcgatttcgactcgggcaagaactccacccagggcagcagttccacgaaggacggtgcgacgtcgtacagcgcctgctcgtcggccacggtcgccggcttgcggccctggaccgcggcgccgggttcggggatgccggcttgctgcaaggcctcgacgtggcgctgccagccgtccggctgctcgtcggcggcggtgtcttcggcgctgacggcagccagcttcggccatggaagtttccaccgcatcagtag

SEQ ID NO: 339433 - DNA, 1116 bp, Pseudomonas aeruginosa
atgctcaagcttcacgatttttgcaacagagccgttgatcggatcgtggcacttgcgttggatcaagtcgcgcagtgcggtcagcttggcgtcgcgggcggcatcgatttgtttggcagccgccagcagggttgccaggcggttgcggtcttccagcagatcctgcttccagcggatcagatccacgtcatccagcagcaccttgactttgcgcccgaccaacaaggactcgaacgcggggtcgtcgatatcgacgtcggcaatgtcgatttcctccagtgcatcggcatgcgactcaatgcggcccagcgtggcctccacgtccttgagctgcctttgcagtgtcagggtgaaggaagaaacggcgctttccatgcgtttgagcacgttcacacgcaggagatgaatcaggctttcttcgcggtccgcttggcggaagaagctttctccgccgcgaatctgcgtgctgtacttggcgtcgtaggcttcctgtttgtggggcaggacatagcgcagcggcgcataactggccaaggtgagtcggcggatttcctgattgatgtcgcggatggcgcggaactcgcccgcaaggtcaacgtcggccttgatgttgatcggtggcaggcgatccgggaagcggcctgtctcgctggtgccgtagtatttctccacgtgccgccgagagcgggcgatggtgagatggtccagcaaggtgaagtagtcgaaacccagcatctccaccagccgggtcggtgttttttcagcttcgtccagcgccagccagcggttgaactgcgcctgcgccttgcgggtcgtggcctcgatgctggcgatgccgtgctccatcagggcggtgtcatcgccttcggtggcaaaggcaatctggttgcgcaggtcggccaggcggttgttgaccggtgtggccgagagcatcagcacgcgggtcttgacgccttcgcggatgatccgccgcatcaggcggtcgtagcgcgactccttgcctttgtgggtggccttgttgcggaagttgtgcgattcgtcgatcaccaccaggtcgtagttgccccaattcacatgcgacagatcgatatcgccggatgtgccgccatcgcgtga

SEQ ID NO: 339434 - DNA, 1467 bp, Pseudomonas aeruginosa
gtgctgggcgaacatcagttgggtgaaccagttccgtcgatcctggctcgggttgtagcagcacggcagccagcgcagataactgttcaaaggcgcgacttcatcgtcctcgcgcacgggctgcaaaccggcgttaagcatcacgttcgccagatcaaggccgcgccggtccagttcggcttcatcccggccgcgcaaatagaacgccagtgttccccggtacagcttgtgcgcgctgccgatcagcgagcgggcctcctgcacatccttgagcgtctgctccgatgccagtgtttcgccgactgccttcttcgccaggtggttcaggtgcgattcgaggatgtcctggggtgtcgccaccatggtcagacacatcgtcgtgtcctcgggcatctgatcgaacagcgtattgatcgcatcgcctttgcgggtttcgccagtcaaatgccccgtgccgggcggcatgcgcagccggtcagtgaccagcacacgatgcggcatgccgtcgaagtgccaggtgccgtgatccgcgtccgagcgtggctggctgaagaaaagccgctggctgaaatcccgcccgctcgccagctcgatctcgccgtcttctgtctcgtcggggtagcgtgccagcgcatagaagcgttcgcggtcctcgatcccagggccgagcagcgtgggacgcgggttgaaccaccgcagcagccagtcatggacgtcggccgcggccatgcgccgggcctggatgccggcgttcgccagcccgccacacaagcgatcgcagacgatgttcagcatctgctcgggcgtctggccgcggcggttcgcctgcccggtggcccggcgatagacgaccatgcgcacgcgccgcgtctggccgcgccagcgcagccgtgtgaccaccgtgtcctcgaacagcccgccgggcttcgctaccgcgcgcaggtggtgtccgaagaagcgaaggtagaactcggtgaaagccgtattgcgggcgcgcggctgcacgtagtcgcgcagggtctgcatgtactggtcgaagctgggttcgtcctgggcgtagagctggagtacccaggggttctcgtccagttcatcgaacgagtcctggagcgcgttctccaaggcgtcgcgggcatgcgcgagccagccgggttcccggccctcggtgcccagcggcaccagctcgtagaacgccgcgaccgattgcccgtcttccagcagcatcgacttcgactggggcaggaactccacccagggcaggaattccgcgaacgacggcgcaacgtcgtacagcgcctgctcgtcggccacggtcgccggcctgtggccatggaccgccgtgccgggttcggggatgccggcctgacgcagggcctcgacgtggcgctgccagccgtccggctgctcgtcatcgtctgcgtcggatgcagtcagcttcggccaggggagtttccagcgcatcagtag

SEQ ID NO: 339435 - DNA, 441 bp, Pseudomonas aeruginosa; identical to SEQ ID NO: 334381

SEQ ID NO: 339436 - DNA, 690 bp, Pseudomonas aeruginosa; identical to SEQ ID NO: 334378

SEQ ID NO: 339437 - DNA, 615 bp, Pseudomonas aeruginosa
atgactggcgaaggcctcgacccggcgccgccagaggtcgatgtccggctgcgggtcgaggcgcacgttgggatccaggctgaccaggcgccggccgctctcgcgccggaccagcgccagcagggtgtcggccaccggtgtcaccaccagggtataggagccgacgtgcagcccgcgtatccgcccatccagcgtcggcaggtgttccaggcgcacctggcggtcggcgcagccctcgccgcggaactggtattgcgccgagccgctggcgtcgaggccgaccatcgccagggtggtcggggcgtcgctgggcaccaggaagccgcagtccacgccttcttcttcgagcacccggcgcagccgcgcgcccaggtagtcgctggacagcccgccaaacagcgccgcctccacgcccagccggcgcaggccgacggcgacgttgaacggcgagccgccggcgatcgcggtgaagcccagctcgttgctgcgcgcagcgctttccaggctgaagacatcgaaaagggcctcgccacacaccaggtacatgcagatctccaaaacgccagaagaggaaggaaagccggccattatcgcggaggcaggtgctccaggtaa

SEQ ID NO: 339438 - DNA, 3693 bp, Pseudomonas aeruginosa; identical to SEQ ID NO: 332085

SEQ ID NO: 339439 - DNA, 2766 bp, Pseudomonas aeruginosa
atgggcgaactggccaaagaaattctcccggtcaatatcgaagacgagctgaaacagtcctatctcgactacgcgatgagcgtgatcgtcgggcgggccctgccggatgcacgtgacggcctgaagccggtgcaccgccgtgtgctttatgccatgagcgagctgggcaacgactggaacaagccctacaagaaatccgcccgtgtggtcggcgacgtgatcggtaagtaccacccgcacggcgacatcgcggtctacgacaccatcgtgcgcatggcgcagccgttctcgctgcgctacatgctggtcgacggccagggcaacttcggttcggtggacggcgacaacgccgcggccatgcgatacaccgaagtgcgcatggccaagctggcccacgaactgctggccgacctggaaaaggaaaccgtcgattgggtgcccaactacgacggcaccgagcagatcccggcggtcatgccgaccaagatccccaacctgctggtcaacggttccagcggtatcgccgtgggcatggcgaccaacatcccgccgcacaacctcggcgaagtgatcgacggctgcctggcgctgatggacaaccccgacctgaccgtcgacgagctgatgcagtacatccccggtccggacttccctaccgccggcatcatcaacggccgcgccgggatcatcgaggcctaccgcaccggtcgcgggcgcatctacatccgtgcccgcgccgtcgtcgaggagatggagaagggcggcggtcgcgagcagatcatcatcaccgagctgccgtaccagttgaacaaggcgcggttgatcgaaaagatcgccgagctggtgaaagagaagaagatcgagggtatttccgagctgcgcgacgagtccgacaaggacggcatgcgcgtggtcatcgagctgcgtcgcggcgaggtgggcgaggtggtcctcaacaacctttacgcccagacccagttgcagagcgtgttcggcatcaacgtggtggccctggtcgatggccagccgcgcacgctgaacctcaaggacatgctcgaagtgttcgtccgccaccgccgcgaagtggtgacccggcggaccgtctacgagctgcgcaaggcccgcgagcgcgggcacatcctggaaggccaggcggtcgccctgtcgaacatcgacccggtgatcgaactgatcaagagctcgccgaccccggccgaggccaaggagcggctgatcgccactgcctgggagtccagcgcggtggaagcgatggtcgagcgtgccggcgccgacgcctgccgtccggaggacctggatccgcagtacggcctgcgcgacggcaagtactacctgtcgcccgagcaggcccaggcgatcctcgagctgcgcctgcaccgcctgaccggcctggagcacgagaagctgctctccgaataccaggaaatcctcaacctgatcggcgagctgatccgcatccttaccaacccggcgcgcctgatggaagtgatccgcgaggagctggaagcggtcaaggccgagttcggcgacgcccgtcgcaccgagatcgtcgcgtcgcaggtggacctgaccatcgccgacctgatcaccgaggaagaccgcgtggtgaccatctcccacggcggctacgccaagtcccagccgttggccgcctaccaggcgcagcgccgcggcggcaagggcaagtccgccaccgggatgaaggacgaggactatatcgaacacctgctggtggccaacagccatgcgaccctcctgctgttctccagcaagggcaaggtctactggctgcgtaccttcgagattccggaagcctcgcgtaccgcgcgtggccggccgctggtgaacctgctgccgctggacgagggcgagcggatcaccgcgatgttgcagatcgacctggaggcgctgcagcagaacggcggcgccgatgacgacctcgacgaagccgaaggcgcggtgctcgagggcgaggtggtcgaggccgccgagatcgaggaagtcgaaggcgagaccgccgaactggtggccgagccgaccggcgcctatatcttcatggccaccgccttcggtaccgtgaagaagaccccgctggtgcagttcagccggccgcgcagcagcggcctgatcgcgctgaagctggaggagggcgacaccctgatcgccgccgcgatcaccgatggcgccaaggaagtcatgctgttctccagcgccggcaaggtgatccgcttcgccgagagcgtggtccgcatcatgggccgcaatgcccgcggcgtgcgtggcatgcgcctgggcaaggggcagcagctgatctccatgctgattccggagtccggggcgcagatcctcaccgcctccgagcgcggcttcggcaaacgcaccccgctgagcaagttcccgcgccgcggccgtggcggccagggggtgatcgccatggtcaccaacgagcgcaacggcgcgctgatcgccgcggtgcaggtccaggaaggcgaggagatcatgctgatttccgaccagggcaccctggtgcggacgcgggtcgacgaagtctccctgtccagccgcaacacccagggcgtgaccctgatcaagctcgccagcgacgaggtactggtcggtctggagcgagtccaggagccgtcgggtggcgatgacgaggagttgccggagggcgaggaaggcgccgaagcgctgggcgagtcggctgagtccgaacccgccgcggaagcggaaggcaacgaagagtaa

SEQ ID NO: 339440 - DNA, 417 bp, Pseudomonas aeruginosa
atgcccttgaagaccttcgagaacgtttccccacgcttgaagttcaagtggctgtcgtcggaggtctgggaaagtcccttgccgccgttgttcacaccgatcaggttcttgttcggcttggcggtcgaccagctggccccgaccgacaacgccgagtcgaaggaaccttcgatttccccgatgttgaaggtcaccccaaaggccggagccgccagcgaggaagccaggctgacggccaacggcaaccgggcccgacgcgagaacggattacgggttgtcatcgacgctactccatgtgtgttttttgttatgagtgcatggactatagctagcgctgcctgccgcttgatccctcgaaagtgtgatttgcgcggcgcaaccactctggctcgcgcctttgcggcggatggagaatga

SEQ ID NO: 339441 - DNA, 1491 bp, Pseudomonas aeruginosa
atgaaccgcagcgccctggatttccgccacttcgtcgaccacctgcgtcgccagggtgacctggtggacgtgcacaccgaggtcgacgccaacctggagatcggcgccatcacccgccgggtctacgaacgccgcgcacccgccccgctgttccacaacatccgcgacagcctgcccggcgcgcgggtactgggcgcgccggccggcctgcgcgccgacagggcccgcgcccattcgcgcctggcgctgcatttcggcctgccggaacacagcgggccgcgggacatcgtggccatgctgcgcgccgcgatgcgcgcggaaccgatcgcgccgcgccggctggagcgcgggccggtgcaggaaaacgtctggctcggcgagcaggtggacctgacccgcttcccggttcccttgctccatgagcaggacggcgggcgctatttcggcacctacggtttccacgtggtacagacgccggacggcagttgggacagttggtcggtgggccggctgatgctggtggaccgcaacaccctggcgggtccgaccattcccacccagcacatcggcatcatccgcgagcagtggcgccgccagggcaagccaacgccctgggcgatggccctcggcgcaccgccagcggcactcgcggcggccggcatgccgttgccggagggggtcagcgaagccggctacgtgggcgccctggtcggcgagccggtggaggtggtgcgcacgcagaccaacggcctgtgggttccggccaatgccgagatcgtcctggagggcgagatcagcctcgacgaaaccgcgctggaaggcccgatgggcgaataccacggctattccttccccaccggcaagccgcagccgctgttccacgtccatgcgctgagcttccgcgaccagccgatcctgccgatctgcgtcgccggcacgccaccggaggaaaaccacaccatctggggcaccatgatttccgcgcaactgctggacgtggcgcagaacgccggactgccggtggacatggtctggtgctcctacgaggcggcgacctgctgggccgtgctgtcgatcgacgtgcaacgcctggcggccctgggcaccgacgccgcggccttcgccgcacgggtcgccgagaccgtcttcggctcgcatgccggacacctggtgccgaagctgatcctggtcggcaacgacatcgacgtcaccgagatcgaccaggtggtatgggcgctggcgacccgcgcgcatccgctgcacgaccatttcgccttcccgcagatccgtgacttcccgatggttccctacctcgatgccgaggacaaggcacgaggcagcggcggtcggctggtgatcaactgcctgtacccggaacagttcgccgggcaaatgcgtgccgctacggcgtcgttccgccacgcctatccgacggcgctgcgcaggcgagtcgaagaacgctggagcgactacggattcggcgacgcctga

SEQ ID NO: 339442 - DNA, 1365 bp, Pseudomonas aeruginosa
atgccgcgtcgcttgatcctctcggccacggagcgggacaccctgctcgcgctgccggaaagccaggatgacctgatccgctactacaccttcaacgactccgacttgtcgctgatccgccagcggcgcggcgacgccaaccgtctgggcttcgcggtgcagctatgcctgctgcgctaccccggctatgcgctgggaaccggcagcgagctgcccgatccggtcatcctgtgggtagccaagcaagttcaggccgatccggcgagctgggcgaagtacggcgagcgcgacgtgacccgccgcgagcacgcccaggaactgcgcacctacctgcaactggtcccgttcggcctgtcggacttccgcaacctggtgcgcgatctggccgagttggcccagcagaccgacaagggcttgctgctggccggccaggctctggatagtctgcgggagaagcggcgcattctgccggcgctgagcgtaattgaccgagcctgctcggaggccattgcgcgggccaatcggcgggtctaccgcgccctggtcgaaccactcacggactcgcatcgggccaagctggacgagctgctgaagctcaaggccggcagcagcatcacctggttgacctggctgcggcaggccccactgaaacccaactcccggcacatgctcgaacacatcgagcggctgaagacatttcagctggtggacttgcccgaaggcttgggccggcacatccaccaaaaccgcctgctcaagctggctcgcgagggcgggcagatgacgcccaaagacctcggcaagttcgagccgcagcggcgctacgcgaccctggccgccgtggtactggagagcaccgcgaccgtgatcgacgagttggtcgatctgcacgaccgcatcttggtcaagctgttcagcggcgcgaagcacaagcatcagcagcagttccagaagcagggcaaggcgatcaacgacaaggtgcgcctgtactcgaagatcggtcaggcgttgctggaggccaaggaaagcggcagcgacccctatgcggccatcgaggcggtgattccctgggacgagttcaccgagagcgtcagcgaggccgggctgctggcccggccggagggcttcgatcatctgcacctggtcggcgagaactttgccaccctgcgccgctacacgccggccttgctagaggtactggaactgcgcgccgcaccggccgcgcaaaacgtgctggcagccgtgcagacgcttcgcgagatgaacgccgacaacctgcgcaaggtgccggccgatgctcccatcgccttcatcaagccgcgctggaaggggtcgtctcagaaaacggaaaataaagcacgctaa

SEQ ID NO: 339443 - DNA, 561 bp, Pseudomonas aeruginosa; identical to SEQ ID NO: 334216

SEQ ID NO: 339444 - DNA, 792 bp, Pseudomonas aeruginosa
atgattcagcacgagcagggcgtacacaaggccgcccgccggcagggtgatccagaagtcgacacgacctatggctgccagcgcgcaaacgatggcaatgacccacaaccagcgatcaagcaggatgtgctcgccgatacggtgcacggcgcgcacgatcagggcgatcacagccgcctgcacgccaaggaacgccgcgcccagcgcggtacccacgaattcaatctggaagtacaaccaggacagcgcgaacatcagcaagaatccgggaagcatgaaaccgagtcccgccagcacgccccccagccgcccctttgctcggatgcccaaatgaacgcatatttcatgcgcttcgggtccgggcagcacctgcatcaccgcaagcagcttgttgaagcgtttgctggagatccagcgttcctcgtccacgagctcgcggcgcaacatgtcgatctgagccacaggcccgccccatgcgagcaagccgaacttgaggaagcgcgcgaagagctgtgggtagctcatgggtggagggacggcttcagtcgtggcatccgtcgccttgctcgggcgatacgactcttcattcgcaacgctcatagatcttctccttgtagttcaacagtaaccagtcaaatacggaagttggccaacaagccgtcgaatacggccgaagcctgcggccagcagcaggtcgtcttgggtgatgtcccagaaagacggacgggccgggcgtggttgcgcggcggtctgaggactggtcggggcgttcacgttgttttgtcctcgtaa

SEQ ID NO: 339445 - DNA, 765 bp, Pseudomonas aeruginosa
atggtcgatctgttcgcgcaggcgcgcttcgaagtcgccgatacgcacccgcgacgcctcggtattcaccaggtcggccaggtcataggcgctggcggtggtttccagcgccgagccgacgaaggtgcgcaactgccgggcagcctcgtccggctggttgcgcaccgcgcgcatgaagcgctgcacgttgtcggcgtcgccctggacctgccaggccacgtaggcctggacgatgatccgcaggccatcgcgggtaccgacgtcctgcaggccgctggaggtggtgcgcaggcgcaggtcgaccgggatcgcgctctcgaacggcaacggcaggcgccaggccaggcccggttcgagcaggacccgcgccgggttgccgaaacgggtgatgaccatcgcctcgccggaacgtacctgcaccaggcaagcggcggcgacggcgaacagcaccagcagcgcggcgaccagcagccggcgccagggcggcgcggcctgtgcgccatggccgtgatcgtgatcgtgatcgtgatgatgctcatggtggctgtgcgagtgggagtgaccgaggctcaagagcgctctcctcatggtgcggattgcccggccgcggacgccggagcggcggacggacgggacgaagacggggaatccaggcggccgaggccgaagctgcgcaggtcgatggtcggcgcgccggcgccggcgatgcggtggtcgatgagcagcaggttggccttgcccaggccgcgtccgagttggcggtag

SEQ ID NO: 339446 - DNA, 276 bp, Pseudomonas aeruginosa; identical to SEQ ID NO: 325094

SEQ ID NO: 339447 - DNA, 906 bp, Pseudomonas aeruginosa
  misc_feature (892)..(901): n is a, c, g, or t
atggaactcaacggcattttcctgaaccccgtcagccgtcctattgaaggggtgatcaaagctgatgatgaagccagcctttacaacgagctgagcgagtatgtgctgaccgacgaggtcgccaaacgcctggaacactttcttgacgcttacaccgactatcacggcgccaatggcgtgtgggtgtctggcttctttgggtcgggtaaatctcacttgttgaagatgctggcgcttctgttggaaaaccgcagcatcgatggctcctctgccctggatatcttcctgccaaagatccacgaggacgatgcactgctgcgcagcaagcttaagcaggctgtcgccatcccctcgaagagcatcctgttcaacatcgaccagaaggccgacatcatcagcaagacgcagatcgacgccttgctgtcggtctttgtcaaggtcttcaacgagatgtgcggttacttcggcaagcagggctacattgcccagttcgaacgtgatctcgacagccgtgagcagttcgacgcctttaaggacgcctatcagatcatcgccaaaaagccctgggagcgtgggcgcgagcaggccctgctggagtctggcaacattgccaaggcctatgcgcagatcaccggtgaagatccgactctggccaagggaatcctcgacaagtaccgcacccagtacagcgtctccatcgaggacttcggcaaccaggtcaaagcctggctagacaagcagccagccaatttccgcctgaatttcttcgtcgatgaggtaggccaatacatcgcagaaaacaccaagctgatgaccaacctgcagactgtcgccgaaagcctggcgactaagtgccaggggagggcttggatcatcgtcaccgcccaggagnnnnnnnnnntatga

SEQ ID NO: 339448 - DNA, 150 bp, Pseudomonas aeruginosa
atgaccttccttctgctgtggtccgcctgggcgatgtacagcacctggcgcggctgggccaccaacaacctcgacagcgccactgccggcgcttccgcgatacggatcttggtcctcctcggcatcacctccttcatcctcctcagctga

SEQ ID NO: 339449 - DNA, 1497 bp, Pseudomonas aeruginosa; identical to SEQ ID NO: 329973

SEQ ID NO: 339450 - DNA, 1872 bp, Pseudomonas aeruginosa
  misc_feature (1856)..(1865): n is a, c, g, or t
gtggaggcggcgaacagcctgaacgtccaggccggacgcgacatcgccaacctcggcggggtgctgcagagccgcggcgacctcagcctcgacgccggacgcgacgtcaccgtcgccgccgtcgaggaccgccagggccagacccgctggaacacgtcgcggctacagagcgtgacccagctcggcgccgaagtcagtgccgggcgggacctgaacgtcagcgccgggcgcgacctcagcgcagtggccagcgccctcgaagcgcgccgcgacatcgccctctccgccgggcgcgacgtgaccctggcggcggcggcgaacgaggagcatgcctacagcaagaccaagaaggtcacctaccaggaagacaaggtcgcccagcaaggcacccgcgtggacgccggcggcgacctggcgatcaatgccggacaggacctgcgcctgatcgcgagccaggccagcgccggcgacgaggcctacctggtggccggcgacaagctggaactgctggccgccaacgacagcaactactacctgtacgacaagaagaagaaaggcgacttcggccgcaaggaaacccggcgcgacgaagtcaccgacgtcaaggcggtgggcagccagatcagcagcggcggcgacctcactctgctcagcggtggtgaccagacctaccagggcgcgaagctggaatcgggcaacgacctggccatcgtcagcggcggcgcggtgaccttcgaggcggtaaaggacctgcaccaggaaagccacgagaagagcaagggcgacctggcgtggcagtcgtcgaagggcaagggccagaccgacgaaaccgtgcgccagagccagatcgtggcccaggggaatctggcgatcaaggccgtggaagggctgaagatcgacctcaagcatatcgaccagaagaccgtgagccagaccatcgatgcgatggtgcaggcggatccgcaactggcgtggctgaaggaggccgagcagcgcggggatgtggactggcgcatggtgcaggaggtgcacgatagctggaagtacagcaactcggggctgggggctgcgccgtcactggccattgccatcgttgcggctgcttacctcggcccggtgtatggcgcaatggccagcaatcttgcgaccgggaccataaacaatggcggtgacttcggaaaggggctgaagtttgcgacgagctccaatgctttgaagggatatgccgttgcgggtgcgacagcttatttggtcagtccgcaactggatgagatgtttggtgtaagcaccgacaacgtcaataaagtcactaaaggatttgacctgagcactatgagtggtctaggtgggttcgccacctattctatcattcaaggtctctctcaagcgggtattcaaactgccgcgtttggtggaagttttgcagacaacttaggtgatgcaatggccggtcaagcaacaaacttggctatggctgctgggttcaatctcatcggtgattgggctgatggaaagtttgattctggctctccgcaaaaagttatggcgcatgccttgatgggaggattgctcgcccaggcaacaggtggagacttcaaaactggggctatggcagcaggggctaacgaagcgcttgtcaatgtgctgtctaacatggccggtggcgaagaaaagctagagcttatggcctcacagctaacaggtcttcttgctgctactgtagttgatggagatgttgcgaaaggggcagagattgccaagaatgcaacggcctacaatcagcaggttcaccgggacgctctgagtcgactgaaaagaggaatgagtgcgcttcatgaacaaggcaagtatgctgnnnnnnnnnnatgctga

SEQ ID NO: 339451 - DNA, 123 bp, Pseudomonas aeruginosa
atggtcattcatcacatgaacacgagcagcgctatgaatgacggtatcgacgcctgcaagagcatcactccaaagggtgtcaccctcgatattccctaccggaatagcgacagcgccttctag

SEQ ID NO: 339452 - DNA, 669 bp, Pseudomonas aeruginosa
gtgctggtcttcatcgtccccggctacgtgctcgacgcggagctggtcggctggttgacgcgccactacaccgatctgcgtatctaccgagcggtggaaacgcagttcaagcaggtggtgatcttcggccgccgggtccgtcagcgggagctggcacccgatggcgtcaaggccgtgcgcaatctgctgctgcaggttgggcttggcgaagtcgaagccgaggaactgccgagcgaatggccgttcctgccgtacatcgtccccgccagtccggccgagccggagcatttcttccgcgtgacgatggagcccgaacagttcgccgacgaggttggccggctgcaaggcctttggccgtcgctggacacgcacttggggaccgcgcagcagtcgctgcgtccaccggcgcgggccttgtcccactggcatctcgccctggctctggccgcgggcgcgatctccggcgtcgtgcgctcccagacggggcgcgtgctcgtcgtcaaaggtgacacccacaaggacaagacgctccagcgggaattcaccgaacgcgaagacggctccatcgccgagacacgcatcctcaccgacaagttcgtgcctgtcatccgcgcgtgggacatgacgcctggctccccgacacggggcgaggtgttgaccattcgctga

SEQ ID NO: 339453 - DNA, 321 bp, Pseudomonas aeruginosa; identical to SEQ ID NO: 323927

SEQ ID NO: 339454 - DNA, 228 bp, Pseudomonas aeruginosa; identical to SEQ ID NO: 323928

SEQ ID NO: 339455 - DNA, 2151 bp, Pseudomonas aeruginosa
atggagaacccaaccatcgtcgttattacggaccgcaacgaccttgatggccaattgttcggagtattctccctctcgcaagatttgcttcgcgagcagcctgttcaggccacgacccgtggagatttgcgagagaaactgggtaaccgccccagcggcggcgttgtttttgccaccatccagaagttcatgccaggggaggacgaggacagcttcccagtcctttctacccgctcgaacatcgtggtaatcgccgatgaggctcatcgtacccagtacggtttcaatgctgagctgaaggtggacacgcttaaggtcgcggaggggcaggctcgctatcaggtgggctatgcccagcacctgcgcgacgccctgcctaacgcaactttcgtcgcttttaccggtacaccggtttctagtgaggaccgtgacacgcgcgcggtcttcggcgattacatccacgtctatgacatgcagcaggccaaggaagacggtgccacggtggccatcttctacgagtcgcgccttgccaagttggcgctcaatgaaagcgagctaccacagatcgatgatcaggtggacgagctggccgaggatgaggaggaagatcagcaatcacgcctgaagtcccgatgggccgctctggaaaaagttgtcggagccgagcctcgcctgaagcgtgtagcggctgacctggtgacgcattttgaggagcgcaatcaggctcagcagggcaaggcaatgattgtggccatgagtcgcgagatctgtgtgcatctgtatagcgagatcatcgcactgcgtcctgaatggcatgacgaggatcccgagaaggggacgatcaaaatcgtgatgaccggcagcgcctcggataagcccctgctgcgcccgcacatctatccctatcaggtaaagaaacgccttgaaaagcgctttaaggatccgaaggatccgctgcagctagtgattgtgagagacatgtggctgacgggcttcgatgcgccctgcgtacatacgctgtacgtggacaagccgatgaaaggccacaacctgatgcaggccatcgctcgtgtgaaccgcgtgttcaaggacaagcagggtggcctggtggtggattacatcggtattgctaacgagctaaaggccgctttgaaggagtacaccgcaagcaaagggcgtggccggccgacagtggacgctcacgaagcctatgccgtgcttgaggaaaaactcgatgttctgcgtgccatgctgcatggtttcgactacagcgattttattatcggcgggcacaagctattggctggtgcagcaaaccatgtccttggattagaagatggtaagagacgctttgccgataatgccttagccatgagcaaggcattcagtttgtgctgcaccttagatgaggctaaggccgtgcgtgaagaggtggcattcatgcaggcgattaaagttttgctcactaagcgagaaatcagcgcgaagaagaaaacggatgaagagcgtgacttggctattcgtcaaattatctgtaatgccgtagtttctggcgaagtggttgatgtgtttgcggcggttggattagaaaagccaaatatcggattgctggatgaggatttcctttctgagattagaagtcttccagaaagaaatcttgcagttgagctcctggagcggcttttggaaggggaaatcaagagcaagttttccagtaaccttgcgcaggaaaaaaagttttcagagcttttgggggatgtaatcaagcgatatcagaatcgctctattgagacagcccaggtcatcgaggaacttatcgaaatggccaagaagtttgccgccgctagcaagcgtggtgaaaagcttggactgaatgatgatgagttgtcgttctacgatgctttggcaaacaacgagtcatctgtgcgtgaactaggcgatgagactctagctaagattgcccatgagctgaccgagagcctacgccagaacgtaactgtagattggaataatcgcgacagcgtgcgcgcaaagcttcggctcttagtcaagcgaattctaaggaaatataagtatcctccagatcagcaggaaactgcggcacagctggtgttggctcaggcagaagcgctctgcagtacatggatgtag

SEQ ID NO: 339456 - DNA, 1554 bp, Pseudomonas aeruginosa; identical to SEQ ID NO: 332084

SEQ ID NO: 339457 - DNA, 1287 bp, Pseudomonas aeruginosa
  misc_feature (286)..(295): n is a, c, g, or t
gtggttggagttagagattatgaagttgttatatttccgtccaaccgaggcgcgagcagcccatttaaggatgctgctccttcatataactcagctgagcggcgaattgctacggccgaagaatacttcgcggccttcgagaggcttggccgaaaaaagccgagaaattataatgtcgcgcgcgaactaagaagctcccaggcatctttggatgcggctaatgaagatgggcgcaactggcatcgtcttaatctagcgagtcttgcggcgaaagcctatgcctgtnnnnnnnnnnctatccttttttttatgattacaggtgccactccggctgaatttgagcagtttagttacgaagacgcactcaaagttgaaaagtcccctctcaagaaagagttgtcggctgtgaaatttcgggctggcggaaagtcaacgctttacaacattgggcggggctcgggtttgtcgctgctgaaagagtatttaaagctgcgtgcgtggattttggatggtgcgagacatgagcgactattctttgcaatgcctacgtctggtcagcttagaacttgcaaaagctttggtgatcttaacgtgacaagctccttagaaaaattttatgagtttattagcggggtctttcttgatccgactgtaccaagactttcaactcgtaaaatacgcaagcacaaaagcactgaaatgcactctgcacgtttgtcgccgtccacggtagcggcatccctcaatcacaccgaagcggtgaatctttctacctatgcagaggcaacacctgaacagcagcaatccgagttcagcctgttttgggatgcaatacgccacgctgctcatgttgtgcgtgagcgaagccgcaaggctgtagcaagtagtgtcgcaatagcggcgggtcactgcgaggatttcaataagccgacgtctgccactgatgtgggattgattatagagccgaactgccgcacccaatatggttgtttgtactgcgaaaactatttatgtcacggcgatgaggaggatctgcataaaattctgagtttgcaatacgtggtcaatgccgtgcgtaaatcggcccccgatgcagcgcatactgaggcacttttcaaagagttatctatccggatcgagtttatagtcgatgctcttagtgagcgctctagctcggtgaaacagacagtcgaaaaggttaaagctaaggtgtttgaatacggcgagttaactaagttttgggaagtccggttgggtcgctatgaaaaaatggggatcgtattttga

SEQ ID NO: 339458 - DNA, 279 bp, Pseudomonas aeruginosa; identical to SEQ ID NO: 323918

SEQ ID NO: 339459 - DNA, 912 bp, Pseudomonas aeruginosa
atgcatatcgatctccgccagctccgccacttcatcgcccttcacgagcaccgcagcttcgtcgccgcggcgctggcggttaacctttcgcaatcggccttcagccgcagcatccaggcgctcgaacacagcgctggctgccgcctggtggaccgcgcggccaaggacctgcgtccgaccaagcagggcctgatcgtcctcgaacatgcgcgccggctggtcagcggcgcgcacaacctggccaacgagatcgccctgttcaacggcctggaggccggcgaactgcgcttcggcgccgggccggctcccgccacctggctggtgccgcgtgcggtggggcgcttcaacgtgcgttatccgaaggcgcgggtgagtttccaggtcgaacactggcaggcgctgaaccgccgcctgcaggccgaggagttcgagttcttcgtcgccgacacccggcatttcgaggccgacccgcaataccggacctcgcgcctgcgtccccggcgctggcatttctgctgccgcgaggggcatccactggccgcgcgcgagagcgtttccgccgaggagctgctgagcttcccgctggcgaccaacatcagcccgccgaacatccgcaaggtgctggtggacctcagcgggcgtcccgacttccgcccggccatcgagtgcgagaacggccatagcctgctcggcgtggttctcgcctcggatgccatcggcatcagcagcggcctcggcgacctggcgccgccgggacagggaggcctgcgtccgctgcgggtgcgcgagctgcccgacgacctcgacgaactgcatacccgctacggcatcgtcagccgcgccggctacagcctgtcgccgctggcggaggcgatgatcgacgagctgaagcgggtcgacgacgccacctga

SEQ ID NO: 339460 - DNA, 279 bp, Pseudomonas aeruginosa; identical to SEQ ID NO: 334472

SEQ ID NO: 339461 - DNA, 132 bp, Pseudomonas aeruginosa
atgcgcaagctttatattcccctccaacatcaaacgttccatcagagagaagaacagattgactcggtgcgcgtactcaacagacgaatcaagaagctcaaccgtcatatgctgccatataacgcccattga

SEQ ID NO: 339462 - DNA, 162 bp, Pseudomonas aeruginosa
atgaacgcctacacagtgtcccgactggcccttgaggccggggtgagcgtgcatatcgtgcgcgactacctgctgcgcggattgctgcggccagtcgcctgcaccacgggcggctacggcttgtttgggtgcccgcagaattcggaaaaaatcgtacgctaa

SEQ ID NO: 339463 - DNA, 219 bp, Pseudomonas aeruginosa; identical to SEQ ID NO: 333835

SEQ ID NO: 339464 - DNA, 687 bp, Pseudomonas aeruginosa
gtggctcaggctccgctgcggctgcaacgcctccaccagttgctcgaacggcaggtcctgatgggcctgcgcttccagtgcggtacgtttgacctgctgcaacaaggcgtcgaaacgagtctccaggtcgaagtcggccttcaacacctgggtattgacgaagaagccgatcagacgctcggtctctacccgggtgcggttggcgatcggtaccccaacgcggatttccggctgcccgctgtagcgatgcaacaaggtctggaaactggccagcaacagcatgaacagggtcacgccctgctgctgcgccagctgtttcagcgagcgacccaggtcttcgcccagctccacctgcaggctgtcgccgacaggactctgtacgctcggccgcggccggtcggtcggcagttccagcaccggctgctcgccgcccagctgctgccgccagtaggccagttggcgctcacgctcgccggcttccatccagctgcgctgccacagggcatagtcggcgtactggatcggcaacggctccagctccacggcgcggccttcacggtagccggcgtagaactgcataagctcttccaccatgatcggcgtcgaccaaccatcggagacgatgtggtgcagggtcaccaccagcacctgttcctcggcggacaggcgcagcagcaggacccgtag

SEQ ID NO: 339465 - DNA, 624 bp, Pseudomonas aeruginosa
atgcgggttgaaccagcggatcaaccagttcctgatctcctgtccgcccatgcgcgaagcgacgatgccggcgttcgccaggccgccttggatacgctcgcagatggatttcagatatgccgccgggtcctgtccgcgaatctgcgcatccgccttgcggatccggcggtagaccaccatccgcacgcgccgctgttgtcctcgccagggcagtttgctgacggcggtgtcgacgaacagtccgcccggcttcgaaatgccctccaggtgatgcttcatgagcgccaggtacatctcgctgaaggccgatcctcgcgctcgaggatggacgtactgcctcaactgctcctggaaattgtcccagctgatctcgtcctgggcgtagaactggacgatccagggcgaggtttcgtgctcgtcgaaggagttctgcagggcttctttcaatgcgtcccgggcgttctgcatccaattgggatcgcggccctcggtgcccaagggcaccagctcgaagaacgcggcgcgcgaacgcccatcttccaggagcatcacctgctcgtcgggcaggtactcagcccagggcagcaggtcgacgaacgatgggtcgtgatcgtagaggcgtga

SEQ ID NO: 339466 - DNA, 249 bp, Pseudomonas aeruginosa
atggcccgagaaaccgaagataagttcgttgtccgtatgcccttgggcttgcgcgatcagctaaagcaaaaagccgcgcataaccaccgctcggccaacagcgagatcgtctaccggctggagcgcagcaacgagctcgaagaagaactagctcgagcgaaccgaatggtcgacgagctcttcgccaagaaccagcgcctgcaggctgagctggcggcggcgaacacgcctcaggtggcggaggcatga

SEQ ID NO: 339467 - DNA, 687 bp, Pseudomonas aeruginosa
gtgcgtgcccgcagcaaattcagcaaccgagaggagcgctgcatccgcgaaatctggactgccgaacaggaactggtgctgttgcgcctgtatccggatatgccgaacgaggtcctagcagccaggttgaacaaaacggtccagcagatctacgcaaaagcccaccgtttaggactgaaaaaaagcccagagctcgccaagcagattctgcaggcctgcggccggaagcttcaaatcgaaggcaatgcaacgcagttcaagaaggggcatacgccatggaactgcggcatgaaggggcttctcgcgcgaggacgctcgtcggaaacgcagttcaagaaggggcaaaagccccacacatggctcccagtcggcagtacacgggtcagcgctgatggctacctgcaacgaaagatctcggataccggttatcccccccgggactggaagggcatgcacatcctgctctgggaagaacacttcggccccatcccaaccggccattgcgtctgcttcaaggacaacaacaagcagaacgtcgtcatcgacaacctggagctcatcacccgggccgaacgcatgcgccgcaactccatccatcgctatccacctgagctgaagagcgcaatccgcgtcatcagcaagctcaagcgcaccattcaggaggtcgagcatgaaaaacaagattga

SEQ ID NO: 339468 - DNA, 354 bp, Pseudomonas aeruginosa; identical to SEQ ID NO: 324361

SEQ ID NO: 339469 - DNA, 246 bp, Pseudomonas aeruginosa
atgaccgtgccgcagttcgggcatgctgccacgtcgccgtggcgggtgcgccgctgggtgaagaccggcttccagtggaaccccatccgcatccgcacgcgccccaggacgaaaaactcctggcccgtgggctgcacacccaactgctcgcgcagcttgatgagcttgaccagcgtatccgggccattgagcacccagaccttggcgccggccaccgtctcctggatctcgcgccgccacttgtag

SEQ ID NO: 339470 - DNA, 405 bp, Pseudomonas aeruginosa
gtggactacaagggcaacctgttccgctacgccgcctacctgacgccttcctgcaaagtcttcctggagaaggacttcgagtttcgtcgtaacgccggcgaactcagggggcgcgagcgcaccacctcggaaatccccggccggggcattggcgagagcgatggacgagtcatccagcactcgatcaatgactggaccgtcaacctggacatggacagcacggagtattacgccggcgagaagatcaagcgggcgctggcccgctacccgttgcacgtcatccgcgccgacgtcgacccggagaccaatcccttcggcctgcagtgggactgctactccgacacgcctcaacgtatcgaactcgaggagccggtcgcccccatcaagcgggagggaggtctatga

SEQ ID NO: 339471 - DNA, 354 bp, Pseudomonas aeruginosa
atgcgggaagagcagcatttcgctgccgcgccccaagccttcttcgaggcatggaagcgtggtgccgagatcgctggccccgaatggttcggcgacggcacccgtgaaggtctgaaccaggccaagagcaagtgggatctgcgtcccaacatgctgcgtgccaatgatgccctcggcgtcctgagcagcggggaacgcatgttcctgtccgccatggtcagcttctacaacgcgcgcgagggcggtgccatgctcaagcgctgccacttcgacgggctgtcggacttcgacggcctcgatctgcaacgccgcaaggtcatcgccgacttgatggtgaactacagcggctggtga

SEQ ID NO: 339472 - DNA, 225 bp, Pseudomonas aeruginosa
atgatcaacgccggcagcgacatgaccgcgccggtcgcgttctggatgaccgagcccatgatgttctggaaaccctgtgtggcaccattgagctggttctccagggtgatgctcaggttcatgtttccgcacatcatgtcgttgttccagccgaagccgacgccgatcgagtccatctggccggcgctacccatgctcaccgcgctgccgccgccaatgctgtag

SEQ ID NO: 339473 - DNA, 225 bp, Pseudomonas aeruginosa
atgatcaacgccggcagcgacatgaccgcgccggtcgcgttctggatgactgagcccatgatgttctggaaaccctgtgtggcaccgttgagctggttctccagggtggtgctcaggttcatgtttccgcacataaggtcgttgttccagccgaagccgacgccgatcgagtccatctggccggcgctgcccatgctcaccgcactgccgccgccaatgctgtag

SEQ ID NO: 339474 - DNA, 732 bp, Pseudomonas aeruginosa
atgctcatcgacgactcacccacagcacgtcctcgcaaagcccgcactactggccagattcttggaacagccgagaaacgcgacaccatttatgaacgcatcctgaatgcggtgatggaacaccggctcatccctggtaccaagcttgtggaggagaagcttgccagcgtatttgaggtcaaccgcacccgcattcgcgaagtgctcgcccggctcgcacatgaaggtgttgtcaccacgattcccaaccgtggcgcgttcgtagccagtccgtctgtagaggaagctcggcatatatttaacgcacgcaggattctggagccggcgctaattcggacactcgtagcgcacgcgggtgaaaaccagatcactcaactctatgaccatgtggccctagagcgcgctgctcgggaaaacaatgacaagcgcgcggttattcgcttgtctggagagttccacctacggatcgcagaaatggtcggcagtcccccacttttgaaacttatgcgagagctgtcttcgctgacctgtctgatcatcctgttgtacgacgcgcccaatgtgccggcatgcccaaaccatgagcatcttgagatcgtgaacgctatcaagtcaggcgaaactgaggaggcggtcaggctcgtgatagagcacctgaatcacatcgagaacacgctggatctttcgataggggaagaacaggaagtggatctggacgaaatcttcggttga

SEQ ID NO: 339475 - DNA, 1491 bp, Pseudomonas aeruginosa
gtggttgcaggccctcgcacgcctgagtcgctcgatcaggaatatccgccgaccgaagccacccacgaagccaagcgcaacatctacgagcgcctgctggcctacgacaccaaggtcgtcgacggtgtgcaggtggaaaacttcgacaagctggtgggggcgctggctgaaagctggacggtggcagacgacaaaacctcgatcacctttcatttgcgcagtggcgtcaagagcgcagcgggcaacaccctgtccgccgacgatgtgatgtggtcgttcgaaaggggctggaacaagaacgcgaatttccgctggtacatgagccagatcctcggcatcaaatcctttgaagaagcgttcaagaagcaggatgaaatgaccgtcacggtcaccttgcccaagacctctccgctgatcgagcgaatctgggtcaacaatgacctcggcattctggacgccactgctgcccgcaagaacgtcaccagtgacgacccttacgcatccagttggctggccactcactcggcctcgttcgcgccctatcaggtgacgaaattccagtcaggccaggaggtggtgtacgaagccaacccgaattattaccggggcgtgccgcgtctttcgaaaatcatattccgcgaaatgccgacatcggccaaccgcctggcagcactgcaagctggggccgtggatgtagccgaatggctttcgccacgtgagctggcgatgctggagaagaatcctcagctgaagatttggcaggtgtttggcaactacattcaccgcgttgaaatgaacaacaccacacctccgttcgataaccccaaggttcgccaggcgttgaattatctggtgccgcgcgaagatattctgaaggcggtgtattacggcaaggcacgggcaaccaagagcccgatctctgaaatctatccgtcctataccgatgaatatttcacgtacacccaggatgtggagaaggccaaggcactgttgaaagaggcgggccaggaatcgggcttcaaaacccagcttggctaccgtaccggtgatcagatcgaggaagagattgccgtcatcctcaagaccgcgttcgcccgcgccaacgttgacgtggaactggtgaagttgcccgcctcgacgctggtggagaagtactccaagggcacgatccccatgtatttcttccgcgacatggccattgtccccgatgcggcttatgtggcgaatctctggcttaacagcgcctcacttatcaactacccgaaattcaacaatgccgaagtcgacaagctgatcaacgacgcgttgtcgagcacggacgaggcggcgagggatgctggcatgaagcgcgtccagcaaattgttgtggacgaggcgccttgggtgtttttgatgaatccaggctaccaactggccacccgcgccaatgtcgctggtttcagttggtacacgcccaacagcaacagttggtacgacctctacaagaaataa

SEQ ID NO: 339476 - DNA, 1041 bp, Pseudomonas aeruginosa
atgagacttagcaattcattgcggtcgctgcctcgcccactacgtatcgtactggccaggctgactattcttgttccgcagatgtttggcgtgctgcttgccacgtttctgctgattcgtttactgcctggtgacccggccctgctgatgctaggcaatatggccacgcccgagcagattctgagcctgcgcgagcggctgggcctcaacggcagcatctggtcgcagttcacgagctacctttcaacggtcgttcacggtgacctgggaacgtcgatgttcacctccaaccctgtggccgttgatttgctcgaccgggtgccggcaacgctcgagctgattacctacgcaatgattctgacgatcatggtgagcgtggtgcttgcggttgttgcagtgaccaagcccaacggaatgatcaatcggttcagcaaggtctacggcctggcggcgggcgcggtgcctgacttctgggtgggtctgctgctcatctactttctgttcaatgtcgccggcattgctcccgcaccgttcggcaggctggacccgatactcactgcgccgccagccgttaccgggtttctgaccatagacacgttgcttgccggtgataccgccgcattcgcctcggctgtcggccgcctgtggttgccggtgcttacgctgaccatcgtcaacgccggcgcgttgatgaagatgacccagattgttttcgccgataactaccgcagcgagttcattcgtcatgcacgggcgagcggtctttctgaatggcagttggttcggatcgcgatgcgcaacagcctgccaccgatcatcaccatggtcggttttctcttcggttttctgctgggcgcggcggttctggttgaaacgattttcgcctggggcggcctcgggcagtacgcggtatccgctgtcatgaacagcgattaccccgcgttacagggatttgtgctggtcgctgccgctttcattctcatcgtttacaccgtcgtagatgttctgtacggcattgctgatccgaggattgaagtatga

SEQ ID NO: 339477 - DNA, 846 bp, Pseudomonas aeruginosa
atgagaccgctatctgcacagcgtagcgttgccggcaaggcaaccttgatcatcggcctggtgctgctggctattcagtttgtggcgatcatctttgcgccatggattgccccttactcgccggaaaccgctgatccgataaatgcactgcaagagccatcgttgattcattttttcggcaccgatgtgtccggcatggacattttttcccgtgtcattttcgcgacccgaatcaaccttctgatcagcgtgaccgccgtggccatcgcctttgtcattggcgttccactcgggctcgccattggctactacaaaggctggggcagctccctggcgatgcgtttttttgactttatccagtcatttcctgtgtttgtgctgggcatggtgctggtgtccgtcatgggccaggaaatatggaacgttgccattgtgctggccgtacttttcacaccggtcttcgcccggctgatccgggctgaagtcttgtcgctgcgtgatcgtccgtttattgccgcggccagatgcagtggtgccacggacagcgcaatcatgttccagcacatcctgccaaatgcgttgacgcctgccatcgtgcagatatccatcagcatcggcatggccattctgctgacggcgggcctgtccttcgtcggtgccggcgtgcgcatgcctactccggaatggggtctgatggtcagcaacggcgcgcagcaaatgatcctgggtatctggtgggtcgcgctgtttccagggctcgccatcgttttttcagtactgacgtttgcgcttctcggagacgcggccaagcaactgttcgacccgcagacaaggagctcctcatga

SEQ ID NO: 339478 - DNA, 1659 bp, Pseudomonas aeruginosa
atgacaaacaccaacgaacccttacttgaggtacgcaacatcagcgtcgggttttcggaccgatcaatgccgcctgccttacaggaagtgagtttctcgctgaagaagggggagattctcggcattgttggtgagacaggtgcaggaaagtcgcttcttgcgcgcgccattatcgacatgctgccaggcgacggatgcattgttgacggcgagatacgggtcaacgggcacgcgatttccacgatgacaccgcagcaaagacgcggctatcgaggcggcgaggttgcgctgatcggaaccaacgctaaatcgttgctggacccggtagtgaaggtgggcgagcaaatcgccagagttcttcgggcccatcgagggatcaacaaaaaagacgcatggcaggagtcaattcgcctgtttgagcaagtcggaattgtgaaccctgagaaaagggcgcacgcctacccgcatgagctttccggtggtatggcgcagcgggtggtaatcgccatggcgttgatcgcacaaccgaaaattctgctcgccgatgatgcgaccctggggcttgatgcaacgatccaactgcaggtgctggacctgctagtggaaaaagggcgtgagcttgggctggcggttgttctgattacccatgacctcggcatggtggccagttactgcgatcgggtcggcatcatgaaagccgggcgtttggtggagctcaccaccatccgctcttttcttaacgatggtcctcagcatccctatagccgggagttgctggaggcagcccgtgtacgtccgttgccgatggatggccagccggcacaacccggcgccgaggctgcaccgctgctagaggtcacgaacctggtgaagttgttccatgtggagggctccactgagccggttcgcgcggtagaccatgtgtcgctgaccatccgcaaaggggagaccttggccctggttggggaaagcggatccggcaaaaccacgaccggccaatgcctggttcgtttactgcaatcggacttgggctcgatccggttcgatggccaggaaacactgaccctctctgataagcagttcagaaacgtgcgccggcggatgcagatggtgttccaggagccttatgtggcgcttaaccccaggtggcgggtgcgcgatctcgttgtcgagcctctcaagttgggcgcaccgctgacccgcgcggccaaacaggcgcgggttttggagttgctcgatctggttggcatatccagggccaaggcagatgtttacccccatgagctgacggccggcgagcagaagcgcgtaggcgtggccagggccttggcggtcaatcctgattttgtgattttcgatgagccgacaacggcactcgacattcgggttcgagcgcagatcatcgaccttgtgcgggatttgcaaaagcgtatggggctgtcggcgctgttcattacccatgatttgaactcagtccggtcattggcgcattacgttgccgtgatgcgccacggcaagatcatcgagcaaggcccgacggaggagatttttgccaatccgaaggaggcctatacccgcaagctgctcgaggccgaactgcctatcgaggtccgagaagaggcgccaatgcgcgccccacaggcggagctgcgcgcatga

SEQ ID NO: 339479 - DNA, 957 bp, Pseudomonas aeruginosa
atgagtttcgatcaatcgataagcaaaccggtattggtcaccggagcggcagggttggtaggtcgccaggtggtgcgtcgtctggtcgagcagggccgaccggtgctggcactggatcggctcgcctcggtcacccaggagggggtcaagatcacagcgtgcgaccttggcgatatccatcgcctgcatgccatcgctctggatggagtcgattccatcattcattgcggtgcgttttccgggccaatggtggcgcgtgatgcgccgtattcgatggtgcaagtgaacattgtcggtaccgccaacgtacttgagttggcgcgtgttcacgctgttcggcgctttgtgtattgctcctcgaccagtgcttatggggtggtcgagtcgggtcccgcttacgaagacgttttactcaagccaggcagcctctacggtgccagcaaggtttcttccgagtacatcaccacggcctacgccgaacagtatgggctgtctgcggcgagtgttcgactgtcctgggtctacggcccggggagaaccactgactgtgtgattcgtaagatgattgaagatgccttggccaggcgcgccacccgaatgtctttcggagcggacttccccaggcaattcattcacgttgaagacgccgttcagggcttgctttgtgcgctggatgcccccgtgctgccacgcaccacctacaacgtcaccggcgacacccgtgtaacgcttgaagagatcgcgcaggtcgtgcgcactatctttcccggtgccgatatcgcccttgagccgggcgcggatcctgtcgatgaattccagcagaaattcagtattgatgcggcgcgccgtgacctgggttacgtgccaaaaatatcccttgatgacggcattcaagcgtacgcgcgctggctggaatcgactcaccttcctcatagtttcgaggtgcagaaagcatga

SEQ ID NO: 339480 - DNA, 924 bp, Pseudomonas aeruginosa
atgagtgatcttcaacgagattttgtcggctatggccgtaatcctcctgatcctaaatggcccgggggcgcccgactcgcactgaatttcgtcatgaactatgaggaaggctcggagccgtccattcaggacggcgaggacagtagcgaaacgtggttcaccgaaagcagcggcctcaataccggtgtaaagggccgggatctggccgctgaagggctattcgaatatggcagccgagtgggtttctggcgggtgatgcgcctgttccaggagcgttccctgccagcgaccatctatggctgcgcgctcgccctggagcgtaatccggatgcctgtgaagccatccgcgaatcgggcttcgatgtgtgctcccacggctggcggtggatccagcactaccagctcagcgaggaacaggagcgcgagcacatccgtaaagcggtggaatcccttgagcgtacaacgggcgttcggccccagggttggtattgccgctactccccgagcgtcaacacccgtcggctgctggtcgaggagggcgggttcacctacgactcggattactacggggacgagttaccgttctggacccaggtaagcggcaaacctcacctgatcatcccgtattcgttaaccaacaacgacggacagttcgccgctggcgtcagtaccggaagccaatggttcagcttcctcaaagatgcgttcgacatgctctacaaggaaggagaaacccaacccaagatgatgtcggtcggtctgcacctgcgcttggtggggcatccggcccgggcagctgcattggagcgattcctcgattacgttttgagtttccctgacgtatggatcactcgacgcatcgatattgccaaccactggcagagcgtccatcccgctcgaacactgggagtcggtcatgagtaa

SEQ ID NO: 339481 - DNA, 762 bp, Pseudomonas aeruginosa
atgagtaacgtgtttgatctttcgggccgcaaggctgttatcaccggcgcaagcaggggaatcggtgcggcgattgcgcaattgtttctggagcatggtgcagaagttgccatttgccatgtggcagatcatcagaatgccgaggcgttccagaatcgcgtgcgctcgcgaggccttgaactacacgccagcgaatgcgacgtctctgatccggcggcggtaaaccgtttctgcacctgggcgcaggagcgtttggggcaggtcgacatcgtggtcaattcggccggtgtgggtggcggcgaccgtccatttgccaagaccgatgatcaggattgggatcgtatcatcgggataaatctgcgcgggacgatgctggtcactcacgcctttttcgccgggatgctcgaacgccagtatggccgcgtcatcaacgttgcttcacaactggcatacaagggcgcgccagggctggcgcattactgtgcggcgaaggccggggtggtggggtttacccgagcactggcttatgagggtgcgccacacaatgtgatggtcaacgcgattgcgccggggccggtcgataccgacttgttgcgcaatcacagcgcgcaatggcttgaggccaagaaagcacagttgccggtggggcgcttcggccaggtagatgaaatcgcacctaccgctttgctcctggcttcgagcgctggcgcattttatgccgggcaaacactgtcccccaatggcggcgatgtaatgctctga

SEQ ID NO: 339482 - DNA, 1437 bp, Pseudomonas aeruginosa
atgcaaattctggacactgttatccgtaatgcccgcgtggttacagccgctgacatttttacctgcgacatcggcattcgtgatggacaaattgtttcactggcgactgacttgcccactggattgaaagagattgacgcggcggggcggcacgttacgccggggggcgtcgatagccatgtgcacctggatcagccgaccggcgacggttctgtcatggcggacgacttctacagtggcaccgtatctgccgcctgcggtggcactaccacggtcattccctttgcctgccagcagaaaggcgagagtttgcgtgccgctgtcgaggactaccatcggcgagttggcgacaagccggtgatcgattacgcattccaccttatcgtgactgaccccacgcctgatgtgctgcaacgggagttgcccgctctgattgccgagggctatacctcgttcaagatctacatgacctacgacgcgttgaagctcggtgaccgggaaattctcgagacgctgtcggtggcacgtcgggaaggagccatggtgatgttgcatgccgagaacagcgattgcatcgcctggcttaccgagcgcctgctggctgcaggcctggacgcgccccgttatcacgccacgtcccggcccatgctggttgagcgtgaggccacgcatcgagcgattgcattggccgagttggtggatgtgccaattctgatcgtccatgtgtctggtcgtgacgcagtcgagcagattcgctgggcgcagagcaaaggcctgaaggtctacgccgagacctgtcctcagtatctgttcctgacggcggcttcgctcggatgcgacgacagttttgaaggcgcgaaatgcatctgcagcccaccaccgcgcgatcctgccaaccagcaggtcatctgggacggcctggaaaatggttcattcgaggtgttttcatcggaccatgcgccgttccggtacgaaggccacgacggtaaaaaagcccatggtgaaagcccgacgtttgaacaagtcgccaatggtattcctgggatcgaaacgcgaatggcgcttctctggtccgaaggtgttcgcaaaggccggattaccccgcagagtttcgtcgcactcacatccaccaatgccgcaaaaatgtatggtttgtacccacgcaaaggcagcgtcgcaattggcgccgatgctgacctggtcatctggaacgaaggtgagccagtacgcattaccaacgaaatgctgcaccacaatgtggattacaccccctatgaaggtatgcagttgagtgcatggccggccataacgctggcacgaggagaggtcgtttgggacggcgaaccaagaggcgccgcgggccgcgggaagtttttaccgtgccagaagcctgctcccgctcaaactcgtcgtcgcccgcatgaactgccgctatga

SEQ ID NO: 339483 - DNA, 750 bp, Pseudomonas aeruginosa
atgaacggcgcgacccaggtagcggcggcattggtccgcgcatggcgacagcggcgtaatgtgccatatgacgggcttggtttgctgactgaagccgatgcttaccaggttcaggaacttgtcgccgccgagcttggctggttcggtgactcgtcggagactgcgtggaagcttggcggcagccctggaaggctggtcagcactgcgcgcgtgccgagccactccattcatttatcgggttgggcggtccctgagggctattgcagccgtttcggcatcgaaggtgagctgatcgtgcgacttgggcgagatgtcgatggcgattccgatcatgcagcagcctatgaagcgattgatgcatggcatgtcgggatcgagctgtgtgatacccgctttcaacagggagagcaggcgcatcccttgcttcgcctggctgatcagcaactcaaccgcgcattggtgctgggcgaagcgactcagcctccggcaaactggtcgcagcaggcagtcgaggtctgggtggatgggcggctgcagatagttgatgttggaagccatcccttcactgatccactggcctcgctgccgtggttggcgaggcatgctgcatcgcagaaccggcccttgagggctggtgatctgatcgtcacaggaagctggacaggccttttttgggccccgccagtcgcaaatgtgaaaattaaatttccagaattaggagaggtattgctctcaacaggacccgcttag

SEQ ID NO: 339484 - DNA, 336 bp, Pseudomonas aeruginosa
atgattcggatcgatgccatctggcttgccaccgagcctatggacatgcgcgccggtaccgagaccgcgctggccagggtgatcgcggtgttcggtgtggcgaagccgcactgcgcatacctcttcgctaatcgccgtgccaaccgaatgaaagtcttggtgcatgacggtgtgggcatttggctggcagcgcgacgattgaaccaaggcaagtttcattggcccggcatccgtcacggatcggaagtcgaactcgataacgagcaacttcaagtcttggtactgggtttgccgtggcagcgggtcggcgcaggcagcgcgatcacagtgctttag

SEQ ID NO: 339485 - DNA, 1536 bp, Pseudomonas aeruginosa
atgacttcctcgcccaatctcgaccagatgacaccggaacagctgcgcggcttggccgaacaggctatgcagttgctgtcccaggtcgactccatgagccagaaaatccaacgcctcgaaacggtcaacgagcaactggctcatgaaatcgccatcctcaagcgacacaagttcgccaagcgcagcgagcaactgagccccgaccaaggcagtctgcttgatgatctgctcgataccgatatcgcagctatcgaagccgagctgaaggcagccaatccgccggccgcaccggccgagccacgtcataagcccaagcgtgcaccactgccgccgcagtttccgcgaaccgtgatccgtcacgaaccagagaatactcagtgcgtgtgcggctgccagcttcagcgaatcggcgaagacgtcagcgagaagctcgattacactccgggcgtgttcacagttgagcggcatgtgcgtggaaaatggacgtgtcgtcagtgtgaaacactgatccaggcgcctgtaccggcccaagtgatcgacaagggcatcccgaccgcaggcctgttggcccacgtgatggtggcgaagttcgccgaccatttaccgctgtaccggcaggagaagatttttggtcgggccggactgcccatcgcccgttcgacactggcgcaatggatcggacagaccggtgtgcagctccagcctctggtcgatgcgctgcgtgagcatgtgttggcccagggcgtgatccacgccgatgagaccccggttcagatgctcgcaccaggcgaaaagaaaacccaccgcgcttacgtgtgggcctatagcaccacgcctttctcggccctaaaggccgtggtctacgacttcagccccagccgtgccggcgaacatgcgcgtaacttcctgggcacgtggaacggtaagctggtctgcgatgacttcgccggctacaaggccagcttcgagctgggcatcaccgaaatcggctgcatggcccatgcacgccgcaaattcttcgacctgcatgcagccaataaaagccagttggcggagcaggcgcttcactcgattggcgggttgtatgaagtcgagcgacacgccaaggaaatgagcgacgaagcccgctggcgattacgtcaggaaacagcggtgcccatcgctgaaaaactgcatgagtggatgttggcccaacgcgaacttgtgcccgagggttcggccacggccaaggccctggattacagccttaaacgctgggtagcgctgacgcgctacctggaagatggtgctgtgcccatcgacaataaccagatcgagaatttgatccggccgtgggcgcttgggcgctcgaactggttatttgccgggtcgctgcgcagtggaaaaagggcggcggcaatcatgagcctgatccagtcggcgcgtatgaatgggcacgatccgtatgcctatctcaaggatgtactgatgcggcttccgacacagcgggcgagcgaaatcacgcaattactcccgcagcattggatgcttgcctga

SEQ ID NO: 339486 - DNA, 534 bp, Pseudomonas aeruginosa
atgcaactcataactgaaattgttcaccccgagctgaaatccaagcagggcagagtattccgtcgacatgcagcacgcggcatcgtgatgcggggtgagcagatcctgttgctgttcaccgagcgctataacgacttcagctttcctggaggcggccttgatgttgacgaggacattgtcacaggcctgaagcgtgagctggaggaagagactggtgcccgtgaaatacaggtgctccagcactacggttacatcgaggagtaccggtcctactggaagccacagtacgatctgatgcacatgacctcgcatttttatcaatgcgaagtagcgccccagctagagcccgtgagaatggaaagccacgaaatcgctaatggtatgcggcctgtctggatcaacctgcatgaagcaatcacgcacaatgaagccgttatgcagcggcacgagtcttcgatggggcaatcaattctgcgcgaaacctacatgctgagaaaagtcgcttccgaattgttgatgccaatcagcctttga

SEQ ID NO: 339487 - DNA, 852 bp, Pseudomonas aeruginosa
atgacccacgtaatggcatgcattgataactcacaatcctcattggcggtctgcgattacgcagcatgggcctcgcaacgactcagcgctcccctgaccttgcttcatgtgctggataaggagaagtatcctgcatccgctgatcttagcggcaatatcggtctcggtagcagagaacatctactggaagagttggccacgctggatgcgcagcgggcaaaactggccttggagcatgggcagcacatgcttgaaaaagctcgcgagcgaacagtccactctggcgccatgtcacccgatatgaagcagcgccatggccatctcgtcgagagcctgagcgatctccaagacgatattcggttactggtgattggaagagtcggtgaggacagcacgcgcagtgcccaaagtcttggcagccagattgaagcggtagtccgaactatccaccgccccatcctgattacaaccagccatttcaggaaacctgaaacggtcatggtggcatttgacggcagtgctacatgccacaagaccgtacagatgcttgcttcaagcccgctgtgtgaaggcctgccaattcatatcgtcatggttggagcggattctgaagacaaccagaacgcgctggagaaggcacgaaccacgcttgcctcttccggctcgctggtgcataccgagatccgcccaggcgaagtagagtccacactgcatgcgtatcaggcagagcacggcattgacctcttggtcatgggggcgtacgggcactcacgcatcaggcagtttctgataggtagcacgaccacgacgatgctgcgaacatccactttacccgtattgctgcttcgctga

SEQ ID NO: 339488 - DNA, 1488 bp, Pseudomonas aeruginosa
atgctgcaaaaacttagacaaacgtggttttccaacgtccgtgccgacgtgctcgcggggctggtggtcgcactcgcgctgatcccggaagccatcgccttttccatcatcgccggggtagatcccaaagtcggtctctacgcctccttctgtatctgtgctgtcatcgcctttgtcggcgggcgccccggaatgatctcggcggcgacaggcgccatggcactgctgatggttacgctggtaaaagagcatggactccagtacctgctggccgcgactctactatgtggcgtacttcaaatccttgccggctacctgaagcttggctcgttgatgcgctttgtttcacgttcggtagtcaccggcttcgtaaacgcattggcgattctgatttttatggcgcaattgcctgagctgaccaatgtcacctggcatgtctatgccatgaccgctgcgggcctgggaatcatctacctgttcccgtatgtaccgaaaatcggcaagctgattccctctccgttggtgtgcattctgacgctgactgccatcgccatttacctcggtttggatatccgcaccgtcggtgacatgggccaactgccggacacgctgccgatttttctgtggcctgaagtgccgctgaactttgaaaccctgcggatcatctttccttactccgcagcgctggcagttgtaggcctactggagtcgatgatgaccgcgaccatcgtcgacgacctgacggataccaccagcaacaaaaaccgcgagtgcaaaggccagggtgtggccaacatcgctgccggcatgcttggcggtatggcaggttgcgccatgatcggccagtcgatcatcaacgtgaaatctggcggccgcacccgtctctcgacattgtgtgccggcgttttcctgctgctgatggtggtatttcttggcgaatggctctccaaaatccctatggccgcactcgtggctgtaatgatcatggtgtccatcggcacctttagctgggattccttgcgtaatctgaaagagcatccgctgtcgaccaacctcgtcatggtggcgaccgtcgtggtcgtcgtggccactcacaatctggcttacggcgtactggtaggtgtgctgctggcctccctgttcttcgcaaacaaggtcgggcactacctggatatcaagagcactcttgaagagacgaaatcgcatcggacttaccgcgtcgtgggccaggtgttctttagctctgcggacaagttcactgaggtttttgacttcaaggaggcgctcaacaaggtcaccatcgatctcacacaggcgcatttctgggatatcaccgccgtcgcagcgctggataaggtcgtaatcaagttccgacgcgaaggagctgaggttgaagtgctcggtctcaatgaagccagcgcaacaatcgttgaccgcttcggcgtgcatgacaagcccggcgccatcgacaagctcatgagccactaa

SEQ ID NO: 339489 - DNA, 180 bp, Pseudomonas aeruginosa
atgaagctactacggatctttgccgccgtgttcatgttcgccggcatcctcgcgggctgcctggcccttctgctgctggtacttctgatggtgcgctttccaccactgctgattgccgtggtgctggcatgctggatcgtcaatcggttgctgaaatcttcacgaggagcacctcggtaa

SEQ ID NO: 339490 - DNA, 330 bp, Pseudomonas aeruginosa
atgtataccccttgcccaagctgtaattcaggacgtgtcatcacgaaaaatctcggtaaacaaacgggcggattaattggcgctgcaggcggtgcagccagtggtgccgccggtgccctgtcaggtgcggaagccggcgcggtactgggtgtagtcggtgggccggtgggcattgcgatcggcagcatcgccggggcgattttgggtggtctgtttggcggggtcgcggggggcattgccggggccacgctgggcgagcagatcgacgacaaggtgctggccaattaccaatgtctggagtgcggttacagctttagcgtcaaccgttaa

SEQ ID NO: 339491 - DNA, 1161 bp, Pseudomonas aeruginosa
atgcgagtgagaagcaatggctctaagctatggaacttcaactatcgacaccctgtgacgaagaagcggatcaacatgggactgggaaccttccccgaagtctcgttagcgcaagcacgcaagggttccgttgaagcgagggaagcacttgcccacggcatcgaccctaaagagaggcgggatgctgtgctgcaagctaaacaagctgcgactgagcacacattccagaatgtggcgacgtcctggtatgaattgaagaaggatgctgtgacgccggcctacgctgaggacatctggcgctcgctaacattgcacatattcccggacttgggctccacaccgatctcagccataagcgcaccgcaagtcatcaatctactccggccactcgaaaccaagggcagccttgaaaccgtgaagcggctgacgcagcggctcaacgagatcatgacctacggggtcaactcgggactgattcacgcgaacccactcagcggtatccgcgccgtcttcaagaaaccgaaaaagaaaaacatggcggcactcccccccgatgagctgaaagagctaatggtggcaatcgccaatgccagcataaaaagaacaacccgctgcctgatcgagtggcagctccacaccatgacccggccagccgaggcagcaaccacccgctgggcagatatcgacatcgagaagaagatctggacgattcctgcggagcgcatgaagaagcgccgtgcgcacattatcccgctcacggagcaggctcttgcacttttagaggcgatcacgccctacagtggacatcgggaatttgtgttccccgcagaccgaaaccctcgtacccactgcaacagccaaaccgccaacatggcactaaagcgcatgggttttgaagggcgcttggtaagccatgggatgcgctcaatggcgagcaccatcctcaacgagcacggctgggatcctgaattgatcgaggttgcacttgcccacgtcgataaagacgaggtacgtagcgcgtacaaccgagcagattacatagaacgcagacgccctctgatggcatggtggagcaaccacattcaggaagcggcaacaggcaacctgtcggtgtcagctaccagagaacatcaagataaaaaggtcgtctcgatacgttga

SEQ ID NO: 339492 - DNA, 693 bp, Pseudomonas aeruginosa
atgaccaccaaagcaaagaccaagaagcaaggcaccgctctcatcctcaggacctgcagcgctgatctcaccagtcacggcgggtttcagtggcccgacaagatcggagcagtagtcgaggccccggactggaagaaggacaacaggtgcggtcacggcctacatggctggctgttcggccagggcgaccatgtttgcagtagcactgtcggcgacgccgatgcgaagtggctggtggttgaggtcgtaatagctgacctgatcgccctcggcggcaaggtgaaatttcctcgctgcacagtccgtcacatcggggacaaggcaagcgcaacacagttcctgatcgcaaacgaaccacgcgcggccggagttgcagtgatcggcgccaccctacaggcaggcgataaggaactctgtcaggtaggcgcatatggcaccgccaccgccggggactggggcaccgccaccgccggggacgagggcaccgccaccgccggggactggggcaccgccaccgccgggtacaagggcaccgccaccgccggggagaaaggcgagatccgcatccgctactgggacgaaaagaccgaacggtaccgaaccgtcatcggctatatcggcgaagacggcctggagccgaacacgcactacaggctcgacgacaaccaccggttcgtgaaggtggagggttga

SEQ ID NO: 339493 - DNA, 213 bp, Pseudomonas aeruginosa
atgacacccagcgagatcattgatgccctcggcgggacaacccgtgtggcagagctgtgcgaggtgaggcctccgtcggtaagcgactggcgaaagcacggcatcccccgcgctcgactgatgttccttcgaatcgctaaacctgaagtgttcgcaaaactggaggccaaggtaaaaggccaagaaaggcaggtcggcagcagagttgcctga

SEQ ID NO: 339494 - DNA, 246 bp, Pseudomonas aeruginosa; identical to SEQ ID NO: 325388

SEQ ID NO: 339495 - DNA, 1890 bp, Pseudomonas aeruginosa
atgtttcaactcctttcctggatctctaggaagccgtcccccaccccaccaaccaaagctgccgctgggggattcctcccgcctctgagcagtatggagctgctcggcacgcctcggcgccggcagctactggagaacatctggcagcgtgcctcgctatccaagcagcaattcgaggagatctaccggcggccattggccaactatgccgagctggtccagcagctcccagcttcggaaaaccatcaccatgcccatccaggcgggatgatcgatcacggcctggagatcgtggcctatgcactgaaggtgcggcagacttacctgctcccgatcggcgcagcgccagagtcacagtcagcccaagctgaagcctggtcggccgccgcggcttatggtgccctggctcacgacataggcaagatcgtcgtcgacctgcaggttgagctgcaggacggcagcacctggcacccttggaacggaccgatcaaccagccttaccgcttcaagtacgtgaagtcccgcgaataccagctccacggcgctgcctcagcactcctcatccaccaactgcttccgcgcactgcactcgactggctcagtcgctttccagagctgtgggcccaattgatctacctgttcgctgggcagtacgagcacgccgggatcctcggcgagatcatagtgaaggcagaccaggcgtctgtggcgcaggagctcggggggaatcctgatcgagcactggccgcaccgaagcagtcgctgcagcggcaactggcggatggtcttcgcttcctggtgaaggacaagttcaagctgaatcagcctggcggcccctcggatggatggctgacccaggatgcgctctggctggtgagcaagcctgcgtccgaccagttgagggcctatctcctggcccagggcatcgaaggcgtgcccacctcaaacgcgacgttcttcaacatgctccaggaccaggccgtcatccagaccaacgccgaggacaaagccatctggacggccacggtggacaacggagccggctggaggaccaagctcaccttgctcaagattgctccggccttgatctggacagaccctgccgagcggccagccccctactccggctcgatacaaatcgagctggaggaaacctcttcggcagaggcggaaacgacttgcgctgtgcccgacgaccctgccgtaacgccctcgatgccagtttcgcaagcgaaacttcggcaacccgcgccaatcgccgcgaaaccgtcaacgaatcggcaggaggacgtagacgatttgtacgcgcttcttggtaatatcacttcgccactagaagagctagacactagccacgactcatcggctgcttctcctacgaacactcgcggggaggagaacccacagcagccattaggaaccgcggagccagcagattgcgctcccgaaacagttgaagacgcttatatgcctagcagaagcactgacctgggacagggattcgttggctggatgaaatccggtatcgcggcccgtcgcctgttcatcaacgacaccaaagccttggtgcataccgtcgacgggaccgccatgctggtcacgccaggaatcttcaagcgttatgtccaggagcacccagagctcgaaaagctggctcaggccaaggaaacgaccggttggaagctggtgcagcgcgcgttcgagaaacagggtctacaccggaagaccagtaagaacctgaacatctggaccatcaaggtatcaggtccgcgcaagacgaaagaactcaaggcctatctgctccaggatccgaccttgctgttccctgagcagcccctggacaacccaagccttaccgtcatcaacgatgctgaagggggtgcacaatga

SEQ ID NO: 339496 - DNA, 1272 bp, Pseudomonas aeruginosa
ttgaaaattgtacaaaaaataaccagcccgctcgattgtcccgccttcatcgccgcccaccgccagaatcctcaagactttacccgccgacgccagctcaccttcaagaacctcgtcctgttcctgctcaatcagccgcgcacggccctgcaaaccgaactcgatcagttctatcgcgtactcaatcaggcgtcgactgagacgcaaatggtcactgcgcaggccttctgcaaagcgcgcaaaaagctcaaccccgaggtatttgaaagtctcaatcgcctcctgcagcaacaaattgactgcttcgggctgcgtcagaagtggcgtgggctgagggtgctcgcggtggatggctcgaccgtgcatttacccctggagtcgaccatggcgaccttctttggcagtcactctggctttcccatggctcgcttgtccacactctacgaagtcgctgacggtcaaaccctgcatagcctgatcgtgcccctgaccgtcggcgagcgcgactgtgcccatctgcaccttgagcacctgccggctgacagcctgacgctgtttgaccgtggttaccctgggcactggttattcgcgctgttcgcgcagcaacagcggcactttctgatgcgcctgccctgtggctataacgcccaggtcaaagcgtttctatactctggccaagttgaagacacacagcttttcgtggccaaccatcctgaagcacgtctgttctgctccgaggctggcgttgatcctgccagccagatcgagctgagactgatccgggtcgagttggccaacggcgaaagcgaggtattgctgacctcgttgctggatcgagaagcctttcccgctgaggtgtttgccgagctttaccaccgccgctggggcatcgaaaccgatttccgtcgcctcaaacaaaccctgacgctggacaacttcagcggccgcagcgtgaccgctgtaaagcaggactttcatgccgctcaactgttgaagaacctggcgctgttgatgcagcacctgctacagccggtcatcgaacagcgccacaaaggtcgcaagctgcgatggaaagtcaacttcacccaaggcgtgtcacggctcaaaaataccctggtcgagctgctggtgcggcactgtgctcaggggctgagcaatgtgctggccttgatggctaaaagcctcagtgccgtacgctcaggccgtagctttgcgcgccaacgcaaacgcgcagccagccgaggttgtgagggctacaaaccgacgcgctga

SEQ ID NO: 339497 - DNA, 318 bp, Pseudomonas aeruginosa
atgcttaaggaaatcgctctactcctcctcactacctgccctccgggcgatgcctgcctctccactgaatttgcccggtttgtgcgggatgatgatggtttggattcctgtcagttcactcgttccgtgctggaccctctcttccaagagcgtgccaaggaacgaggtctacaggttattctgtcctgtcatccccttcggctggacgctggctcggctccctactccgctcgcttcacctacgaggagctacggcaagctatccgggagggtcgcatacaaccagatggcaaaggagactacgaatggctgaaatag

SEQ ID NO: 339498 - DNA, 423 bp, Pseudomonas aeruginosa
atggctacaactacagtctacgaacttcctctcttcacagactctacaaactatcgatattccactgccctaggcggtcagtctcttggtatccgcctatactggaatagccgtgctgctttgtggcatatggatgtgctgagggatgacgaatcccctatctattccggaattaccctagtgtctcaatacccgctgctagcggatattcccaacacagagctaccgggatacttcctgctcaagccgatcaatgttgagctaggagtatcccccactgataaactgaaggacgaccctctgtctcttgctagtgcattcaagctgttctatgtgctgcccggagagggtcagcgttatggtgatgctcctcgccccggagactgggatgagatcatccgagccttctacgaaaggcgataa

SEQ ID NO: 339499 - DNA, 426 bp, Pseudomonas aeruginosa
atgttctctacaaaaccaagcgcggacacattccgcattcgtacacccatttatcaagctaactacgctacaggccttaagcctgatgtgtggcaggctactacctgtgtagtcgctccggagtatgcccaagcattgtgggatatcctaactgaggttgaggctgaagcctccgcagccacctactacaaccgggaagacttcgaagctctcctagagcgaatggatgttgtgtatccgtacacaagcgattacctcggtgcagctctctacgctctggaggagcagactccaatcgtcggctctcattcccatagaggtagattcaatagccgtaaagacgctatgaggttccgccctgccttcttggctgaaattattgccgagttcaagaagcgggctgtaacaatcgataaggcctattaa

SEQ ID NO: 339500 - DNA, 141 bp, Pseudomonas aeruginosa
atgaagtctctacgtttcttcttcctgagcttggcagtgtctctaactgccgggttcctctattcggctcactgctcccttgaacagatcgagcaacaccaagccatctatcaagaagccaaagcaatagcccagcgctaa

SEQ ID NO: 339501 - DNA, 186 bp, Pseudomonas aeruginosa
atggctgaagttcccgcttatttcctcgatagcaacagcgacttccttagacatatctccggtggccagctaggcgatgagcctaagtgtcctaagaagagtcaagaggaattcgtcaaatggaaacaacgccagaagcaacgcagacagcaacgaatcgaccagctaaacaatcaaggagtttga

SEQ ID NO: 339502 - DNA, 201 bp, Pseudomonas aeruginosa
atgaaaacaattcctaaccttcaaactcttgtttgccaatggctgtctcagccttctccggctctactctctcagattgcagagctagaccccgaaacagcttccaagctgagtctaggtgcctccttgctccattctgtgagcatggctaacagcaccaactctcttagcgagaagctttcccgggagtggctgcactaa

SEQ ID NO: 339503 - DNA, 339 bp, Pseudomonas aeruginosa
atgaccccagcttacaaacctgtcaactaccgtacaaagaaagttgtccgcgtcaccttcgataaggacggacgagtattggcctctccgattgaagagactccagttcagaagacagcttcctacgtatctgctcaagaggctctagatattactagtagctctgcgctttacacagctaaggactctagtccccttgaactagctaaggagcttggctcctatgtgatgcaatatcagaagagccccactcctgccaacctaagacttatctccgagcattcggaagttggttacaagctagctcacgaaatcattctagctgaactccaagcctaa

SEQ ID NO: 339504 - DNA, 642 bp, Pseudomonas aeruginosa
atgcgtaagtcaaaccaccgggctgcattcgccagtgatcccaaatttctggagcggattgcaaggcagctccaaagcgagccaacatctaccctgccctcccctgctgatataaagccgatcaaggccgtccagcgcctcgaaaaagtccaaaccgccaatatggatgggaggaaagacaggattagcctggaatctacatccagggtactgaccatttgcttccccggggcgaagctggtctctctcaacaccatgctccgcgtccacgacgccaaggccacccgcctgaagaacacatggctgaaacgagtggaggcccttcgatacacctacaaggctgttctcgaggaatggatagccattgcgacctatcctctgttggtcgaggaggtatacatcacaggtgagagcagcttgctcgacccagaaagtgttaccgcggcctgcaaaccggttattgatgcacttgtttcgaatgggttcttgccggacgatgatccatcccacattgctcaccccttaccctacacctccagaggcgagtctcctggcctggtgatttgcttacgtcctgcagggcggccttggggactaatcgaagatgcaacgattcaggtggccagctcattagggcgttga

SEQ ID NO: 339505 - DNA, 222 bp, Pseudomonas aeruginosa
atgaagggtatgagcgacacggcaaaacgcttcgttgacgtcttttcgcccgcttttgagatacgcactcattgctgcgtattgctcggtgaactcctgacggaagatatcgatcaggaccggatcgacgccctcgggcatttcccgttcttgctcatgggccagtattactgcatccggctcggcacgacttgctcgagcttgttctggactgcaggctga

SEQ ID NO: 339506 - DNA, 336 bp, Pseudomonas aeruginosa
atggtcatccatctggcccatccagcggtctacgttcagctgaagctgagggagaacttcctcggcttcttcaatatagaactcagccatctccgggttgtattcaatcgccggcggggcagaaggctgctgcgcatgcttggtggtggactcttgtacatcatcgctttcagagtttcccggtttagcatgcgaaactgggttcaaattttccggctgatgactttcctgcggagcatccggttccggtttagcatgcgaaactggagtgacctgagcgacctcaacgtactcagcctcttccgccccgcaccccaatgcctggacaacctctag

SEQ ID NO: 339507 - DNA, 1650 bp, Pseudomonas aeruginosa
atgaacctgcaccagtacgccgaaacccacgaagtgaccaaccaggtaccgtcgctggatggtgccaacctctaccgcctcgacctgcctctccaggagtgggggcgtcgctaccagggcggctgggccgaggagcgcctgcagcgctacggcgagctggccggcggcccgctgatggcggccggcttcctggccaaccagcacaagccggagttccatagccacgaccgctacggcaaccgcgtcgacctggtggagttccaccccgcctaccacgagctgatgcgcgccgccatcgaacacgaactgccctcgctgccctggaccgacccgcgccccggcgcccaggtggcgcgggccgggctgtcctacctgcacagccaggcggaggccggcaccggttgcccgttgaccatgacctacgccagcgtgccggcgattcgcctgcaggcggacctggccgagaaatggctgccgaagatcctctcccgcgagtacgacccgcgcaacgtgccgatggagcagaaggcgggcgtcaccatcggcatggcgatgaccgagaagcagggcggcaccgacgtccgcgccaataccacgcgggcctacccggtggggattcccgggccggggcaggcctacgaactggtcgggcacaagtggttctgctcggcgccgatgtgcgacgccttcctcaccctggcttacaccgacaagggcctgacctgcttcctgctgccgcgccaccggccggacggcagccgcaaccagttctacatccagcgcctgaaggacaagctgggcaactggtcgaacgcctccagcgaaatcgagtatcgcggcgccctggcctggatggtcggcgaagagggccgtggcgtgccgaccatcatcgagatggtcgccatgacccgcttcgactgcatgatcggctccagcgcattgatgcgtcaggcgttgacccaggctgcccaccactgtgcctaccgcaaggtcggcgggcgggtgctggccgagcaaccgctgatgcagaacgtgctcgccgacctggccctggaaagcgaggcggcgctggccctgaccctgcgcatggggcatgccctggaccgtgcccacgacgagcaggaggagaagttcgcccgcctggtcaccgcggtgggcaagtactggatctgcaagcgtgccccggcgatgatcaacgaagcctccgaatgcatgggcggtgccggctacgtcgaggaaaccatcctgccgcggctgtaccgcgaggccccggtgaactcgatctgggaaggttccggcaacgtgcagtgcctggacgtgctgcgtgccctgtcgaaggagccgggggtgctcgacgcgctgttcgccgaactgggcgacggccatggcgacgcccgtctcgccgcgcacatcggcaacctcaaggcggccttcgccgacaccgccgacatccagtaccgcgcccgccagctcaccgaggacgtggcgatcgccttgcaggccaagctgttgctggaagccggcaactccgcggtgtccgacgccttcatcggcagtcgcctgggggacggcgggcgggtctacggcaccctcccgcgcggcgtcgaggtcgaggcgctgttggctcgcgccaccccgcacctggcctga

SEQ ID NO: 339508 - DNA, 1704 bp, Pseudomonas aeruginosa
atggaaaacaccctcaagacgttcaaggcccaacaggcgagcgcactgacattgctcgacaggctgcaagactttctcgggcaaggcgcacaggccggaataccgattgattctgcgttgatcggcaagctgcagaatgtcatcagtggtatgtctggtgaaaaactcaaagtcgctctgattggaggcttttccgaaggtaagacctctatcgcggcggcctggatggagaagctggataagaccagcatgaagattagccatcaggagtcctccaatgaggtgaaagtctacgaggtcggcgaagacttcgtgctgatcgacacccctgggttgttcggcttcaaggagcaggaaaatgccgaaacgcacagcctcgaaaagtacaaggacattaccaagaagtacgtgagcgaatcgcacctggtgctttacgtgatgaactcgaccaaccctatcaaggaaagccacaaggatgacctgacctggttgttccgcactctgggcctactgccccgcacagtgttcgtcctcagccgcttcgatgaggtggccgatgtagaggacgagcaggactaccagtccaacctgcaggtcaaacgcgacaacgtggtaggtcgacttcgtgaacagatcggactgaccgacaaggaggcgaccgagctgtccattgtcgccgtcgccgccaaccccttcgacctgggtgtcgaacactggctggccaacctcgagcaattcaaagagttgtcgcatatcgaaaccttgcagacggctaccacaggcaagatccagcagaacggaggcagcgtcgcgctggccaacgaaatgcgcgccagcgtgatccgtgacgtgctcaacaaccaactgcctgttgccatcgagaacgatgagaaggttgcacaggaggttggccggcttgacgagctcaacacgcgtctggtcaaacagctggcagtgactgggcagcaaatcgaagatgcacgcatcaacctacgcaactttgccacacgctacttctctgacctgattcttcaagccaagggttccagcctggaaaccttcggtgactttttcgagcgagaaattggcgcagaaggcattatcgtgtccactcgcctgcagaacgagttcagccgtcaaacccagtcgatcacgcttgaggtcgagaaaatgcaggttggcttcgacagtgaggtcaaccacttcaataccaccgtcaaggcgctgggcaaacaaggcatcaaccatgtgctcaaaggcaacttgatcaacaacaccacggtactggccgcgcgcgatggcctgacgacgattgccaagacggtgggcatggatatcggcaagtacctgaagttcaagccatggggcgccgtgaagtttgccaaaggagcaaacggagcacttgcctttatcggggtagcgcttgaagcctgggatagctgggaacaatacaaacgcgaagaagcgttcaagaagactgtcgttgaaatagtcagtaatttcgagaagcagcgtcaggacttccttgacctggtcaactccgaacgcttcaaagagcagttcttccccgactacttgctgctcaacacacgtcgacaagagctgcaggccaatgtggatgaaagccgtttacgtcaacagcgcttccaagcctggcgcgttgaggccgaagccatcgacgcagaattcaagagattgaactga

SEQ ID NO: 339509 - DNA, 3246 bp, Pseudomonas aeruginosa
atgcctcaaccattccgtttccagagtgcacggcccgccggctccagcgccacagaagctaacatcttcatccacggctacagcgccgggcatagcgatgaggacaagcagcttctgctcgacaagatccccgagcagctaaagcactacaccaacattttcgcgttctggccttcgaatcatatcttccggttcgacaaatcttcgctctggaaaattggttcagctggtctaggtgccggagccacgttcatcggcgcgcccatgggttctctaggacttgtgggcactctcgcccgagaccggatgggtaacttcactcaggctcgcgcacgcgcggaaagcatgggtacggtattactcgaccaacttcaggactacctgaacagccaccatccacagatcaagaccatcaacctgatcggccactcgctcggcggccgactggtcatcagcagtctgaaaagcttttcgagcaggcaacagttgatcatcaacgatgtactgctgatggcggcagccgtcgaggtcaccgctatcgaggcacgcaaaatgcgcggcgcacttcagggccgattgatcaatgcctattcgaaggcagacaagaccctgctgctgaacgtgggtgaatcttgcctagggcgtaacgaagccgagcacttcgagagcatcgagatgaatgacttcggccacaccgattactgggagcggctgcccgaagtactgaccaaatcacgcttcaaagcgtgcttaccgccctccccagagcccactcaatcatccgctccagaaaaaaagccaacccgcgcgcccaaacaacccgccaaagcaaacacgatgaaactcgaactgaacagcccacgtgacgtttaccagcaaatcaatgatgaactggcactgatcattgctgaactgcgacacccttcggaggacgaggccttgaaccaggcccgagaagaggcgctccagcgcctcaacgaacatcgcacagccctttacgagcggctcgccgaacttgagaagaacgccgagtggaacacattcaccattgcattctacggagagaccggcgcgggcaagtcgaccctaatcgaaaccttgcgcattctgctacaagagcccggcaagcgggccagccagcaagcattccgcaagttgcgcgagcagtatgggatgaccgaagaaaaactgcaccagctgcaacaggacatcaagcaaaccgaagcgcaacttgacgaactgatgcagcaactgagtgccacaatgcggcagttcgaacaacccttcagtgaagcccagagcgcactcgaccaagctgatgcccgatccagcgaattgcatcaacaacttgggacggagttcgaacaacacgagcaggcgcataaggatgccctcgcggccgttaccaggctgcatgcgcttctcgccacacgcaaaagcaccgcctctctctggcagaagctcttgagtctgttcaggaagatgcccgaagaaatcgagctgaacaaggtcaccgcctcactggccgagaccactcaggcacgcgacaacgccgcagctatcctaaacgccgaacaacagaagacccgccaagaacgccttgcgctagagcggcaactggattcggtaactgcggcgcgcgacgacgccagtgcggcacttgccgcccaacaggcacaggcagcccaacagcaacagacgctcgttcagcagcgcctggaaagtgagagccagctggcagacctggttggacagctacagctgcatgccgatggtgaaatcatcggtgacggccgtgccgactatacccgagagacacagcgctacgagttcgagctagacggccagccattcgcactgctggatgtaccaggtatcgagggcaaggaaggcctggtactcgagcagatagaacgtgcagtgcagacggctcatgcagtgttctatgtcactaaccagccagcaccgcctcaaacgggcgatgggcaacaccaaggcacactggagaagatcaagcagcacctgggggcgcaaaccgaagtctgggccattttcaacaagaagatcaccagccccaggcattctttgggcaacagaccgctggtttccgatgacgaaagcatcagccttgctgggctgaacgagaagatgggcgagcagcttggcaaacactatcaggaggtgtttccactaagcgcgctgccggcattcctcgcctccaccgaccatcttgcgccaggctcgcagaatgccaaacgtcgcatcaaagcgcttgaggacttcggcgccgacgagttgctggaaaagtcccgtctgcgtgccttcctgcaactgcttggtgaccggttgatccttaacggcaaggccaaaatcgtccgggccaacttcaacaaggccaatgatgcgctcaaccagaccaccacgacactttcaggcgtgcaacaaaccctgagcgccctgtcgagaaagctctctcaggaagagcaaagtgccaaaagtcagctgagcagtagctaccaagcgctgaaaaaacggctggaagcgtgcggcgaaaccttgatcgatgacttcgccagcaacgtgcgcaacagcgtctacaaacagatcgaagcaaatatcagcaacgacgcgttcaaaagcgccctgaccgaggagcttgaaacccagcaaaaactgctgggcaagcagctaccggcggcggtgaactcagaggtcggcaaattccagaaggcggccgaagatattctcaaacgcttcgaaaaacatgcccaggaactgactgcgagctatgcaaagctgggcagcatgcgcttcaacgagcatttcaacctcaacataaaaatcgataacggcatcaacgtgatcgggctactggccagtcttgcggggatcgctgcggcaccatttactggcggggccagtctctggttcgtcggcgcctcggtacttgccgcactagtctcggtcggtaaagccatttttagcgcgctcagctcggactacaaaaagtcccaacaacgtctggcccttgataagaatctgcgcagcgctaccgagcaactgcgcgaaacactacacgcaagcctggacgctgccctaaacgatatgcaggaaacgatcgagcaactcgaccacgcactggaagcacctgccaaacaggctgcaaaccaggtgaacacgctgactcgctcgaccaaccgcctgaaaatcctctcccgccaaatcgaaatcgcaggaaacctgtaa

SEQ ID NO: 339510 - DNA, 681 bp, Pseudomonas aeruginosa
ttgaaaaaagcacaaaacagacttggatggatagaaaaagacaacccaaacatgctgaagtgggccatccgatacctaaacaaccacagagcaaatattcccgagcaaaccacctacgacgggcttataagggaatctgagaaatggcctgaaagcagtgaaatacgagagcttttaagaaaaatgaaaggcgcctggcgccaaaagaaactgagagaaagcctaaatgggaaaaagcccagcaacttcatactttcgacttcagcaaaaaaatgcctggaaaatttagccaaatcaagacgcagcaacataactgaaacactggaatggttaattaaaaatggacttgaagtaaaaagccaataccgcgaccaactcaacgaattaaacaagtcccaccgcaaacaactcgacagttatcaagtagcagctgtcactctcactgaaaaactaagcgaagccctaaccgaaagctgcaaattaacgcttcaaattgaaacactaaccccttccccagaaagtctcccaaccccacaaaaggaccagatcgaaaaacttttcagaaagaaaaaatcaacactcttgaaatcaaatacaatcatcaaaagagacgccatacgaacacacgaaagacagatacaaccaacaacccattaccttgagcaggagcaggagcaatga

SEQ ID NO: 339511 - DNA, 1353 bp, Pseudomonas aeruginosa
atgcactgcgttctgttggggatggaattggctgggatcagccctgagacgaagcttgtccttgtaaggttcgtgcagctgtacgggctgtgggagtcgatcacaatcggggttaaggagttagccaaggcctcaggtgctacggatcgtgtggtatctagcgctctggctgaattggtggccgaagatcttttgatacgcacacctatcgtctgcgggcggggacgccccaagagtgggtatcgggcgtcaagtaagttgtctaggttgttagaagacgaaaacaaaaagctcaatgtgataaatagaccgagaattgatcacgtactgaacccttctgcggaaaattgtaagggtggcttgagtgtttgtaatcggttgctactgtccactctgcttctatacgccgatcaatttgggattgtacggggaatcggagtatccaggttgtcccaggctactggtctgaatcgagatcgaataaaggcccaggtgcacaagctgatcgctctgagggtcatgagaggggtgattccgggtgttgcaacatctgttgtattgggcgtttcaaagtcagtttactttattaattttcatcatgggttttttcaaaaaggtagttcgggagcgatcgtgctaactttcgtctcgaaatccagtggggattcgggggagatgagtgaggttgcagccatcattggctctgcggggcttggcaaagggctggaattcgagaggcataaaaagttttctggaatactgcctgatagcgatagatttaatgcgctggcggggttgttttcttctttagccaaggatagaagctcgtcgagggcgcttcaggttagattggaggagtacgcgtcagggctactgtccaagcattggaaagccttggaactaggtcagtttaattctgatgatgaattgcaactgcgaatcaagaaagatttcagtaaaggaacgggcacagggcgagatttcaaggatgatgtccttcgaagcgagctgttttttgagttcgtttatgtagtcgctgttttgatggctcggcgtgtgcagagtttggttttaagtgctaagggttttgcgtacgaaattgccgggttgcagatcctgccgagttttgagcccggtacatactttgggcggtttgctgttggccggtctctgttgattgttcctggtaatagttttcgagcaggagagtgctatgtcatgaatgagagcaatcttggcgagcctacgtgtgagaggttttcaagtgaggaggagatgcctgagattgaccgttatcgttttggccttctttttcaggttcatactcccacgcgctatcggtatcgggggtaa

SEQ ID NO: 339512 - DNA, 669 bp, Pseudomonas aeruginosa
atgcgtcgtttttcagagaaccgtaatcttcgtttgtactcagcagatacttttcagggcctgccgataatgggtgaaaaaggcccttttatacttggataccttgaagccctgagtcgcaccatcaaacttgcacttgatcagtatcctagggtgattgcgttcagggtggacctgcgtcttccgcgttttgggggtattccggatgatgcgttgtcaaaccgtgtgattagtaggttcatcgagtcgttcaaagcaaaaattgagcacaatcgtgagaaagcacgtgagcagaacaagtacgcccatgactgcagggtacgttacgtatgggcgagagagaggagcgaggcagggcgacagcattaccacctgctgatcctgctcaacagggacgcctactacacaatcgggcggttgcagccacagaggccgaacatgatcagccgcatgcaggaggcttgggccagtgcgttgaagtgcgaggttgagcaagtgaggggcttggtacatatcccgtctaatgcggaataccgagtagaccgggaggtccggccagggaatgtggattacttacctgatctgtttcatcgtgccagctacctttgtaaagctgcgacgaagcgttatggggagggcgctcatggcttcggattcagccgaggatag

SEQ ID NO: 339513 - DNA, 648 bp, Pseudomonas aeruginosa
atggaccatcaagcactcaaagcccgtcaccgccaggaacgtgaaggccaccatcccaacctcaccttgcgcgttcatcgcgcattaagctggctgaatcgcgccgagcaggcggatgatcttgatgggcgctttatctttctgtggatcgccttcaactctgcctatgccacggacattgatgagcagttccgactttccgagcagtccacgttcaaggcgttcctggacaaactctgtgcgctagacacagccaacctgatcgagaacctggtctggtccgagttctcaggcagtatccgcgcattgctggacaacccctacgtatttcagagtttctgggacaaccagaacggcaagatcagcgagcaacagtggaccgagcggtttgccagcggtcgacgagcagcgcagcaagcgttagccaaccgcaataccccagcagtactcggtgttctgttcaatcgaatctatacattgcgtaaccaggtaatgcatgggggcgcaacctggaacagcagtgtgaaccgggatcaactgcgcgactgctcgaacctcctcggcaagctggtgcctgtgattattttgctgatgttggataacccggaaacgctatggggtgatgcttgttatccggttgttgcttag

SEQ ID NO: 339514 - DNA, 1482 bp, Pseudomonas aeruginosa
atgaagcgtgaacagttcctggcacaacccgaagtggaatctttcgttgcatggctggcagccaacttgccggcgctcacgttcaagctgcgcttcaagtccagcaagtttgtacctggcggtttgacggttgaagtccaggggattgagcgggtacttgagcactatcgctggaaggcaagctggcacgactccaaccagagtgtggttgagtctgaaacctgggctgaaacccaacgctctttggggaaactgcgtgagtggctgacgagtgcggtcaacgctggtgatgagcaacaagcgcttcaggcgtgtttgcagattcttcgttggggcggcgtgcggggcgccattccgttcttgcaccggttggaggccaaagacgagttgtcgggctacctgaaaaagatggccggactcatgacgctcgacggtgacaatgacctggatgacctcgacgctagcagtgtcgagcgtttcgattctggcctgaccaagattcacgccttgctcgatttgtctggttctccaatctatgacagccgtgtgggcgctgcgattgccatgttgtattcgctgtttcgccagcagtgggcggggcgtggtaaacccttgctgatgttcccgtccggcggcgcgcgaggcagccagatccgcaacccaggagcgttcttgaacagcgtggcggcgccgcagttttcgacgatcgactatgccgagtgggcgcgttggcaagtgcgcttgggctggattattcgagcgctgctcgagcgtaccaattggtttgctgggcaagggactctccccgcgcgttgccatgccttcgaggccagcctgttcatgcttggctatgaccttcgctgctttggtctggcgctggcgtctaattccatagcgggtaagccagaagtcgaggcgcaggactgcgagcgtggaggcaataattgggtgcccacggggcatcctttcagccaggttctcaaggattatctggccttccgctacagcggtgctctcgataacaaaacctcgtttgttgaatggctggtggcccagccgcgtgacgagaagccgctcacgcgtaccacagcacagggctactgtttcccgttttccattgaagagttcgacttgttcggccgaccgcttgcacagcttgagcgcatcgttgccggtggtgaggacggattgcgtgcggccctggctaccgaggccctcgagccgttcacagtcggtgatgagcgcgtcagtgtctgcttggtggatgtgttgatcacgggcaacgcgtatgcgcgagcgacgaccgacaaggatcgtgtcgactacatcgtgagtgccggctatgccggtaccgagaactctgcaaggacactcatggccctggggcgtaacgtgggcacacacttcggcctgcttgatgcgcagcactcgccaacgagtctgttcgagcagttttaccaggactgctcgctcgacgcctga

SEQ ID NO: 339515 - DNA, 3411 bp, Pseudomonas aeruginosa
atgcaaacccggaacggcgttcagttgtattccgcctcagacatctgtggttttctggagtgccagcacctaacggcactggaccttcagcatcttgttgcccctatggaaaaagcgccggcaagcgagcagaaccgcctgatccagggcaaggggctcgctcatgaagcgacgtttcttgaacgactcaaacgcgaaaatgctcacgtagtcgacattgccgagggcaatccgagtttcgcgcggcgggtggaactgaccattgaggccatgaaggctggtgcggacatcatcttccaggcttcgctccaggaaggtgcctttattgggcatgccgacttcctgcgtaaggtgccgcgggcgtcgacgctgggcgatcatagctatgaggtgatcgacaccaagctggccaagtctgcaaaggccaagttccttgtacaggttgcgctttactcgcgaatgctgattgcgatccagggcatacagccgcagttcatgtatgtcgtactgggtgattctgcgcgtacggagcaggcgtttcgggtcgctgactacgccgattatctggagcaagtgctgcagcgtttcacggcgttcgtgaacagtcacggacaacctgtgacgtacccggagccatgcgggcattgcgggttttgtgtgtggcgcgatcgctgtgacgaacaacggctgcaagacgatcacctctcggcagtcgccggcatcagccgatcgcaaatcaagaaattgcaggctggtggtgtgaccacattgcagcagttggcgaacagtaccgatgacttgcgcatccccaagttgcaagtggagtcgctgggcaagttgcgccatcaggcacgtttgcagttccaggggcgctccagcgatggcccgttgttcgagtttctgccggtcgtggggaagaggcggggttttaaccgaatgcccacggcggttgagggcgatctgttcttcgacatggagggcaatccgctggaggagggcggcctggaatatctcttcggtctgtatatcgacgaaggtggccagcaatccttcaaacctttctgggcccatagccgagaggcagaaaagatcgcgttcgagcagttcatcgactgggtcatcgctcacctcaagcgttaccccagcgcacatatctaccactatgccagctatgaagagacggccatcaagcgcctgatgagccagcacggtacacgcgaggcacaagtggactggttgctgcgcaacggcaagctgatcgacctctacaaggttgtgcgcgaagcgatccgggtgtctgagcccagctactcgatcaagaacatcgagcatttttacatggggcagcgagacggcgacgttaccaatgccggtgcgagcatcgtgttttatgagcgttggaaagagactggcgagtcggcgttgctcaagcagatcgagcggtacaacgaagacgacgtgctatccacctatcttctgcgcaactggcttttgagcattaaaccgtcggatgcgagcgctctctccgagcctgaaacagaaagcgagaaagctgtagcggaacaaaaggagattgaggttcgtctggaaagctatcgcgatcgtttgctcgctggcttgcccgccgccgaatgtgccctgagcgaagcggatcaagtcaggttgctcaccttccagctgctcgacttccaccgtcgggcagacaagccgacatggtggcagttgttcagccgtcaggacatgaccactgaggagctgctggaggatatcgagagcctggccggtttgcggcgtacaaaaacgccgcccgaaccgatcaagaaatcatttctgtttgaatacagtttcgaacctcaagaaagcaagatgcgcacgggttcccaaggcgtcatcaccgagtccctggccaatgtgcagttggttaacctggacagtaacgcgtgtctggcgatgttcaaagccaccgcgaacaaagcgccaccggatgacttcgacatgattcccggcaggccgattccatcgacttcgctgcgcgaggcactgtttcgctatgccgacagcgtcctggccggtgagcagcgcttccaggcggtgtcggactttctccatcgatgcgctccgcgggtgaaagacgtccagccgggtgcgccactactggatccacgcctgacgacgacggatgccatcaagcaggtggtacgcaatcttgagaacagcgtgctgtttattcaagggccgccgggtgccggcaagacctacacgggctcgcacgtgattgttgacctgctcaaagcaggcaagcgcatcggtgtgacctccaattcgcactatgccatcaacaacctgttgtctgctgttgagtctcgtgcacaagcagagggcgttgcattcaaggggttgaaaaagtcatcggagggagagggcactgagttcactggttgctgcattcgctccatcgaagacaaaaaggatttccttgatgcctgggggccgggaattgacctgactgcgggtactgcctggctatttgccgacgagaccttcaccgaggcgttggattacctcttcatcgacgaggccggtcaagtgagcgtggcgaacctggttaccatgggcattgcggcacgcaacatcgtcttgatgggcgaccagatgcaattgtcgcaaccagtgcaaggcgtgcaccctggccgttccggtgactctatcctcgattatctgctggatggcacgcccaccattgcgcctgatcgtggggtgtttctggcgcaaacctggcggatgcatccgcacgtttgctcattcatttctcatgcggtgtacgaaggtcaactgtcgtcggcaccaggaaccgagcggcaggtgttgcgactggatggccagcggccagatgtaccgggcagcggactgatgttttgctctgtggagcacgacggcaacggccagagttccgatgaagaagccgcgtacatcaaagcgctgtacacgtactttctgcagcagcgctatgtggataacaccggcgaggagcacgctgtgtctctcgaaaacatcctggtcgtggcgccctataatttgcaggtacagctgttgaagcaggtgctgccggcgggtgcgcgcgtcggcactgtggataagtttcaggggcaagaggcagagattgtcatcgtctcgatggcgacgtcgaatgaagactacctgcccagggacatcggcttcctgtactcgaaaaaccgtttgaatgtagcggtcagccgggcgaagtcgctagcttgtattgtcgccagtcctgatctgacggccattcgttgccagacgccgcaagacatgaacttggtcaacggcttgtgcatggcggtcaggtacggaacgctcgacgaaacccgtcaataccaagaggttttgctatga

SEQ ID NO: 339516 - DNA, 213 bp, Pseudomonas aeruginosa
atgtgtaatgaccaaggggatggtcactcggatgacccaggtcccgcgcaagttagaaccgaggatgaggtcgaatacagcgaggaattcgccgccatgatcctggagcaggaggcgaagggctgctttcaggaaattgatgtcgatgacatgctcgctctgctcgaccgcatgatcatcgaggcccaaggcgtggggcggaaactacagtga

SEQ ID NO: 339517 - DNA, 876 bp, Pseudomonas aeruginosa
atgaaacgcaagcaatctgttgaacaggtacgctgggacctggcacttcgctatcgtttgatcgagaccgttgcctggtgggaaggcaggctgaccacggggcacttgatgcagagctttggcatcagccgccagcaggcatccaaggacatcaatacctacatcaccgagcatgcgcccaaaaacttgacatatgacaagcagctcaaggggtatgtgccgagcaagcagttcaaacccctgttcatcgacgacagtgccagcgcctatttgcacctgctctatcagaacaatgagcgtgccccgcacattgatggattggcactggcctatgcgcacaccaaggtgttggaagtgcccgatcgccccattcgaccggagattctgcgccccttgctcaaggcctgccgcgaaggcctgcgcctggaaaccgagtacgtgtcgttcaataccccgaacgtagaggttcgcctcatcgcccctcacacgctggtgtacaccggcatgcgctggcatgtgcgggcctactgcgaaaagaatggccagtaccgcgacttcgtgctaagccgtctgcgcgggcagccggacctgctagacgaatcgccgaatacacgggagctggatgaagactggaatgtcgagattccggttatcttcgagcccgatgggcgattgaacgaggcgcagaaggcaatcatcgaaaccgacttcgggatgacgcaaggacaattggtggtgcccagccgcagggccttggtgaagtatgtgttgcagcgttatcagatcgacccgcgcaacctggcgacgagccctgaagcccagcaagttgtagtgagcaacctcaaggaattgaggccgtggctgatgaatgactga

SEQ ID NO: 339518 - DNA, 258 bp, Pseudomonas aeruginosa
atgactatgtctgaagcggtttcgacaggggcgttggtgttgatcggggtgatcctgacggtgctcctgatgcagtacctgaggttgcgagaaatctggcacgtggcgcttgcctgccgccaggacgcacgttgggcgcggatctgggagatggaaaaccgggagctacgttcggcactgcgtgctgagaaagcgcacatcgagcagttgcaaagcaagctggtgattttgcagaacttgatctctgcagagcgataa

SEQ ID NO: 339519 - DNA, 1053 bp, Pseudomonas aeruginosa
atgaacagacttgaacggatcaaaggctgcctgctgggtggtgctgtcggagacgcgcttggcgcccccgtggagtttcttgagtggcctgccatcgaagccaagttcggtccgcagggcatcattgattttgccccggcttacggcaacaccggcgccatcagcgacgaaacgcagatgatgctgttcaccgcagaaggtttgctgcgcgcttttgtgcttggcagtttacggcaggcgtgccatgtcccgagcattgttcaccaagcgttgctgcgctggctgatgacccaggattacccctctgcgataccgatcgtcacagatggctggctgatcaagcaagtcgaactctggtctcgtcgctccccaggcacaacttgcctgaatgcactaaaggccagcgcgcggttgggagcggttgccgagaacaacagcaagggctgcggcgccttggtacgtgttgcaccctgtgcattctttgccaatgcatttgactacgcggcgcagtctggacgcctgacgcacgggcatccgacgggctacctggcggcagggctattcgccgacattcttcagcgtgttgtcgaaagacaagacagcctggaacacgcggtaactcaaagcttggccaaatatgggcaagtacctggtatggaagaaacgcgcagcctcatcgagcgcgtgctgtttttctactacgagggctatacacccaccccgcaacgcattggcgaccttggcggtgggtgggttgccgagcaggcgctggcgattggactgtggtgtgcgctgacagcacgatcactcgaagaaggggtgatcacggcggtgaatcacagtggcgatagcaacagcacagggcttgtcgccgggcacttgttgggtgcccagtatggtgctgctgccattcctgcccgctggttcgaacgcctggaactgcgccaggtgatcgtgcaggtagccgaggatcttgagcgtgttccacgtgattactgcgggttgggtggcgcgttcgacgagcagatcgaattggcttatccgggcagttga

SEQ ID NO: 339520 - DNA, 255 bp, Pseudomonas aeruginosa
atgtacgcctattcgtccacgcgcaagaaagactacccctccagcggcctggcgttcgagcagttcctgcactcgatcaaccgtaaagtggatgtagtcggtaaggttaacagcaagctcgataccgtattcgatgcctacaagcaggccatccaggccgatattgcgcaactggaaggccgcaagggcgagttcaatgcgttcaagctcgatgcgctggaaataggcggaacggcgctgtttgacagaaattga

SEQ ID NO: 339521 - DNA, 435 bp, Pseudomonas aeruginosa
gtgttgagcagagggagcccgctgtggcatcccaccctccagcaaggacgagcagcgaagtctccacacgcactgagccgatggtgtatcaaccgctgcctgttccgttatgttgataaccactgcgctgacccggagctgttcggcaacctgtgcatcatcgatacgcccggctacaatccgggtaccacgggtggggccgcagcctccgaccgtagcactgcagcctccctggtcaatcaggcctcggcgctggtctgggtcatcggccttgacccggccgggaccatcgaccagtccgacatcgagtccacgccgttccgcgcagagtcgctgtatatcgtgttgaacaaggcggatgtgaagtctcaggacgatattcttgagatcatgcagcaagtagccgacgacctgagtttcgcgggtatcgagtag

SEQ ID NO: 339522 - DNA, 1572 bp, Pseudomonas aeruginosa
atggatcatggtggcttcatcgatctagtaatgggttattctccaagtcggcgggttctggtggcttacgacaggagatggctcgaaaaacgtatggaaaaggggaaaggatccccctccgttcaggtgagtgaacaggacatccaagcagcgcttgtcgaagggatgcatcacattactaagagcggggtcgctttcggaacagccaacattttgaccctcaaaccagagttttttcccgagtatctaaccaaccacaatgcattgctatcaggtgcgatgggggcagccagggtgtccgacactaacgtaaatggcaatgtctcactttggcagttctgtctagacagagggtttcactttgagccagacctgttggcaaggtatgtcgcctccattgccgccaagccgttcgtgatccttgctggagtcagcggcacggggaaatcaaagatggcagagttggtagctgaattttactctgtgtcaaggaccactcgaacggctacatcggtggtctctgacccagaggttggaaatgagtttgttttcgtagccggtagtgtcgagcccgagagagatcgttttgccctggttcctgttaggccagactggatcgataatcagtcgattatgggcttcgtgaaccccatttcgggtcgatacgagtccacgttggctctagaccttatgcttagagcctctgcttctctggaagagtctactgtcaaagcagcggcgccgcgctttttcatgctccttgacgaaatgaacctagcgcgtgtagagcactatttcagcgattggttggcgtgctcggaaagcaggcggctccagccggacggaacgatcagccagcaaccgatcccattgcatcgtcacgctgaagcaaaagccagcttacttggtgggggcgatagcgactcctcggatattagcgttccgagcgcgcttgccataccgactaatctaatcgtgacgggcacggtgaacgtcgatgaaacaacttttggtttcagtcccaaggtactggaccgctcgatggtcattgaattcaatgacgttgatttggatggcatgcgccgcggtattgctgcgactgaagaacatggctaccgcttcccggacacgcttccgctcttccggctggccacaaccgagacatttcaggctctgccgcaagagacgcacgatcatctagttgcaatcaatcggataatggaaagagcccagcttcactttggctatagatccgccgctgaaatcagccttttcatggagatctataaccgtattcttcccgaggatgatgaagacactatgatgctaagggcgctggacggtgctcttctgcagaaggtccttccgcgtattcagggtaaccgcgcacggctggaggcaaccctttgcacgcttctctggtatctgcgcgacttatccatgccgggccccgcccaggatactcgaacgatcacgcgcgaggacgtcgctaggctgccgaactcgtacagccggggatttgaaatgctggagcgcttgcgggaattcggctttgtgaccttcttcaagtga

SEQ ID NO: 339523 - DNA, 1581 bp, Pseudomonas aeruginosa
gtgactaagatagcatttatctatcgacctcgacgcggcaaggaggcggcccaggcatttgccggtgatgtggtcgtcttgttggagaatgtcgagtacgttatcgagttcccggagccccgctcctccttggaggtcggggcgctggttgaagtcggctatgaccccattactgacaggacaggcgttctagcctttaaaaactttgtggggacggccttcctggctggtgttaagcttcgagtgatttcaaccaaactcggcgacagcggagtttctggcttgcttgaggaggtttcccgtttatcctcaagtttggtgtttggctggcgatcgccctcgggattttccgcagccgcatctggcgaacaacagccgtccgttccgtttcaccagttgcagcttcttcgggatgtcatcattaggcgggagccagggcagcgcttacaggatttctttgcaatcgtagagcggagccccactcggaggtttttgcttgagcggccggtagtgcccattgagcgggcacgaaatttcgattcacgctctgtcacggacatattcactcatcctgaacggctcgttgcggtacgccgctttgacgctgtttccggcagtccgttggctcaggcgctcgggatcggtgagcccccagttgagcactacccaactagagtatcgatatcatcacggcgcctgtcctatgacactcccgagaaccgctttatcaagcactttatcggagagtgtttggtcatcgtttaccggtttcttgatgaatccaatattcatgcccagatgcgagcagattgccgggtaatggcctccatcctagaggccgccgtaagatcaccatttctctctgaggtaggagttctaacggcattcgctggtcctacccaggcactcggtaaaggggatggctacaaggatatactggacctttggttgcaactgggagtgcaccaggcattgcccggtgcggagggtgaggttgagcgatttatacaaggcaaagatatcgcgctgttatacgaatattgggtatttctcaaggtgctacaagccgtttgtgcggcaactgggagttcatccagagaagtggcggtttcgcgcaatgacttgggcgaaggccttgctcgtagccttacagtgtcgctgtcggacggtgtaagcgttgccttcaatccgtcctacacccggtcggcaggctctgcctactctacccctctacgccctgacgttgttgttatcctgaatggggctcgctacgctttcgatgcgaagtaccgcctggagtggttaccttcactagaagattcgcaggatgaagatgcaacattcgtccgcgccgacctctacaaaatgcacacgtacagggatgcgatctcggacttgaaggcagctttcattgtttatccaggcagcgagttcatgttttatgagaggggcggaggccgacgacaaagccctggagggattgcggtatttgacggtgttggcgccattccggcgaggccggaaggcgctgattcatcgacgttaatggacttggtgcaggtgctagtcgatcaaggatag

SEQ ID NO: 339524 - DNA, 303 bp, Pseudomonas aeruginosa
atgaaactcctcaacacctatgacgaccgtgatgaagccgaagatgcagcggagaagctgactggcaacaagcgcctagccagtgagcgcgatggtactgttgtgatttacaacctattcggtatccctagctgggggaatttccttcgccttggaatgtataacttagatgagttaaaagcactcctggaccgccgtgacagttggcaagcgactcatcaggcacgccacgctgagattatcgcaacgctgcagacggtggcgaagaattacggagtgggtattccaaagcactggctttaa

SEQ ID NO: 339525 - DNA, 498 bp, Pseudomonas aeruginosa
atgaaatatcacaagctcaaagccggtgaagcgagtggcacctacgtcatggagtcccccgtcaccgaggccgacatcctgcagatggcgcaacaactggccatgagtcgtctgtctaaaggccgggcactgactgagccgaagcaggtgttcagtcacctgcaaacactgctgcagtaccacgagtatgaagtctttgccctagtgctgctcgactccaaacaccgggtcataggctttagagaactgttcagaggtacgctggatggggctagcgtgtacccacgagaagtggtcaagatcgccttggagcacaacgctgcggccatcattatggtgcacaatcacccctccggcgacccagaacccagccaagccgatcatacgctgaccaccaccctcaagaacgctctgaacatggtcggcattcgcatcctggatcatgtggtggtgggccatgacggttgtgtctcgttggctgagcgagggtacctgtaa

SEQ ID NO: 339526 - DNA, 915 bp, Pseudomonas aeruginosa
atgctcaaaggtttagcaatcactccgccggtactcgggcgcatttccatcggtaaggtcgtcgagaaaaacggcaagcgcctgcccgagaaagatgatcagttcaccatcacctcgcaagtccagagccgtgacggctggttactgcatccactcaatgaggaactgcgcaatggccaggatggcaagctgcgcagcattccgatccgattgctgttcaacgaaccggacctcaactttcgcgcggactacagcctgttcgaccgtaccaccggcagaccgctatgcgtcggcaacggtgaaacgtgcaagcgtttgaccaaggacggcattcagtcgctgccctgcccttcacccgatggctgcccaatggcccaaggcaatgcctgtaagccttacggtcggctgaacgtggtgattggcgatgacgacccactgggcagttttgtcttccggaccactggattcaacagcatccgcaccttggcagcgcgcctgcattacctgcaagccatctctggcaatcgcctggcctgcctgccattggatctgcgtctgcgtggcaaatccacccgtcagagccacggcacgccgatattctacgtcgatatcacggtgcgcagtggactgcccctagaagaggccttgctcgccgccaagcaactggagaaaacccggcaagcctcgggctttgaccagagctccttggatcacgcagcccggcaaggttttaacaatggcgcgtttgaagacagcgaggaggacagtggcgccattgtcgaagagttctttcccgctgctgaaaccccacccagcaacgcagaggccaaaccggcggcgccgtcaaagccctcactggctcagaagctggaggctcaggctatcgagcccagcactaggccttccgttcagtaa

SEQ ID NO: 339527 - DNA, 1005 bp, Pseudomonas aeruginosa
atgaaagcaacgtcattgaacggcagcaccggcaagaaacgccctgccctgcgcctggtcagcaccaaggagctgccgcgcgaggactggctgcagatccgcaagcagggcatcggcagttcggatgccgcctctgcggtgggactgaatccctacaagtcgcagttggagctgtggctagagaagaccggtcgcgatgctgggctaccgaaggccgatcctcacgatgaggaaagcccgctgtactggggcaatgtgctggagcccatcgtggcttggcactacagcaagcgcagccaacacaaggttcgacggatcaacgctgtactacagcatcccgatccggcgctcccctggatgctcgccaatatcgaccgcgaggtgataggtgccgacgatgttcagatccttgaatgcaagactgccggcataaacggggcacgcctctggaaagagggcgtgcccgaatatgtgcaattacaagtcatgcaccagctcgcagtcactggcaagcaggccgctgatgtggccgtgctgctcggtggccagcatctggaaatccatcgcatcacacgcgacgaggcgctgattgctcgactgattgacctagaacggctgttctgggattacgtcgtcagcgacacccctccaccggcagatggcacagcgtctgcggaagcggcattgcgctgcctctaccccgaggataacggacagaccctggacttcagccagcacacggcgctgaccagcaccttcctggaactcaagtctgttcgtcagcacattgctcagcaggaaacgcgtgaggcgcagctcaagcaggttctgcagcaggctatgggggaagccacccgtgcagagtttgccgagggctacatcagctggaagaaatccaaggacagcattggtctggatgtcgaacagatgctcaaagacaagccctacctgcaggttcgctaccccaaggccaaagcaggcactcgtcgcttcctgctcgcctga

SEQ ID NO: 339528 - DNA, 969 bp, Pseudomonas aeruginosa
atggctcatcaaatcgaacaaatggcttatgttgggactaccccctggcacggcctgggcaacaatctgccgcgtaaacaatccattgaagtctggcagcgcgaagccggtatgaactggcaaatcttggaaagccctgtgcacttcaagtcggatgccgtcggccacctgggggccattcactccttccctgaacaaaaggtcctctaccgctcagacaccaaggcaccgttgtcggtggtttcccagcgctatcacacggtacaacctcgggaggtcttggaattctaccgcgacctgaccgaggtctccggctacgagctggaaacagccggcgtgctcaagggcggtcgtaagttctgggcgctggcgcgtaccgggcaaggcgctgcgctcaagggcgacgaccaggtcaatggctacctgctgctggccacgtcctgcgacggcaccctggccaccacggccacgcccaccacggtgcgggtggtgtgcaacaacaccctggctatcgccctggacggcaccagccgcgcgatcaaggtgccgcacaacacccgtttcgatcccaaggtggtgaagaagcagctcggcatcgccgcctcgcaatgggacgacttcatgtaccgcatgcgcgtgctggccgagcgcaaggttcagtggcatgaggccctgggcttcttcatgaacgtgctgtgcgagaccagcccgaccggcgccttgccggagcaactgcccaacgagcgcgccctgcgcaaggtccaggagctgtacgaaggccgtggtcgcggtagccagctggactcggcgcgcggcaccgcctggggcctgctcaacgccgtgaccgaatacgtcgaccacgagcgccgtgcgcgcagcaacgagtaccgcatggactcggcctggttcggccaaggcgcgcagatcaagcaacgcgccctggatgccgcgctgcagctcgccgcttaa

SEQ ID NO: 339529 - DNA, 192 bp, Pseudomonas aeruginosa
gtgcccgcattccaggcactggtaattgttcaacactctctcatcgatttgagagccaatcgctgcaccagctaccgctccggtggcgccacctacgagccctccgaagatggctccggtaataccgcccagggcaatgccgacagggccggcaaaagcaccgaaagtcgcgccagcctcggcacctactag

SEQ ID NO: 339530 - DNA, 378 bp, Pseudomonas aeruginosa
atgggcaaccgggatctgatgataataagcagcaaggctagcagccaacgtcgtggctgtatcgccatggacaagaacgatatcgggcttgaactgagagaaaacgtctttcattccttgcagaatggcaacagttacatcagtcagatcctgccccgaacgcatgatattgagatcgaagtcagggacgatcttgaagagattcaagacttggtcaagcatctcacgatgctggccggtaacgcataccctcgcctcgaaacgatcatcgtccgccaatgccagggttaccggggccattttgatagcctccggccgcgtaccaaacacacaaagagtcttctttcgcattaccgccccattcgacaatatctataa

SEQ ID NO: 339531 - DNA, 504 bp, Pseudomonas aeruginosa
atgttgaagaaagtgaaggatcaaatcgccgtccagtggggacggttgaccgattggctcgacgtactcgagcgccgttggaaatcgtactggttgaagaaggtcgcatccgcagcagcattcgctatggtcgctggcttcaccttgctggccctatacggcccggccgtatcactgagctatctcgtgacggccggtggtctattgctggtggcgctgagcctgctcgtgcgattcaaattcctgcaggatctagcgactctcgcaggcgtcgcgctagccgcctggtggtacgtgcagtcactacctggcgtcttcaatcccgtccaacaagtgttcttcgatgctgagcccgaatcttctggcttttacgttctacctcaagtcaacaaggacaaactaacctttgttgaggcttgcaaattcgaatcagcgacttcgacgatgagctgtaaagtccgggttgtgcccaaggttgagaaccgaaaggcagacaactcctga

SEQ ID NO: 339532 - DNA, 699 bp, Pseudomonas aeruginosa; identical to SEQ ID NO: 325233

SEQ ID NO: 339533 - DNA, 294 bp, Pseudomonas aeruginosa
atgcatttcgattccgttaccggctgggtccgtggcgtccgccactgcccttcaccgaatttcaacctgcgtccgcaaggggacgcggtgtcgctgctggtcatccacaatatcagcctgccgccgggacagttcggcaccggcaaggtccaggcgttcttccagaatcgtctggacccgaacgaacatccctatttcgaggagatccgccacctgacggtttccgcgcatttcctcatcgaacgcgacggcgccatcgtaagcttccccgatccgcagacaccccataagtag

SEQ ID NO: 339534 - DNA, 1443 bp, Pseudomonas aeruginosa
atgtccgctgatgcttatcacgctccgaaaacttcgccgcgcctggaaaccctggatgtgctcagcataggcatgagcctggatgtgtttcgccagggccaggtatggaaggccttgcaggagcagaatgcggtgcaggccgaggccttgcatgtcggcagcatcctgccgatggacccgaagaagtatccgacgtctgcggatgacaaggatatggcgtatgaaaagcgccaagcggacgccctggaactggggctgaaaaactttctggagaaatggccgataccaacggtgacggtggtgcgtagttgggatccgagcactcctaacctacgcttcactccggaggagacgcgggaaagcctgtcagtaaaagtcaatgatctccgtgttccggctggactgcattggcatcggattgccaatttgcaggatggcattatctgtaacgatacgcctgaaggagtactggaggcgttgttcagtttgttcgaacgcaacccagacttgccagcagtgttggtgtacgccaacgaaggcttcaatatggccggttccttatcgagtcgggatgtacctttaaaatcattagggggaggttctggcccacgtgtaccggggaccttgacagacaccatggtcgccctgatcgtcggccgccccgagcgggtcgactggctacgccagttcgccccctacaccaaggtcaacgaaaaccggatcgaccccgagttccgtggctggggctggcgcaagccgccggtggagttccgccccacgccgttcattccccagccctggaccgagcgggctctggagcagtgggatgcgttgccggtgctggccaggctgcatcggccggtgagtgtgccgctgacccgcccggataccggcgaacggctcaagcgcgaagctctcaccgcacaactggccgctgcctggaagacggccagtgccgggctcaggccggcgcccgcccggctgttctacgacggcgggttgaacgccacgccgctggccgaactcaccccggcgctgggcgccgcgcagagttcgctggacttgctggactcgcgggaaagctacgacctgacccagcgcctgggcgacaccggcgcggcctcgcccttcgttggcatcgccctggcgaccatggccagctacctcaacggcgacagcagcatggtgatgccgttgcggcgcaaggaccaggcgaccctgatcggcatcagctcgccgacgcctgggaagaagcccgctcacgacccgttcggcgtcgacctgctgccgcagaccgccagcggcgacggtccgccgccatcggccgacccggtggcgcccgccagtcggctcacgacccggttgccgcccggcgaagactatgccctggaagagttcctgagcagcctcaaacccagcaccgactggcaggacgatttgtag

SEQ ID NO: 339535 - DNA, 954 bp, Pseudomonas aeruginosa; identical to SEQ ID NO: 325134

SEQ ID NO: 339536 - DNA, 312 bp, Pseudomonas aeruginosa
atgcctcgcaggtacaagaggatgctgcagatcatcgcagatgtgattttggtatggctatcgctctggctagccttcctggtcaggctgggcacggaagacatgatcagccccttcgagggccatgcctggctgttcatcgccgccccgttggtggccattcccctgttcatccgcttcggcatgtaccgggcggtgatgcgctacctaggcaacgacgcccttatcgcgatcgccaaggccgtcaccatttccgcgctggtcctgtcgttgctggtctattggtaccgctccccgccggcggtggcgtaa

SEQ ID NO: 339537 - DNA, 246 bp, Pseudomonas aeruginosa
atgtgcccaagtgaaccccctgacgctctgaaggcgcacaagctggctgagctgcgctcggtcttggccctcgcggtgcaggaaccgcacgcggacttgcgcatctggtggcagggtgtgttgcatgggcgcctgttggagctggaggcggccggggtacttagcgccaaggacagcgccgcgtttgccgccctgatgcaacaggcgttcacctcgcccttgccgcccgccaatgaccccgcgtga

SEQ ID NO: 339538 - DNA, 243 bp, Pseudomonas aeruginosa
atgtttccgaaagagatcaaggcagagcgggagtttctggaaggcggccgattcgctttcaacctgcgtcacgacgccctgggcgagttggggaggatcgtgttgcaacctgcgcagctcggcggcagccacgtctcctacgaagtcatcgacttgcctgatggccgcttcgatcagcgcaaggcaatgatggaagcgctggccaagatcgtcacgactgcgtttgaaaagaccggtcgctag

SEQ ID NO: 339539 - DNA, 828 bp, Pseudomonas aeruginosa
atggccatgcgggaactcatgcgggagcgggtgcgaacagcagtaaccagcatcctgagtggccacaagaccggtgcagaccggcgattcataggccgttacgttcagcaggccatgctgggcggattgagaattgcgcccgtgatgccgctctacggcttggtggtctgggccatagccgactacgaggatttacgccacttcctggtcacggcgaccagcgccgagatgagccatgcagtgttgtcgctgatcgctgcgggcttcttcatgggtggcttcattcaggtggtgatcgacgcgactacacccgacctggccgcacgcggggtcaacatggatcaactcgaacggcgggacagcgaagtgtggttctgggctcagcagccggaaggccgcgagttggccattcgcgaagtcacgactgcccgttgctcgccaaacgcggatgtccgttgggccatggatgatctgatcaaggagcttgagcggcccgagaaccaggtcggctctgatctactcgaccacaaggtaatgaagttgcttggcatccagtcgcaggcgctgaagcctacgcagaggctggacgatgccaagcgtctgctcacgctgcgctatcggggcatgccatctcgatacgaatggaacgccaagactgaagagctagcatcaggcttcagggctttcatcaccgtgcgtgtaccagcgaaaaccacagacacggagccgcagccctggcagcgctgcctggtcacggatgggccatctgaggctctggccgttaccatcgccgcgatgacgcgcgaaacctggacattcactacctga

SEQ ID NO: 339540 - DNA, 273 bp, Pseudomonas aeruginosa
atggccgcaacagctaaaacccgatccgtcaccgcccacgtccctgtagagctggccgaacgtgttgatgagattgccgagcgcctggagcgctccaagaactggatcgtcaagcaagccctgtccgcctggatcgaccaggaagaagagcgcagccgcctgacccgcgaggctctggccgatgtggatgccggccgcgtgatcgaccatcaggccgtccaggcctgggccgacagcctgagcacagacaccccgctgccggtaccgcactga

SEQ ID NO: 339541 - DNA, 585 bp, Pseudomonas aeruginosa
atgaaccgcattcaagaggctcttgctcagctgcgctacgagcaatccccgcatgtgcggcacaagcatgatctgctccagaccatccgccactttgccagtgcggcaagtgacgccgaactggtgagccaagccggacaggagatcgagcgcctgatctgccgcagcacgctcccgcccggcaccctgaaggctggttctattcagcccgcctactggcagaccgccgattggcgcaagctgggccgcttccacgtcatgaatgcctacggccgctcagcgtgcggtggtggcatggatctgatcgagcatgaagccatcgacgccagcctggtgccagacgccaaccgctgccgacgtgccggctgcaaagagacctggccaaccgagggagcgacggccgcgtcgctcaatgtcgagcagctcgaaaacctgctgggcgagttgtaccaggtgctcggtgcgctggacgcgcccgaggcggtactcgaccaggtggttgctgctctagagggtggcccctcccccacgaaagcctgctgccgtttgcagcacaggagtaactattatggccgcaacagctaa

SEQ ID NO: 339542 - DNA, 450 bp, Pseudomonas aeruginosa
atgagcgcgtcaccgtttctgaaataccgcgacatggtgttgggctactacggcacggccggttggttgcgcagggtgatcatggccatgtggaacggcaacgactacaagacggggctttcccaaatcactggtctggacgcccagcattaccaggcgttcagtgagatggtcgcgcactttcgccagtatggagaaagtgactcggctttcatggcgctggccaacgacatcctcgctcggatggccgaagaacaagcagctgctgaccgcgaagtcgcgctggatgcctggctggacgacgttagggatcattcccaactgacgcgccgcgcgaccgagaatgcgatagatgaccatcacggttggctcactcgccagttcgatgatggcgtctcggcggaacaggccacgcgcctcctggagcgcaaaatccaggagaccacatga

SEQ ID NO: 339543 - DNA, 270 bp, Pseudomonas aeruginosa
atgaagagcaacgctcacgtcaaatcgttttcccgagcccttgcccaaaccctgttggacttcaaggactcagtggagaagggcgataaatccggggctaatttggagtacgcctttgccctcggtctgatcggtggcgcaaccctcagcggagccattggaaaggacgaaggtgcaaggcttcaagcgaaactggatgaaactcgccaagcattgatgagtgcctttggcgaggcgccgagtgccgccagccactttatggacaactga

SEQ ID NO: 339544 - DNA, 771 bp, Pseudomonas aeruginosa
atgaaccaccccagcccgttgaccctacaggatgacaaccgacgcgactccgtctgggaacgcgccgcgaactatgagaaggaagagcgcccgatgcgctcggtgagcaagatcgtggtcaagggtgcggtggacgtggtgtttttccgcgcgcctgcggcgcacctggtcgttgccggcgagaaccaggaggctattcgcagcgtcaagactcgcttcgacggcaacaaactggtcatcgagcaggaaggggtgtccatcagcggcgcaggcggcagcatccatgtgtcgggctccggcaacatcgtggccggtggcaccatctatgtaggcggacgccggggcggcgtcaccatgcagttcaatggcccggtcggcagtgtcgtcgtcgggcaaggccgctgcatcgttggcatcgcgttgccggaagcccccggcatccgcatcaagggtagcggcgacgtgaccttgtatgacctccggcagtccgtgctcgatgtcggcatccagggctctggcgatatcacagccttcggccaggtcgagcacttggacgccgaggtggccggttcgggtgatgtggacgccagtgagttggtggccatgtctgccgaactgtcggtggctggttcaggcgacatcgacgcctatgtcacccagtcggtgaaagcccgtgttgcgggttccggtgacatcgtggtacgcggtaatccgccgatccgcgatcattccgttgccggctccggcgacatcaagttcaagaagaaatga

SEQ ID NO: 339545 - DNA, 843 bp, Pseudomonas aeruginosa
atgacctattcgagcaagctctcctcgcattatctggaactcgcggaacagccgatttcaaaggatgtctttgcgggtgaggatgtgcgtttttccagcgaatacgaggcgctggaaaatgagctgggcaaggcgctctcgctccatgagaacggccagaccgactggttgaaaatcctggaaaacagcgaagcgctgcttagtgcccaatccaaggacctgcgtgttgcagcctggttgacctgggccctctaccaacgggaatcctttcccggtttgctggccggactgggattgctggaacgtctgtgcagccggcattgggtcgagatccatccgctcaaggcgcgcactcgcgccgcggccattgcctggctggtgccccggctggagcaggcgctgaacgagaacgtaccgatcaaggagcaactccccctgttccggcgtctcgccgagcacctggaaaaactcgataccgcgctgaccgcgcaactgggcgacgacgcgcccttgttgctgccgatcagccgacgcctttcgggcatgctccagcgcgccgccgacaaccagcccgaacctggcgtggtcggcgccgtggtggcccaggtcaagcaggcggccagccagttgctggcgccgggtgcgcccatcgacaacgagcgcgacgcccacaaggccatgcgcgcccagcaggaggccgcacgccccctgtgcgcctggtggctgaagcagaaagccaccgatctgcgcgcgctgcgcctcaaccggacgatgctctggctgcccatcgagtccatgcccgagcgcaatgccgaacaggtcaccgcgctaaggggagcgtaa

SEQ ID NO: 339546 - DNA, 981 bp, Pseudomonas aeruginosa
atgaagcagatgaccttcgccgacgccgagtacgccggcaagcgcaagcagacccgcaaggaactgttcctgatcgaaatggaacaggtggtgccgtggcagggcctgatcgccctgatcgagccgcactacccgaagggtgaaggcggtcgtcccgcctatccgctgatggcgatgctgcgcgtgcatctgttgcagaactggttcggctacagcgacccggcgatggaggaagcgctgtacgagacgaccatcctgcgccagttcgccgggctgagcctggagcgtatccccgacgaaaccaccatcctcaacttccgtcgcctgctggagcgccacgagctggcggccgggattctggcggtgatcaatggctacctgggcgaccgtggcctgtcgctgcgccagggcaccatcgtcgacgccacgctgatccatgcgccgagctcgaccaagaacaaggacggcaagcgcgatcccgagatgcaccagaccaagaagggcaaccagtactacttcggcatgaaggcgcacatcggcgccgacagcgaatccggcctggtacacagcgtggtgggcacggcggccaacgtggccgatgtcacccaggtggacaagctgctgcacggcgaagagaacctggtcagcggcgatgccggctataccggcgtcgagaagcgtgccgagcatgcaggccgctcggtcatctggcagattgcggcgcggcgcagcacttaccagcaactgagcaagcgcagcccgctgtacaaggccaagcgcaaaatcgagaaggccaaggcgcaggtacgtgccaaggtcgaacatccattccgggtgatcaagcgccagtttggttacaccaaggtgcgcttccgtggcctggccaagaacaccgcacaactgattacgctgtttgcgctgtcgaatctgtggatggcgcggcggcatttactcgcgaacacaggagaggtgcgcctgtaa

SEQ ID NO: 339547 - DNA, 981 bp, Pseudomonas aeruginosa
atgagccagatgagcttttccgactttgagtacgccggcaagcgcaagcaaacccgccgagagcgcttcctcgccgaaatggatcaggtggtgccctgggcaggcctgctggagctgatcgaaccgttctaccccaaggccggcggcggtagaaaaccctatcctctggaaaccatgctgcgcatccatctgttgcagaactggttctccctgagcgacccggccatggaagaagcgctctacgaaatcacgcccatgcgccagttcgcacgcctgacgctgagcgcgccaatccccgaagacaccacgatcatgaacttccggcacttgctggagaagcatcagctcgcaccggcaatccttgcggtcatcaatggttatctgcaggaaaaaggcctgtcgctgcgccaaggcaccatcgtcgatgccaccattattcatgcccccagctcgaccaaaaataaagaaggcaagcgtgatcccgagatgcaccagaccaagaaaggcggtcagtatttcttcgggatgaaggcgcacatcggtgccgatgtcgagtccggcctggtgcatcacgtccatggcaccgctgccaatgtggccgatgtcacgcaggtggctgaactgctgcatggcgaagaaaacgccgtgtatgcagatgccggttacaccggtgtcgaaaggcgcgaagagcatgaaaatcggggggtgatctggcagattgcagcgcgtcgcagcacctattccaagctgaaccagcgcagcgtactgtacaaagccaagcgcaagatcgagttctgcaaggctcagacacgggccaaggtcgagcatccgtttcgcgtgatcaagcggcagtttggttacgtgaaagtacgttttcgtgggctgatgaaaaacacggctcagttgaccacgctgttcgccctggcaaacctgtggagggttcgaaaacagctcatgggtatgggtgaggttcgcgtttaa

SEQ ID NO: 339548 - DNA, 279 bp, Pseudomonas aeruginosa
atgagtcgtcagcgttaccccgaagagttcaagatcgaagcggtcaagcaagtgaccgagaaaggcaaacccgtcgccgatgtcgcccagcgcctgggcatgtccgtacatagcctttacgcctggatcaaggtctacaccaagccccaagagcagcgtcagcaagacgacgatcagcaggccgaattgcgcaagctacgcgctgaactcaagcgcgtgactgaagagcgagacatcttaaaaaaggccgccgcgtactttgccaaggagtgcggctga

SEQ ID NO: 339549 - DNA, 156 bp, Pseudomonas aeruginosa
atgcgagaacttgaagtgatgatcggcctgggattcctgctcctgatggtcggttacagccggcgggaacgggacagtggtgtgctggtgatggccgcagggatagtggttatgttggctaccattagttacaaaatctacattgagctgaggtaa

SEQ ID NO: 339550 - DNA, 477 bp, Pseudomonas aeruginosa
atggccgacgcgctggcgtgtggccgccgcttccggaccttcaacgtggtcgacgacttcaaccgcgaggcgctgcacatcgaggtcgacacctcgatctcgtccacgcgcctggtccgcatcttcgagcagctcaagcgcgaccacggcctgccgcaggtcctgcgtaccgacaacggcccggagttcctgggcgaggccttcgtgcagtgggccaagctcaacggcatggccatccggtacatccagcccggcaagcccaaccagaacgcctacatcgaacgcttcaatcggaccttccgcgaggaggtcctggaccagcacctgttcacccgcctcgacgacgtgcgcgaggccgcgtactggtggatgctcgagtacaacgaggagcgtccccacgattcgctcggcgatctgaccccggccgagtaccgccaacgcgtcgccggaagttctacttttgaaatgcctgcttga

SEQ ID NO: 339551 - DNA, 1230 bp, Pseudomonas aeruginosa
gtggcagaaaatagtgatgcttatgacggcgatgattttgagaccgtatggcgttggtttatctatagaaaaattgcctctctaatacaagaaggcagctcaccattccagaataacgaattgctcaatacgtttgttgcattggtcacttctgaagcagatgctaaggcagagaaatctggacttatgcgattggtgcctaatatccgaaaaggtacggttgaaataagccagtcgccgaagttaggtttggagtttgattgggatgactctggtcgagcaaaggttaatttcaacgacctcgtacgtagagccgatcaagccttccagaaattagagcctgatgcaagacggttgaacgttttttttgacgagctcgagctgaattacgctagcaacaagcagtaccagcgtgatgctcgcttagttagggatctgattgtctcgattgagcgattgaacgcgacttgtaagtcgagaggctatccaatctgcctctatgcagccatcagatcagaagtcttgagtgctgtggacgcattgggaaaggaaatcaataagccgattgctgacttcgggtctgtaatatcatggaatagacccgggcttgatgccacacagcagccgctattgaatattatctggcagcgcataaacaatgcgcgcgagaaagcaggacttgtagacttatcatctcaagagttgtggagtcagtatttcccacgaaaaataaataatcaaaatccgcaagtctacattcttcataattcatggtatcgtcctcgtgatgtagtgcgcttgctaattactgtgcaagaccaatatccagatgatgaaactttttctttgcaagctctcgaagctatacgcaaagcgtattccactgcatcttgggtagagctcgcagaagaactgaaggcaaaatataaggctgctgaagttgaagggattaaatatcttttctatggatacaaacaaatagctacatttgctgagttaagtgagagggcagatcttgtagtgctggaacatgatgaaacgaaaaagctgctggagcgagtttcacttcgtgaggtgctaaaggatcttttccgtgttggaattatagggaatatagatgagaaccatgaaaggatgcgtttttccttcaggggtgatgatgagattctcttccagaataaagtctttgttcataatgcattaaaggctcatttgtcatgctttggatga

SEQ ID NO: 339552 - DNA, 222 bp, Pseudomonas aeruginosa
atgagcaagccattcgatatggagctgttcttagctggcgtgctgatcggatcgcgcgcgacgcggcaacgtcatttgcggcaggcgaagcttatccaagctgagattgcagatcgctggcagcgagagacgccttgggcctggcaaaaaaacacttatcttggtttcttgaacatcgcctatgtagacacagtgaggcgacgcgatattactacgcactga

SEQ ID NO: 339553 - DNA, 981 bp, Pseudomonas aeruginosa
atggcattggtgggtagacgcgatggtcgtaatttcggttacggcagacaattgagctacgcaggcccgcaagcgctgaaagacacgttcggtggcggtcattacggcacggtcaaagcacactgtgatcggtggcaggcattcgtcagatggtgccgttccgaacaggggccgggtatcaatgatgcgcggcagattgatcggaaggtgttggccgactatgcagcatatctgcgcgacacggttgagcgcggtgacctcgccgtcagcaccgcgcaaaatcggctttccagcgtcaacaggaccatggcggcgcttcgcggtgatcagtacgtgaagttacgaagtccgagcaaggcactgggcatgcagcgcaccgggattcgccagtcggtgccgcaaggccaagaccgcgaacaggttaaacagattgtcgatgcgctttgccgtgatcatcagcagcgggtcgccgcgattgttctgttgacgcgcgccaccggcatgcgcttgcgtgaagccatcttggctgacctgccacggctaagccgtgaggctaacgatctaggcgagataaacattcaggatggcaccaaaggtggccgcgcgggtgcctcagcgccacgttggattgcggtggatgaccatattcgaggtgcgcttggatttgcacggcagatgtcgcctacaggtagcagcaacctaatagcgccacatgaaagctatctgaatgttctgcaagaaatcattcgccccgcgcgggccatcctgcatgcacacaacctcagaggcttccatgagctccgtgcggcgtacgcatgtgagcgctatgagcaaatcacccagcaccgggcgcctatcaacggcggccaatgttgcctggtagatagataccttgatcgtgaagctcggaggcagatcagcagtgagctagggcacggtcggatcgatgtggtcgcggcatacattggaggacggacatga

SEQ ID NO: 339554 - DNA, 732 bp, Pseudomonas aeruginosa; identical to SEQ ID NO: 318303

SEQ ID NO: 339555 - DNA, 306 bp, Pseudomonas aeruginosa; identical to SEQ ID NO: 318302

SEQ ID NO: 339556 - DNA, 750 bp, Pseudomonas aeruginosa
atgagcgaccgccatttcgacgaactggcgacgcgcttcgccgaaaagatctatggcggcgccaagggtgcgatccgcctcgcggtactccaggccgacctcgccgaggccctcccggagcgacctctgcgggtcctcgacatcggcgccgggctcggccacatgtcgctctggctggccgctcgcggccaccgcgtaaccctcgccgagccagcgcaacccatgctcgacggcgcccgccagcgcttcgccgaagccgggcaggccgccgaattcatccaggcgccctggcaggaactgctcggccagctcaccgagccctacgacctggtgctctgccacgccgtgctcgagtggctggccgaaccccatgcgatcctgccggtgctgcaccaactctgcgcacccggcggctggctgtcgctggccttctacaatcgcgacgcgctgatctaccgcaacctgctcaagggccacttccgcaagctgcgcaaggaacgcttcgctggcgaggggcagagcctgaccccgcagcgcccgctcgacccgcgcgagctggaacaggcgctggcagcgcgttggcgcatcgaggcgcgcagcggcgtgcgggtgttccacgactacatgccgagcgagttccaggccaaggccgaacggctcgacctggtggaaatggaactggcctaccgccgccacccggcctttgccgggcttggccgctacctgcactggctgtgccgcccgcaatga

SEQ ID NO: 339557 - DNA, 621 bp, Pseudomonas aeruginosa
atgcaatcgcgactgttgatcctgccgttactcgccagcctggccgccctcggtgcctgccagggcgacaatccctaccgtgccagctccctgccctacccgccgcagccggccgccgcggccaatcccggcctcgatcccggggcctatccggcggcgccgcgcgactacgcccgctaccgtagctggagctgggccgccgccggggtcagcggctttccccagggcctggacgacaaccagttgcgcgacgccgtcagccagcagctcgaccagcgcggcctgcgcccggcgcggccgggcagcgcggccgacctgcaggtcagcgcgttcctgcgcaacgaactgcgcacccgccaggtcaccgactactacggcggctactacggcaactacggcggctggcgcgatccctggtacggctatggcgccagctacccggtgacccgcagctacaccgtgcaggtcaccgtggtccgcgtcgagctgaacgacgcccgcagcggccagccggtgtggggcaacagcgccgagttcgactccggcgactccgccagcgaacaggccaaggccctgcgcgaagcggtgaaacgggcgctgtcgagctacccgccgggctga

SEQ ID NO: 339558 - DNA, 936 bp, Pseudomonas aeruginosa
atgaatcgaagtattgcgatcctgctgctgggcctgtcgctgaccggctgcgtcgaggcacgctcggtggtaccggcggatggcccgggcccgctgctggtggcccatcgcgccggcaccgcggactacccggagaacaccctgctggcgatccgcaaggcgctggacaacggcgccgacgcgctatggttgtcggtgcagttgagcgccgatggccatccggtgctctatcgccccgctgacctggcggtcctgacccagggcgccggcgcggtcggccagtcgagcctggccgagctggcgcgcttgaacgccggctatatgttcaaggccgaggacggcagctatccctaccgccagaagccgctgcggattcctacgctgcgccaggcgctgcgggcgatcccgccgcaggtgccggtgttcctcgacatgaagtcgctgccggtggagccgctggtcgatgccgtggccggcgagctggagcggcagaaggcctggtcgcgggtgcgtttctattccaccgagaaggccgccaacgactacctgacgcagcgctacgcggaccgcgcgcgacagttcgaaagccgcgatgcgacgcgcaaccgcctggtcggcctggccttcggcgagcgctgcgaggcaccgccggccggcggcacctggatgggcatcgagctgcgccgcgaactgacggtgaccgagcgcttcacccttggtgagtcctcctacaaggtgccggcggcgcagttgtggacgcgcaaagcgatggactgcgtgcgccgcgagccggtgaaggtggtgatgttcggcatcgagaccgccgaggactaccgcaccgcgcgcgccctgggcgccgacgcggtgatgagcaactcgcccaggaagatggaggcgatccgccgccgggtgctcgccgatcagcccggcgggtag

SEQ ID NO: 339559 - DNA, 564 bp, Pseudomonas aeruginosa
atgatccgccgaatcctgctgctcggcctgctcctcagcctcgcagcctgcgaaaccacccagctcgaccgcgacttcgacagctcccgcgacttcgccgcctaccgtagctggagctggtcgcaacccgccttcgaataccgccccgacgacccacgcatcaagagcgacctcaccgagcaacgcatccgcgaagccgtcgcccagcagctcgaccagcgcggcctgcgtccggcccagggcaacgccaggggcgacgtcacggtgcgcgcctacctgatcgtcgacgatcgccaggaccagatcaccaccaactacggcggcggttactggggcggctactggggaggatactggggcggcccggcgatggccgagacgcgcaccgtgaattacaaggttgccaccctccaggtcgacctgttcgacggcaaggacggcaaactggtctggcgcggcagcggcgagcagatcatgcgcaccagcccgccgagcccggccgagcgcgagcaggcgatccgcgagacggtgcagaaagtcatgtcgcaatacccgccgcgctga

SEQ ID NO: 339560 - DNA, 483 bp, Pseudomonas aeruginosa
atgcagctcagccaccgcccggcggagaccggtgacctggagacggtcgccggcttcccccaggaccgcgacgaactcttctattgctaccccaaggcgatctggccgttcagcgtcgcccaactggccgccgccatcgccgaacgtcgcggcagcaccgtggccgtgcacgacggacaggtggtcggcttcgccaacttctaccagtggcagcacggcgacttctgcgccctcggcaacatgatggtggcgcccgccgcgcgcggcctgggcgtggcccgctacctgatcggggtcatggaaaacctcgcccgcgaacagtacaaagcgcgcctgatgaaaatttcctgcttcaacgccaacgccgccggactgctgctctatacccagctcggctaccagccgcgcgccatcgccgaacgccacgatccggacggccggcgcgtggcgctgatccagatggacaagccccttgaaccctga

SEQ ID NO: 339561 - DNA, 378 bp, Pseudomonas aeruginosa
ttgaaccctgacacccacgcccagcgcgtcctcatcatcgtctccagcggcccgagcaccccggcccgctgcgccgcgcccttccacaccgccaccctgctggcctgcatggacgccgaggtgaccctgttcctcagcggcgaaggcgtgcagttggcccgccgcgccgtcgccgaccagttgcgcgcgctggacggcggcgagccgctgcgccacttcatccgccaggcccgcgaggccggcgcgcgcctgctgatgtgccgccaacccggggtgaacatcgacgaaagcgaactgatcgaggaactcgacgaaatctccagcggcggcgaactggcacggctgatcctcgaatccgagcgggtgctgaccctatga

SEQ ID NO: 339562 - DNA, 468 bp, Pseudomonas aeruginosa
atgagcgcgaacctgcacggcctggaattccccgacgggctgttctacgccccggactacaacctgtggctgcgcgaggaagtcgacggcagcctgaccctgggcctgagcgcctacggctgcgcgttgtatggcgaaatcttcgccttcacccccaagcgcgacggctggcacatcgaacgcgaccgcagcttcggcgtggtcgagttcgccaaggctgcctcctcggcccgcagcccgttggccgggaccctgctggcgagcaacccggcggtggtcaagcgcccggcgctgatcaaccgggattgctacggcgagggctggatggtgcggctgcaaccggacgactgggcctcggcgcggggagcgtttctccagggagacgcggcgcgggaggcattcgccgagcgcatgcgcctggatgggttcgatccgcagcatccaggggtgcaggcgctggacttctga

SEQ ID NO: 339563 - DNA, 729 bp, Pseudomonas aeruginosa
atgtcctcaccccaaccgccccgcttcgacggccaacgctggagcaacgccgacgacgaccgcatcgaggtgctgcccgccgaccccgcctggccacaacgcttcgccgccgaagccgaggccatccgcacggcactggcgctgcccgggctgggcatcgagcatgtcggcagcaccgcggtgcccgggctcgacgccaagccgatcatcgacatcctcctgctgccgccgcccggccacgatccgcagcggctggtagccccgctggagggcctcggctaccagttctggcgcgagaacccgaacacccagcggatgttcttcgtcaaaggcatgccgcccttcggccatggccgcacccaccatgtccatgtcatgcccctggcccaggccgaccgctacctgctgttccgcgactggctgcgcaaccaccccgacgacgcccacctctacgccgaaaccaagcacgccctggcccgccgctaccccaccgaccgcgaggcctatacccgtggcaaggacgaggtcgtcgcaaggattctcggccgggcgctggcggcgacgcggcacccaatgatacagagtggcctggtaaggggagaacgcgaaatgcacgccagggaactgcgtgaaacgctggtcgccggcgcggaatcgacgccaggcggccccgccgatacagcctatttcgagttgctgcgcagccgggtaagcaagccccaggactga

SEQ ID NO: 339564 - DNA, 579 bp, Pseudomonas aeruginosa
atgacctgcgtcgaggccgggcgaggcgcgccgctgcgtgtggtggtggtcggcaccagcggggccgggaagtcgaccttctccgccgcgctggccgccaggctgggttgtacgcatgtcgaactcgaccgactctactggggccccggctggcaagccgtgccccacgaacgcttcgagcacgcagtggagcgggcgacgacggcgccgcgctgggtcgccgacggcaactacagcgccgtccgcgagttgctctggggccgcgccacccatgtggtatggctgaatttcgggcgctggacggtgttctcccgggtccttcgccgcaccctggcccggggcctgctgcgcacccgcctgtcccacggcaaccgtgaatcgctgcggatggcgttctgctccagggattcgatcctgctctggtcatggaccaccttcgcaggcaaccgccgcaaatacaccggcctgcgcgaggatccgcggttcgcgcatttgcgctgggtggaggttggcgagccggggagggtgggggaggtgatcgagaggttggtggaagccgtgctcgcacagtcgcagtag

SEQ ID NO: 339565 - DNA, 801 bp, Pseudomonas aeruginosa
atgacggatcttgaacacgcggtggaaagcaaccgacgcgcctgggacgcgtccgccgacagtcacctgcgtggcagcggctggcaggaattgtcgctggcggtacaggaaaccggcttcagttgcctggacgagaccctggctggcgtgctgcgcaatctggacctggccggcaaggcggcggtccaggtcggctgcaacaacggccgggaagtgctttcgctgtacgccttcggcgtcgcgcgggcggtggggatcgaccagtccgccgccttcctcgcccaggcgcggcaactggccgagcgctcgccgcatcagccgcgtttcgtcgaagccaatgcctacgagctgccggccgagctgaacggtcagttcgacctgctgctgatcaccatcggtgtgctcaactggatgcccgacatcgcgcgcttcttcgcctcggtgagcggcctgctgaagccgggcgggcaattggcgatctatgagacccacccgttcctggagatgctcgaacccgagtcggagcgaccgttcgaactgcgcaacgactacttcaccgacacgccccacgtatcccgggaggccatcgtctacgaaggcagcggcagcgataccggcatcgccagctactggtacgtccacccgctcggcgacatcctcggcgggctgctcggcgccggcctgcgcctgagtcacttcaaggagtacccgcactcgaatcgcgaggaactctacgacctctacgaggacggaccgctggcgatcccgatgtgctacacgctggtcgcggtcaaggcatga

SEQ ID NO: 339566 - DNA, 441 bp, Pseudomonas aeruginosa
atggccgagatcaatccgctttcaacggacctgcaacagcaactggcggagctgcaggcacaggggctcgccttgcttggcgtcgccgcggacgagacgccggcgcagatcgtcgccgccatcaccgactacgtgcgcgatgcgagggagcaggggcgcagcctcgacgacgaggcggtcttcgccctcggcgcgctgatcggcgcgcagtacgtgcgtggcctcggctggcactggggcgacgtgatctgggacggcgacccggacagcgccgccgtcggcgtgctcagccccgacgaatcgctgttcaacaaccccatcggctgggtaagccagatcgccgaaagcggcggcggggtgccgttcatgctcagctacaacatgatcctggccaaccaggtgccgctgttcgagcgaggcagcgccatcggtctctattga

SEQ ID NO: 339567 - DNA, 723 bp, Pseudomonas aeruginosa
atgacgctgatcgccgccgcccagagctgcgcccaccccgccgacctgccacgcaacctcgacgaccacctgcgcctgatgcgtatcgcccaggcacggggcgtgcgcctgctggtgtttcccgaactgtcgctcaccggctacgaacccaccgctgccgccgccctcgcccagccggcggacacgcccctgctgcaaccgctgcgccagctcgccgagcaggcacggatgaccacggtggtcggcctgccgctgcgctcgccgaagcatgccaagccgctgatcgccgccctgatcctcggcgccgacggcagcctcggcgtctatgccaagcagcacctgcacgcgggcgaggaacgccacttctcagccggcgacggcggccccctgctggagatcgacggcctgccgatggcgttggcggtctgcgccgacttcagccaacccagccacccggcccacgccgcccgtgccggcgctcgcctctacatcgccagcgcgctgatcggagaaaacggctacccggccgactcggccctgctggccggttatgcccgcgagcacggaatgggcgtgctgctggccaaccatggcgggccgacgggtggctggaaggcggcgggcaggagtgcgttttggaatgagcggggagcgctggtcagggagacgacggggacgggtgagacgctgcttctgctggaacggaccgagatagacgcttga

SEQ ID NO: 339568 - DNA, 618 bp, Pseudomonas aeruginosa
atgtccgaacgagagcactggcaacgggtatacgagagcaagccgtccgacgcggtgagctggttccaggccgaggcgacgctgtccctcgacctgatccgacgcatcggcgcgccccgcgaggcggcgatcatcgatgtcggcggcggcgcctcgaccctggtcgacggcctgctcgccgaaggcttcggcgacctgacggtgctcgacctttccgacgccgccctgcgcgtcgcccgcaaccgcctcggcgcgcgcggcgaagaggtgcgctggatcgccggcgacatcaccggcgtcgacctgccggaagccacctacgatgtctggcacgaccgcgccgtgttccacttccttaccactgccgaagcccgccgcgcctatgtgcgccaggtgatgaaggcggtccgccacggcggccatgtgatcgtcgccaccttcgccgccgacggcccgaccgaatgcagcggcctgccagtcatgcgctacgacgccgacgaactgcacgccgagttcggctccgccttccagctcaccgagcaccgcgacgaacaccacgtcactcccgccggccgggtccagcacttcgtctactgccattgcctgaaacgcctgtga

SEQ ID NO: 339569 - DNA, 1398 bp, Pseudomonas aeruginosa
atggacgacaacaagaacaaggtcctgcggttgcgcgatgtggtgctctacacggtctcggcgatgctcttcatggaccagatcgccctggcttcctccctcggtccgtcgagcctgttctggtggctctacgttctgctcctgctgttcctgccgatggccatgatgacctccgagctgggcaccgccttccccgccaacggcggcgtctaccactgggtgcgtagcgccttcggctttcgctggggggcccgggtgtcatggatgtactgggtcaacaacgcactgtggatgccttcggtctacaccttgttcggcagcatgctcggcgccttctatttccccgagctgagcctctggggcaagatcgccatcggcatcgccctggcgctgctcaccgcggcgttcaacgtggtcgcgctgcgcctgggcaagtggctgccgaacctcggcgcgctgctcaagctgctcgcggtgctcgccctgggcgtcggcggcctgcacttcggctggaaccatggcttcgccaacgacttcagcctggactccatcgtcccgtcctcgccgggccagatggccgcgctgggagtgatggtctacggcatcatggggaccgagctggcctgttgcagcgccgcggagatgcgcaacgcgcgccgcgacatcccgcgcgcggtgctgatctccgggctgatcgtcggcgccttcaacatcttcggcaccctcggcgtgctggccgcggtaccggccgaggaaaccgacgtcacccggatattcgcccacaccctctacaacatctacggccacgacggcgccggcgggatgctcgccgacctggtcggcgccttcgtcctgttcaccctcttcaccaacatggtcacctggagcatgggcaccaaccgtgccgcggtggaagcggccaaggccggcgagctgccggcgctgttcggcgtggtccattcgcgccacggcacgccgatcggctcggcggtgctggcctcggcggtgagcatcgtcctgctgctgctctacggcctggtggcgcacactgccgaggaactgttctggaccctgctgtcgatcttcgccatggtcttcatgatgccctacgtgctgatgtgcctggccttcgtccgcctgcgccgcgccgacccgcgcccacggccttaccggatgccgctgggcgaccgcctggccagtctctgggcgctgttcgtcgcgctgcatgtgctggccggcatcggcctgttcgtcgtcacccccggcgcgccgatggactgggcctacgccggcaagatcgtcggcggcgtggcgctggccctggccgtgggcgaactgctgatccgccaggcggcgcgaaggcgcggcgtgatgtcgctgcgcggtgcctacggttga

SEQ ID NO: 339570 - DNA, 1407 bp, Pseudomonas aeruginosa
atgaacgcaagactgcacgccacgtcccccctcggcgacgccgacctggtccgtgccgaccaggcccactacatgcacggctaccacgtgttcgatgaccaccgcgtcaacggctcgctgaacatcgccgccggcgacggcgcctatatctacgacaccgccggcaaccgctacctcgacgcggtgggcggcatgtggtgcaccaacatcggcctggggcgcgaggaaatggctcgcaccgtggccgagcagacccgcctgctggcctattccaatcccttctgcgacatggccaacccgcgcgccatcgaactctgccgcaagctcgccgagctggcccccggcgacctcgaccacgtgttcctcaccaccggcggttccaccgccgtggacaccgcgatccgcctcatgcactactatcagaactgccgcggcaagcgcgccaagaagcacgtcatcacgcggatcaacgcctaccacggctcgaccttcctcggcatgtcgctgggcggcaagagcgccgaccggccggccgagttcgacttccttgacgagcgcatccaccaccttgcctgtccctactactaccgcgctccggaagggctgggcgaagccgagttcctcgacggcctggtggaggagttcgaacgcaagatcctcgaactgggcgccgaccgggtgggggcgttcatctccgagccggtgttcggctccggcggcgtgatcgtcccgcctgcaggctaccaccggcggatgtgggagctgtgccagcgctacgacgtgctgtacatctccgacgaagtggtgacctccttcggccgcctcggccacttcttcgccagccaggcggtgttcggcgtacagccggacatcatcctcaccgccaagggcctcacctccggctaccagccgctgggcgcgtgcatcttctcccggcgcatctgggaggtgatcgccgagccggacaagggccgctgcttcagccatggtttcacctactccggccacccggtggcctgcgcggcggcgctgaagaacatcgagatcatcgagcgcgagggcctgctcgcccacgccgacgaggtcggccgctacttcgaggagcgcctgcaaagcctccgcgacctgcccatcgtcggcgacgtgcgcgggatgcgcttcatggcctgtgtcgagttcgtcgccgacaaggccagcaaggcgctgtttccggaaagcctgaacatcggcgagtgggtccacctgcgggcgcagaagcgcggcctgctggttcgtccgatcgtccacctgaacgtgatgtcgccgccgctgatcctcacccgcgaacaggtcgataccgtggtccgggtgctgcgcgagagcatcgaggaaaccgtggaggaccttgtccgcgccggtcaccggtaa

SEQ ID NO: 339571 - DNA, 819 bp, Pseudomonas aeruginosa
atgcaggccatcgccccgaacgccctcgaccgctggcacgaacacctggcgctggcgatccggcgcctgcgccaacccgacttcctcgccgctctggtcgacgccatccaccaactggtgccgatcgagtcgagcatgatcagcctggaacgcaagggccacgcgcccaccctgctctacgagcgcggcatcgccgagcgcttccgcgaggcgatcatccgccgctacttctcccgcggctacctgctcgaccctttctgcctggcggtggaggaaggccttccggaaggcttctacaccctcggcgagatcgcccccgacgacttcttccagagcgcctactaccagacctactacctcggcgccggagcggtggaggacgtctactacatcctcgacctcggccccaccgagaagctctcgatctgtctctacaacggcctttcggcgagccgctacagcgacgcccaggtcgccgccctcgccggcctggcgccgccggtgctggagctggcccggcagttctgcgccgggcgcgccgacctctcgccgaacccgcaggccgacctcgccccgcgccttcaggaagtgctgcgcggcttcggtcgcggcgtgctcaccgaccgcgaacgcgaggcctgccacctgctgctcagcggccactcggcgaaatccagcgcgcggctgatggacatctccccggagaccgtgcgcatgcaccggaagaatctctacaccaagctggaagtcggctcgcagtcggaactgttcgcgctgttcatcgagtgcctgagccaggggcagcgcgtcggcccctga

SEQ ID NO: 339572 - DNA, 1926 bp, Pseudomonas aeruginosa
gtgatcgtcggcaccgccgggcacatcgaccacggcaagacctcgctgctgcgtgccctcaccggcatcgagggcgaccgccgcccggccgagcgccaacgcgggatcaccatcgacctgggctacctctacgccgaccttggcgacggcagccccaccggcttcatcgacgtgcccggtcacgagcgcttcgtccacaacatgctggccggcgccagcggcatcgattgcgtgctgctggtggtggccgccgacgacggcctgatgccgcagacccgcgagcacctggcgatcgtcgaactgctcggtatccgccgggcgctggtggcgctgaccaagatcgaccgggtcgagccgcagcgggtgcagcaggtgcggacccaggtcgaacacctgctggcctccggcccgctggcgcgctcgccgatcttcccgctctccagcagcaccggggagggcgtcgcggcgttgcgcgaagcactcggcgggctcgccggcgaagtccgcgagcgtagccgcgagggatacttccgcctggcggtggaccgggccttcagcgtcgccggcagcggcatcgtggtcaccggcacggccttctccggacaggtcgcggtgggcgacgaactgctcctcggcaacgccggacggccggtgcgggtgcgcggcctgcacgcgcagaaccggcccgcgcaacaggcctgggccggccagcgcgtggccttgaacatcgccggcgagcgccttgcgctggaacagatccagcgcggcgactggctgctgcaggcagcgctgcacgcgccgaccacgcgggtcgacatcgacttccgcctgttgcccgacgaactccgcgacttcacccactggaccccggtgcacctgcacctgggcacccaggacgtcaccggacgcctggccctgctcgaaggcgaacaactggagcctggccaccgcgccttcgcccaactggtgctgaacgcgccgatccaggccctgcacggcgaccgcctggtgctgcgcgaccagtcggcgcagcgcacccttggcggtgggcgggtgctcgacggcgccgcgccggcgcgcaaccgacgaacgccggcacgtctggcacagctccaggcgctgcgccaggaaagcctggaggaggcgctgccgaccttgctcggcgctgccgagaacggcctagacccgcaacgcctggtgcaatccttcaaccgcccgcgcgagcactggcggctgccggaagaggtggtcgaggtgcagacccgcctcggcccccggttgttcgccggggagcgctggttcgccctggtcgagcaactgctcgccggcctgcggcgcttccacgaagagctaccggacgaactcggtcccgaccgcgaccgcctgcgtcgctacgccctgccgcagctggagcggccggtgttcatcgccttgctcgaggccgccctggccggcggcgacgtgcacagcagcgggccctggctgcacctgcccggccacgaagtgcgcctgagcgatagcgaggagcaactgcgcgcgcgcctctggccgctgctcgaagccggccgctacgacccgccctgggttcgcgacctggcccgcgagctgcgccaggacgaagccgccatgcgcaacctgctgcgcaagctggcgcgcctgggccagttgcagcaggtggtgcgcgacctgttctacccggaagccaccctgcgtcaattggccgagatcgccgtgcaggtccgcgaccccgccgggctgatccgcccggcggaattccgcgaccgcctgggcatcggccgcaagcgcagcatccagatcctcgagcacttcgaccgcatcggcctgacccgccgcatcggcaacgaccgtcgcctgcgcgagggctcggcgctggccgaacagttgctcggcggcgtctcgccctga

SEQ ID NO: 339573 - DNA, 1407 bp, Pseudomonas aeruginosa
atgagttccgttcgcttgccttcggtcgaccgcctgctgcgcagcgcggcggccgctcccctgcaccagcgctacggccgcgaggcgttgctggcgaccctccgcgacctgctcgacgaactgcgcgagccggcccgacgcggtgccctcgccgagatcgaactgagcgaggcggtgctcgccgggcgcgccggcgaacgcctcgccgcgcagcatgccagccgcgtacggcgggtgttcaacctgaccggcacggtgttgcataccaacctcggccgcgccctgctgccggacgaagccatcgaggcgatcaccctggccgcgcgctacccgctgaacctggagttcgacctggccagcggcaagcgcggcgaccgcgacgacctgatcgccgggctgatccgcgaactcactggcgccgaggcggtcaccgtggtcaacaacaacgcggcagcggtgctgctggcgctgaacagcctgggggcgcgcaaggaagggatcatctcgcgcggcgagctgatcgagatcggcggcgccttccgcattcccgacatcatggcccgcgccggcgtgcgcttgcacgaggtgggcaccaccaaccgcacccacgccagggactacgaagccgccatcggcccgcgcagcggcctgctgatgcgcgtgcataccagcaactacagcgtccagggcttcaccgccagcgtgcccaccgcgcaactggcggccatcgcccatggccacggcctgccgctgctggaagacctcggcagcggcaccctggtggacctgacccgctggggcctgcccaaggaaccgacggtgcaggaagccctggccgacggcgccgacatcgttaccttcagcggcgacaaattgctcggcgggccccaggccgggctgatcctcggcaaccgcgaactgatcgggcggatcaagaagaacccgctcaagcgcgccctgcgcgtcgacaagctgaccctcgccgccctcgaggcggtgctcggcctgtaccgcgatccggaccgcctcgccgaacgcctgaccaccctgcgcctgctcagccgcccggcggcggagatccgcgcccaggccgagcgtctggcgccggcgctgggcgaggcgctcggcgagggctgggaggtcgccgcggtcgacgccctgggcatgatcggcagcggcgcgcagccggtggcgcggctggccagcgctgcgctgtgcctgcgtccgcggcagcccaggcgcctgcgcggacgcgccctgcgcaacctcgaggaagccctgcgcgggctgccgctgccggtgatcggtcggctcgacgacgacgccctctggctcgacctgcgccagctcgacgacgagccggcgttcctcgcccagttgccgcgactgcggagcgagctgtcgtga

SEQ ID NO: 339574 - DNA, 930 bp, Pseudomonas aeruginosa
gtgtcacgcaccattcttcagccggggcagatcgaagccgccgccaacattcccccgcacctgcaccagccgtcgcgcgacctgttcgccctccgcggcgagcgcctgctgcaactggccgaggggcacccgatgggcgactacctgcgcctggtcgccggtctctgccggctccagcaggcgctgctggacaacccgccggcgctggccccgctcgaccccgagcgcctgcgcaagagccgcgagcacggcatgccgccgctggcctacgacctgctggtgcgcgaaggcgcctggctgccctggctggatgccctgctcgcgggctacccggcaccggccaacgccgccgtcggcgcggcactcgaacaattgcgcgaagccgacgaaggccagcgcaaggcctgggccatcgccttgctcagcggtcagttcgacctcctgccggcggccctggtgccgttcctcggcgccgccctgcaagtagcctggagccattggctgctgggactggaggagggcgcggtggtcgagaccgagagccggaccttgtgccccgcctgcggctcgccgccgatggccgggatgatccgccagggcggcaaggaaaccggtctgcgctacctgagctgctcgctgtgcgcctgcgaatggcactacgtgcgaatcaagtgcagccactgcgaggaaagcaagcacctgacctacctgtccctggagcatgacgggcagccggcggaaaaggccgtgctgcgcgccgagacctgccccagttgccagggctacctgaagcagttctacctggagttcgaccgccacgccgatgcccttgccgatgacctggccagcctggcgctggacatgcgcctggccgaggacggctacctgcggcgttcgccgaacctgttgctggcccccggcggcgaatag

SEQ ID NO: 339575 - DNA, 627 bp, Pseudomonas aeruginosa
atgaaaaatgaaatccagcgctacaacgccaacgagcgcagcaaccactgggccgtggcgatcctgttcttcatggccgggctgtccgggctggcgctgttccacccggcgctgttctggctgaccaacctgttcggcggcggtccctggacgcgtatcctgcaccccttcctggggctggcgatgttcgtcttcttcctcggcctggtggtgcgcttcgctcaccacaaccgggtgcagaagagcgatatccagtggctcaagcagtggcgcgacgtggtcagcaaccgcgaggagaacctcccggaagtcggccgctacaacgccgggcagaagctgctgttctgggtgctgctgctgagcatgctgaccctgctggtcaccggcatcgtgatctggcgccagtacttcagtgcctggttcggcatcgaggcgatacgcctgtcggcgctcctgcacgctttcgccgccttcgtcctgatcgccagcatcatcgtgcacatctacgccggcatctgggtcaagggctcgatgggcgcgatgctctacggcaaggtcagccgcgcctgggcgcgcaagcaccataacggctggctgaaggaagtcggcaagggcgaggagcactga

SEQ ID NO: 339576 - DNA, 930 bp, Pseudomonas aeruginosa
atgagtagtcaggacatccacgcccgctccgcgaccaccacgccgatgccctcggtgcggaaccaggaggaagtggcgaaactgatcgacgtgtccaagtgcatcggttgcaaggcctgccaggtcgcctgctcggaatggaacgagctgcgcgacgaggtcggccacaaccacggcacctacgacaaccccatggacctgacggccgactcgtggacggtgatgcgtttcaccgagtacgagaacgaggccggcaacctcgagtggctgatccgcaaggacggctgcatgcactgcgccgagccgggctgcctgaaggcctgcccgagcccgggggcgatcgtgaaatacgccaacggcatcgtcgacttcaaccaggacaagtgcatcggttgtggctattgcatcaccggttgcccgttcgacatcccacggatctcgcagaaggaccacaaggcctacaagtgcagcctgtgttccgaccgcgtctcggtgggcatggagccggcctgcgtgaagacctgcccgaccggcgccatcgtcttcggcagcaaggaggacatgaaggaacacgccgccgaacgcatcgtcgacctgaagagccgcggttacgagaacgccggcctgtacgaccccgaaggggtgggcggcacccacgtgatgtacgtgctgcaccacgccgacaagccgtcgctctatgccggcctggccgaacagccgagcgtcagcccgctggtcagcctgtggaagggcgtgaccaagccgctggcgctgctggccatgggcgccacggtgctcgccgggttcttccactacgtgcgcgtcggtcccaaccgcgcggacgacgaggaagaccacgggcaagccgaggcaccggtgcaccaggtcgatccgtcggtacacacctttgacccgcacgagcgtcgttga

SEQ ID NO: 339577 - DNA, 2442 bp, Pseudomonas aeruginosa
atgaccaaccactggaccgacatcaagaatgccgatctggtgctgatcatgggcggcaacgccgccgaagcccacccgtgcggattcaaatgggtcaccgaagccaaggcgcacaacaaggcgcggctgctggtggtcgatccgcgtttcacccgttccgcctcggtcgccgactactacgcgccgatccggaccggcaccgacatcgccttcctcggcggcctgatcaactacctgctggaaaacgacaagatccagcacgaatacgtgcgcaactacaccgatgtctcgtttatcgtgaaggaaggcttcagcttcgaggacggcctgttcaacggctacgacgccgagaagcggacctacccggacaagtcctcctggggctacgagatcggtgaggacggctatgccaaggtcgatccgaccctgacccacccgcgctgcgtgttcaacctgctcaagcagcactacagccgctacaccccggacgtggtgagcaacatctgcggtacgccgaaggacatgatgctcaaggtctgggcggaaatcgccgagacctccaagccgggcaaggtcatgaccatcatgtacgccctgggctggacccagcactcggtaggcgcgcagatgatccgcaccggcgcgatggtccagctgctgctgggcaacatcggcatgcccggcggcggcatgaacgccctgcgcggccactccaacatccagggcctgaccgacctcggcctgctgtccaactcgcttccgggctacctgaccctggcgatggacgccgagcaggactacgacgcctacatcgccaagcgcacggccaagccgctgcgcccgggacagctgtcctactggcagaactacggcaagttccacgtcagcctgatgaaagcctggttcggcaagtcggcgaccaaggaaaacaactggtgctacgactggctgcccaagctcgacatgccgggcgccggctacgacgtgctgcgctacttcgacatgatgtaccagggcaaggtcaacggttacttctgccagggcttcaaccccatcgcctcgttccccaacaaggccaaggtcggcgccgcgctggcgcgcctgaagtggatggtggtgatggacccgctggtgaccgagacctcggagttctggcgcaacgtcggcgagtacaacgacgtcgacaccgccagcatcaagaccacggtgttccgcctgcccacctcctgcttcgccgaggaagacggctcgatcgtcaacagcggccgctggttgcagtggcactggaagggcgccgagccgccgggccaggcgcgtccggacatcgccatcatggccgggctgttccaccgcctgcgcgagatgtaccgcaaggacggcggggccttccccgagccgatcctcggtctcgactggtcctacctcaagcccgacgaaccgggcccggacgaactggcccgggagttcaacggcaaggccctgagcgacctggtcgacccggccaacggcatgatcctggccaaggccggcgagcagttgccgggcttcgccctgctgcgcgacgacggcagcacggcgagcggctgctggatcttcgccggctcctggacccagcagggcaaccagatgggccgccgcgacaacagcgacccctacggcatgggccagaccctcggctgggcctgggcctggccggcgaaccggcggattctctacaaccgcgcctcggccgacgtcagcggcaagccgtgggacccggagaagaagcgcctggtgtggtggaacggcaagtcctggggcggcaccgacgtgcccgactacaaggccgacgtaccgccggaagccgggatgaacccgttcatcatgaaccccgaaggggtggcccgcctgttcgccgtcgacaagatggccgaaggcccgttccccgagcactacgagccgttcgaaacgccgatcggggtgaaccccttgcaccgcgacaaccgcaaggcgatcagcaacccggcggcacgggtgttcaagaacgacatggaactgttcggcacggccgacgagttcccctacgcggcgaccacctaccggctcaccgagcacttccactactggaccaagcactgccggctgaatgcgatcacccagcccgagcagttcgtcgagatcggcgaggcgctggccaaggagctgggcatcaatgccggcgacaaggtcaaggtctcctccaaccgcggctacatcaaggcggtggcggtggtgaccaagcgcatccgcccgctgcaggtggatggcaagaccgtgcaccacgtcggcatcccgatccactggggcttcgccggcatggcgcgcaacggcttcctggccaacaccctgacccccttcgtgggcgacgggaatacccagacgccggagttcaagtcgttcctggtcaacgtggaaaaggcgtga

SEQ ID NO: 339578 - DNA, 591 bp, Pseudomonas aeruginosa; identical to SEQ ID NO: 318279

SEQ ID NO: 339579 - DNA, 930 bp, Pseudomonas aeruginosa
atgaacaagaacaagacgttcctcgcggcggcgctggtagcgctggccgccagccttcccgtgcacgctgcgaccgactacacccgcacgcgctatcccatcgtgctgtcccacggtctgttcggcttcaagagcgtcggcccggtggactactggcacgctatcgtgccggccctggagaaggacggcgcgaaggtcttcgccacctcgcagtcgccggtgaacagcaacgaggtgcgcggcgaacagctactggcgcaggtggaggaagtcctggccctgaccggcgcggagaaagtcaacctgatcggccacagccagggcggcatgaccgtgcgctacgtcgccggggtggcgccgcaactggtggcctcggtcaccaccatgggcacgccgcacaagggcacgccggtagccgacgcggtgaccggcttcagcgagttcctcgggccgatcggcaccgaggtgatcgcctcggcggtggaggcgctgttctcggtggtcgacatcgtcgacggcggcgagtgggtcaagggcgacgcgctggctgccctgaacagtctcaacactcccggcaccgcgcggttcaaccagcgcttcccgcaggcgatcccggccagcgcctgtggccagggcgcggagacggtagccggggtgcgctactactcgatgagcggcaccggctccctgaccaatgcgctcgacccgagctccgccggcctggcggtgaccgggctgctgttcggcgaggccaacgacggtctggtcggccaatgctccagccacctgggcagcgtggtgaaggacaactaccggatggaccatctggacgaagtcaaccagttgctcggcctggtcagcctgttcgagagcgacccgacccaggtctatcggcagcatgccaatcgcctcaggaacgtcggactctga

SEQ ID NO: 339580 - DNA, 2046 bp, Pseudomonas aeruginosa
atgcgcaacccctacccgccgctcgccgccgcgccctatccgcacctgctggccccgctggacctgggcttcacccgtctgcgcaaccgcgtggtgatgggttcgatgcacaccgggctggaggatcgtctgtgggacttcggcaagctcgctgcctactaccgcgagcgcgcccggggcggcgtcgggctgatcgtcaccggcggcttcgcgccctgccgcgaaggttggctgctgcccttcggcagcagcctcaccagcgccctggaggtgcccgcccatcgtcgcctgacccaggcggtgcatgccgagggcggcaagatcctgctgcagatcctccacgccgggcgctatggctaccacccgatggcggtgtccgcctcgccgttgaagtcgccgatcagttggttcaccccgcgcgaactctccgagcgcggcatccgcaagaccatccgcgccttcgtccgttgcgcgcggctggccaaggccgccgcctacgacggcgtggaagtgatgggcagcgaaggctacctgctcaaccagttcctctgcccgcgcaccaaccgccgcgacgaccagtggggtggcccgctggaaaaccgcatgcgcctggcgctggagatcgtccgcggcatccggcggatcgtcggccaacgcttcatcctctgctatcgcctgtcgctgctcgacctggtcgagggcggcaatacctgggacgaagtacggcgcatcgccctggccctggaggaagccggaatcaccctgctcaacaccggcatcggctggcacgagtcgcgcgtgccgaccatcgtcacctcggtgccgcgcgcggccttcgccgaggtcagcgcacggctgcgccacgagctgaaggtgccggtgatcgccagtaaccggatcaacacccccgaggtcgccgaatccctgctcgccaccggcaaggccgacctggtgtcgatggcccggccgctgctggccgacccgcagttcgtggccaaggccggcgccggccgggccgaggagatcaacacctgcatcgcctgcaatcaggcctgcctcgatcatgccttcgccaaccgccgcgccacctgcctggtcaacccgcgggcggccttcgagaccgaattgcgctaccgcaaggcgcgcacgcagaagcgcatcgcggtgatcggcgccggccccgccgggctctccgccgcctgcgtggccgccgagcgcgggcatcgggtcagcctgttcgaggcgagcggggaaatcggcgggcagttcaacctggccaagcggattcccggcaaggaagagttccgcgaaaccctgcgctacttccgcgtgcgcctggaacgcctcggcgtcgacctgcgcctcggccaccgggtgcgtcagggcgagctggacggtcagttcgacgacgtggtggtggccaccggcatccagccacgccggccaaggatcgacggcatcggcggaccgaccgtactcagctacgtggacgtgctgcgcggcgcgccggtgggcgcgcgggtcgccatcgtcggcgccggcggcatcggcttcgacgtcgccgccttcctcgtcgccgcacccagcgacggccagccgcgggcgctcggcgaatggctcgcggaatggggcgtggacctcgacaacagccagcccggcggcctccgcgaacccgctccgacgcagccggcgcgccaggtctggctgctccagcgcaagcccggcgcccccggcgcgcagctcggcaagaccagcggctgggtgcaccgcgcgcacctcaggcacaacgccgtgcgcatgctcggcggggtggagtacctgaagatcgacgaacgcggcttgttgatccgcgtcgacggcgaggaacgctggctggaggtggacaacgtggtgatctgcgccggccaggatccgctgcgcgagttgcagatcagccaggcggcggaaagcctgcgcttccacctgatcggcggggcgcgagtggcgggggaactggatgccaagcgggcgattcgcgagggggccatgctggcggcgcgcttgtag

SEQ ID NO: 339581 - DNA, 450 bp, Pseudomonas aeruginosa; identical to SEQ ID NO: 326321

SEQ ID NO: 339582 - DNA, 1236 bp, Pseudomonas aeruginosa
atgtccttttcccgcactctcggcgacggccggatcaatctcgaacagcaacgcaagcgcgccaaggagctgttgcgccagtggcgccgcgacccggccagccgtacagggcttccggggcaggagccgcgcctggccgacgcccagtggcaggtggcgcgcgaactgggcttcgccagttggccgcgactcaaggcgcatgtcgacgccatcgccttcgccagccgccaccccgatctggtcggcggcgatgaggccgcgaccctgcacctgcgctgcggcaacgacatcgcccacggcctgaagctcgccggctttcgcggcgacttccggatgttcgccgacccgctgaccatgggaccggtgccgaacctgccgttgcccgagttcctcgccctgcgcagcgactacctgagccgcgccttcgacctcgacccggccgacgcccaggcccgccagcgccaggaatacgctgggctcgagcggctcggcgaatactcgcgggtggccctctggtgcgaggcggacgcctacgaccagttgttcctggtccgggtgctggccgggatgcagacgccgccggagcacctggaactgatcgagatcgaccgcgtgccaggcgtcgagcgcttcgtcggcatcggccaactggcgcctgagctgctcgcctggctatggactcggcgtcgcccgctggacgccgaagccctgacgctggcccgcgcggcctgggaagcctaccgcgatccggcgccactgcgctgggcgcaactggccgcagcgccgaccccggcgctaccgttgctggggccggcgctgcgtcggcaactgcatgaactgccggccctgcgcgacggcctgtcgctgagcgaacggctgaccctggagatcgtccgcgacggcgggcggccgagcgccggccaggtcttcgccgagctgaccgcacggcgcgagccgctgccctatctcggcgacctgatgttccgcgtcctgctccgcgcgctgctggaagagcccggtgcgctgctgcgcacgccggcgccggaactgccctgggaacgccagccgctggcgctgaccgctgcgggccgcgaggtcctggccgggcggcgctaccgcctcgacctcggcgcccccgaacgctgggtcggcggcgtacgcctgcgcgccggcaccgcgcactgggctctggacgagcaggaccggccggtatggcgggaggacccacggcactga

SEQ ID NO: 339583 - DNA, 393 bp, Pseudomonas aeruginosa
atgaagaagatcccgctcgccgccgccgaccccgaccgcctggatacctgggtgaaataccgcgaaggcctgtgcggcgagtgcaacgcgacctgctgcacgctgccggtggaagtgcgcatcgacgacctgatccgcatgcgactggtcgacgagttcgagcgcgaggagccggccaagcgaatcgccaagcgactggaaaaggatggcgtgatcgagcacttcaaccacaagcgcgagatcttcacccttacccgcatggccaacggcgtctgcctgtacctcgaccgcaagacccgcctgtgcaccatctatgcccgccgcccggacacctgccgcaaccacccgcgcatcggcccgcgtcccggccactgcgcctaccggccgaagtag

SEQ ID NO: 339584 - DNA, 1437 bp, Pseudomonas aeruginosa
gtgagggcgctgcgcggctggccgctggcctggttcctgctcgccctggccttcgccatccgcctgctgagcctgggcagctatccgctgatggacaccaccgaggcccgctatggcgaggtggcgcggaagatggccgaactgggtgactggatcacgccctggtacgacgtcggcgtgccgttctggggcaagccgccgctggccttctggctcagcgccggcggccagcttctgctcggtgccaacgagttcgccagccgcctgccgcactggctgctgggcgtactggtgctgtggctggtatgggactggcaggcccgcgaagatcgtcggcaggcgcggatcgcctgcgtcctgctgggcagttcggcgctgttcttcgtcgcctccggggcggtgatgaccgacatggccctggccctggccctggtcctgaccatgcgcggcttctggctgggcctgcatggcgcggagggaatccggcgccgcgagggctggctgatgttcctcggcctcggcctcgggctgctggcgaaagggccgctgacgctgatcctcgccggactgccgatcggcctgtgggccttgctggagtggcgctggcgcgcgctctggcggggcctgccatggatccgcggaagcctgctgatgctcctggtggcggcgccctggtacctgctggcggagttgaagacgccgggcttcctcgagtacttcctgctcggcgagcattggcagcgcttcgtcaccgccggctgggacggcgaccgctacggcaatgcccacgcctatccctacggcagcgtctggctgttcctgctggccgccgcgtttccctggagcctctggttgccgctgctgctctggctgggctggcgccagcgcggggaggtggtcgatggcgtcgcctcgcgcaggcgctactggctgttctggggactggcgccgtgcctgttcttcaccttcgccggcaacgtcctctggacctacgtgctgcccggcctgccggccctggcgttgctcgccgccgacctgttgcgcgcgccgctggcgcgcagcgcctggctgcggcgtggcgggctggcctgcctggcgctgaccccattgctgttcgcgctgttcctcggctccctgctgctgggctcgcgcgccgagcagaagtccaccgccgcgctgctggccagcgacgccggctggcgcgagcggccgctggtgttctggccgaagcggccgtactcggcagtgttctacagcggcgggcgggcacaacgggcggaggacagcgaactggccggctggttgcgtcgcgacgccctgctggcgatccgctcgcgttcgttcggcgccttgcccgacgaggtgcgccagcgcttgcgctgccggccgccggtgggacagtaccagctatgccagggcgtcgcgccgcctggctga

SEQ ID NO: 339585 - DNA, 975 bp, Pseudomonas aeruginosa
atgatgatcgaaccttccctggcgtcgaagctcgaggccccctgcctgctcagcgtggtagtgccggtgttcaacgaggaggcggtgctgccggccttccaccagcgcctcggcgccgtgctcggcgaccttggcgacgattgcgaggtgctctatgtcgacgacggcagcaccgaccgcagcgcgacgatcctcgcccagctacaggccgccgaccgccgggtgggcgtggcccgcttcacccgcaacttcggcaaggaacaggcgatgagcgccgggctcaagctgtcgcgcggcgccgcggtgatcgtcatcgatgccgacctgcaggatcccccggaactgatcccgcagatgctcgacgcctggatcggcggcgccgaaatggtcaacatgcgccgccgcagccgggccggcgaaagctggctgaagcgcgcctcggcgagcgccttctaccggctgatcaaccgcctcagcgaggtgccgatcccgcgcgacgtcggcgacttccgcctgctcgaccggcgggtggtcgatgccctttgcgagctgccggaaggcaatcgcttcatgaagggactgttcgcctgggtcggtttccgccaggtcgatatcgcctatagccgcgccgctcgcgtcgccggccacagcaagtggcgctactggcggctgtggaacttcgccctggagggcatcaccgggttttccaccgcgccgctgaaggtcgccggctacctcggcctgctcagcctgttggcggccctggcgaccctgctcgccgggatcttcggccagcaggagatccacgaacactggccggtgatcgccgcgctgttcctgatcggcggcctgcaactgctggccatcggcgtgtgcagcgaatacctcgggcggatgaccatggaagcgcggcgccgcccgctctacctgatcgaccgctacctgccggcgcaggtcggcggggccaatccgtga

SEQ ID NO: 339586 - DNA, 363 bp, Pseudomonas aeruginosa
atgctcctggggcgtttcgtctcggtcggcgccggtgccaccgccgttcattacctggtgctgaccctcctggtcgagggcttcgccgttggcgccgccgtggccgccgcgacgggagcaagctgcggggctctggctgcctacctggggcatcgccggaagactttccgccaccgtggcccggtgttccgttcgctgccgcgcttcttcgccgtcagcctgctttgcgtactcggcaacgccgtcctggtgttgctgctcggcgacctcgccggactcgactaccgcctggcccagctcgccgcgaccggcgcactgctgttggcgacctatcaccttcatcgactctggaccttctcatga

SEQ ID NO: 339587 - DNA, 1362 bp, Pseudomonas aeruginosa
atgagcctgttgcgcgatgcctggcgccacgccccgacccaccacagggtctgggcgctggccgggccgatgattctgtcgaacgtttccgttcccctggtgcacctggtggacagcacggtggtcggccacctgccgcacgcctaccagctcggcgcggtagccgtgggcggcagcctgtacaccctgatggtcggcgtgctcggcttcctgcgcatgggcaccaccggcttcgccgcccaggccgccggccgcgacgatggcggcgcgctgcgcctgatcctcgcccagggcctgggcatggcgctgctcctggccctgctgctcggcgcgctggccctgcccctgagcggctgggccctgcaactgatgcaaccgtcggcggaactgaccggcgaggcccgcgccttcttccatacccgcctgctcggcctgccggcggccctggccagctacgcactggtcggctggttcctcggcacgcagaacgcacgggcgccattggcgatcctgttgaccaccaacctgagcaacatcgccctggtgctctggttcgtccacggcctcgactggggcgtgcaaggcgcggcccgcgcctcggtgctggcggaatggagcggcgccctgctcggcctggccctgacccgccgcgacctggcccggcgccccgggcgggcgcagtggcaacgcctgcgccactggctgtcctggctaccgctgctgatggtcaaccgggatatcttcatccgcagcctggccctgcaactggtgttcttcctgctcaccgtacagggcacccgcctcggcgacgccacggtagccgccaacgccctgctgctcaacggcctgctcctgacgtcctacgccctcgacggtctcgcccacgcggtggaggcgctctgcggccacgccatcggcgcccgcgaccgaaccgccctgcgccgcgcgctggtggtggccggtggttggtcgctgctggcaagcctggcgttcgccgcgctgttcgccctgttcggccacctgttcatcgacctgcagagcgacatcgccggcgtccgcgaagtcgcctacgcctatctgccgtacctggcctgcctgccgctgctggggatgtggagctatctgctcgacggcctgttcatcggcgccacccgcgcccgcgagatgcgtaacgcgatgctcgtcgcggtggccgccagcctgcccctcggctggctgttgcaggggctgggcaaccacgggctatggctggcgttcctcgccttcatgctgctgcgcgggctggtcctggccgcctacggctggcgcctgacccgccgcgatggctggttcgccgctcagggcgccgacagcgggcgatag

SEQ ID NO: 339588 - DNA, 369 bp, Pseudomonas aeruginosa
atgcgcctcctgatctgcgccggacgccatttcaaggacgccgaacgcctgcgcctggcgctcgaccagtgccacggcctgcaaccggtggcgctgctcggccacctgctgcatgccggcagcggcctgccggacgaggccgagcgctggtgccgcgagcgtggcgcggattcgcgcgcctacgattatccggagcgcagtggcagcgacaacgccctgcgcgagtatggcgaggccgtcctcggcgatgccgcgccggacctggtgctggtgtttcccggcgggcgcctggccagcgaactggtacaggtcgcgcacgctggcgacgtcccgctgatgctcgcctatcgcccgctgtcggcgccctga

SEQ ID NO: 339589 - DNA, 1668 bp, Pseudomonas aeruginosa
atgctgggaaccatcctcctgatcaacctggccggtgccgtggccctcctgttgtggggcacgcacatggtctccagcggcgtgctgcgcggtttcggcactgcgctgcgcaactggctcggccgccacctgggcaaccgctggctggccctgctcgccgggctcggcatcaccggcctgctgcagagcagcaccgccaccagtctgatggcagcgtccttcaccgccagtggcaccctgggcctggcgccggcgctggcagtgatgctcggcgccaacgtcggcaccactctggtggtgcaactgctcagcttcgacacctcgttgctggcgccgctggccctgctgtccggcctgctgctgttccgcctgggcgacggtccgcgcctggagagccttggccagtgcctgatcggactcggtctgatgcttctggcgctggcgttgctcggccattccctgcagcagatcgaggcctcgccagcctttgtcgcggtgatccacggcctcgaaggcgatccgctgatcgccctgctgctcgccgcgctgctgacctgggcctgtcattccagtgtcgcggtggtactgctggtggcgtccctggcccaggccggactggtctcgttgcccatcgccctggccctggtgctcggtgccaacctcggcggcgccttgccggcgctaggggtggccggtagccgggtggcgcggcgcttgccgttgggcaacctgctggtgcgcctgctcggttgcctgctggtgctgccctggctgacggcgctggcgcaaccggccaacgcactcggcggtgcggcggcggtctggttccacagtgctttcaacctggccttggcactgctggcgatcggtttcaccggaccgcttgcggcgctgctcgcgcgcctgttgccggaagaggcacagtccgacgagccgggcatgccgcgctacctcgacgaagccgggctggaggtggccaacatcggcctggccaacgctactcgcgaagtcctgcggctggccgacatggccagtctgatgctgcgcgccaccagcggcctgttgcagcgaccggaggcgaaggtggcggcggaaatccgtcgccaggaccaggccctcgaccagttgagtgcggcgatccgcgcctacctggcagacctcggccaggacggcctcggcgacagcgacgccgatcgtgcccaggaaatcctcctgttcgccatcaacatcgagcacatcggcgatctcgtcgccaacagcctgctgcccctggcgatgcgctgggccgggcgcagtcgcgccggcagcgagttcgagctgggccgcatgctgccgttgcaggcggcgatcgaggagagcctgcacctggcgatcagcgcgttccttcgcgaagacctggacgccgcgctgcgcctggtggcgcgcaagaagttgctgcagcgactggaggccgatgccagtcgcgagcgcttccgtcgcctgcgcgacgatcgcggtgcctgggtggagtccggtgacgtgttccagcgcattctccgcgactaccgacgcatccaccatcatgtcaccgccctggcctatccgctgctcgaacgcagcggcatcgatccgatggcgaagcggccggacgagccagggcaaggggagggatcggcatgcgcctcctga

SEQ ID NO: 339590 - DNA, 210 bp, Pseudomonas aeruginosa; identical to SEQ ID NO: 318267

SEQ ID NO: 339591 - DNA, 777 bp, Pseudomonas aeruginosa
atgaccctgcacgaccggcgcccgcgggcgccccttttccaaccgctgccggccgcgctgcgacgcgccctgtcctggcgcctgggcttcgtcgccgccgcgctcgcctgcgtcctgctgctggcgctgctgtccgaggctcgcgccgcgggcggcgcctaccgggtcgacgacggcgagatcgaccccgtcggcgaatgcaacctggacgcctggcaccagcgcgaacggcaccacggcaaccgctaccagtcggtgctgtcgcccgcctgcaccttctccgccctaccatcggtgcagctcggcgcggcgctggtgcgcgagggcgacgcgggcgatcggcacagccgcctcagccccgagctgaagacaccgctgctggcccgcgacgacctcggcctggcgttggccctggcgctctcggcggatctctacctggaccgccggcacgccttcgaaggcgccggcttcaacctgccgctgagctaccagccgttcgaggccctgcgcctgaacgccggggtcggcctggggcatgcctacgccgagggcgagcgccggcatcgctggaactggggtatgggcatggaataccgcgtcggccagccgttgaccctgatcgccgaacgcttcggcgagtcggccggcgacagcggctggcaggccggaccgaggctgcacctgggcgaacggctggacctcgacctgctggtcggcggccacctgcgcggcgagcgcgagcgatggctggtctcgggagcgaccttgcgtttctga

SEQ ID NO: 339592 - DNA, 2712 bp, Pseudomonas aeruginosa
atgagcgtagcgacccaacgcaatacccagctcgataccgagcgccgcaacgaccgactgtccatgcgcgccgcccgcgaagcgcagaacagcctggaaaccaccctcaccaacgtccgcggtcgccaggacggcctcgaccaggccgaggccgccgcccggctgcacgccgacggccccaacgaagtggcccacgaccgtccgccacacgtcctggtgcaactgctgcaagcgttcaacaaccccttcatctacgtgctgatgacgctctccgcgatcagcttcttcaccgacttctggctgccgctgcaggacggtgaggaaaccgatctcaccggcgtcatcatcgtcctctgcatggtcctggtcagcggcctgatgcgcttctggcaggaataccgctcgggcaaggccgccgaggcgctcaaggccatggtgcggaacaccgccaccgtgctgcgccgcgacgagcgcgggatgcgcggcgagctgcgggaaatccccatgggcgaactggtggtcggcgacatcgtgcgcctgtccgccggcgacatgatccccgccgacatccgcctgatcgaatcgcgcgacctgttcatcagccaggccgtactcaccggcgaggcgctgccggtggagaaatacgacaccctcggcgcggtccgcgagaagtccgccaagcggatcgccgccgaccagcaggacctgctcgaactgccgaacatctgcttcatgggcaccaacgtggtcagcggcacggccaccgcggtggtggtcgccaccggtgcgcgcacctatttcggttcgctggcccgttccatcgtcggttcgcgggcgcagaccgccttcgaccgtggggtgaacagcgtcagttggctgctgatccgcttcatgctggtgatggtgccgatcgtgctgctgatcaacggcttcaccaagggcgactggaccgaggcgttcatgttcgctctcgccgtggcggtcggcctgaccccggaaatgctgccgatgatcgtcagcgccaacctggccaagggcgcggtggcgatgtcgcggcgcaaggtggtggtcaagcgccttaacgcgatccagaacttcggcgccatggacgtactctgcaccgacaagaccggcaccctgacccaggaccggatcatcctcgagcatcacgtcgacgttgccggccggcgctgcgaccgggtcctgcaaatggcctggctgaacagcttccaccagtccgggatgaagaacctgatggaccgcgcggtggtcgccttcgtcgaacagaacccgcgcatcacgccgtcggatgcctggcgcaaggtcgacgaactgcccttcgatttcgtccgtcggcgtctctcggtgatcctcgagggcaaggacggcgaacacctgctggtgtgcaagggcgcggtcgaggaaatgctcgagatcgccacccgcgtgcaccaggacggcgtcgacctgccgctcgacgaggaacgccgccgggccctgctggcgctggccgagcaatacaaccgcgacggcttccgcgtgctcctgctcggcacccgcagcctctcgcgcacggagtcccaggcccagtacggcgccagcgacgagcgcgatctggtgatcgccggcctgctgaccttcctcgatccgccgaaggaaaccgccggcccggccatcgccgcgttgcgcgagaacggcgtggcggtgaaggtgctcaccggtgacaacccggtggtcagcgcgaagatctgccgcgaggtcggcctggacgtcggcgagccgctgctcggtcgcgacatcgacctgatggacgatgccaccctgcaacgcctggccgaggagcgcacggtgttcgccaagctgacgccgctgcagaagtcgcgggtgctcaaggccctgcagggcaacggacacaccgtcggcttcctcggcgacggcatcaacgacgcccccgcgctgcgagatgccgatgtcggcatctcggtggacagcggcaccgacatcgccaaggaatcggccgacatcatcctcctggaaaaaagcctgatggtcctggaggagggcgttatcaagggccgcgagaccttcggcaacatcatgaagtacctgaacatgactgccagctccaacttcggcaacgtgttctcggtactggtggccagcgccttcatccccttcctgccgatgctggcgatccacctgctgctgcagaacctgatgtacgacatctcccagctgtcgctgccgtgggacaagatggacaaggagttcctcgccaagccgcgcaagtgggactcgaagaacatcggccgcttcatggtctggatcggcccgacctcgtcgatcttcgacatcaccacctacgcgctgatgtggttcgtgttcgccgccaacagcccggaaatgcagtcgctgttccagtccggctggttcatcgagggcctgctctcgcagaccctggtggtgcacatgctgcgtacccagaagattcccttcatccagagcaccgcggcgctgccggtgatgctgatgaccgggctggtgatggcgctgggcatctacgtgccgttctcgccgctgggagcgatggtcggcctgcagccgctgccgtgggagtacttcccctggctggtgggcacgctgctctgctactgcgtcaccgcgcagaccatgaagaccctctacatccgccgcttcggccagtggttctga

SEQ ID NO: 339593 - DNA, 219 bp, Pseudomonas aeruginosa
atgaacttcgagaattcggtatcccccggcgtatccgccttcgtggcgaagatgcgcgtgcgcgccgcgcaatcccccggcgcgatccttcccggccacggccatcccgcgagcctcgcctggcgtgtcgacccggccggcggtcgcctggagtatcgccgcctggagacgcaggtcgaagagaaccctgtgagcggacgccgcccgatgcgcggctga

SEQ ID NO: 339594 - DNA, 135 bp, Pseudomonas aeruginosa; identical to SEQ ID NO: 318263

SEQ ID NO: 339595 - DNA, 840 bp, Pseudomonas aeruginosa
atgaccccgctgacgcccgagcagacccatgcctacctgcaccatatcggcatcgacgatcccggtccgccgagcctggcgaatctcgaccgactgatcgacgcgcatctgcgccgggtcgccttcgagaacctcgacgtgctgctcgaccgccccatcgagatcgacgccgacaaggttttcgccaaggtcgtcgagggcagccgcggcggttattgcttcgaactcaactcgctgttcgcccgcctgctgctggccctcggctacgagctggaactgctggtggcacgggtacgctgggggctcccggaggacgcgccgctgacccagcaatcgcatctgatgctgcgtctgtacctggcggagggcgagttcctggtggatgtcggcttcggctcggccaatccgccgcgagcactgcctttgccgggcgacgaggcggacgccggacaggtgcattgcgtgcgcctggtcgacccgcacgccggtctctacgaaagcgccgtgcgcggtcgcagcggctggctgccgctgtaccgcttcgacctgcgcccgcagttgtggatcgattacatcccgcgcaactggtacacctctacccacccgcacagcgtgttccgccagggcctgaaggccgccataaccgagggcgacctgcgcctgaccctggccgacgggctgttcggccagcgcgccggcaacggcgagacgctgcagcgccaactgcgcgacgtcgaggaactgctggacatcctgcagacccgttttcgcctgcgcctcgacccggcctccgaagtgccggcgctggcgcgacggctggcgggactgatctccgcctga

SEQ ID NO: 339596 - DNA, 456 bp, Pseudomonas aeruginosa
atggcccaggcaatcgtcgcctacctgcactacctgtcgatcttcctgctgttcgccctgctggtgttgcagcaccgcctgctgcgcctgccgctggacctggagcgcgcccgcagcctggcggcgatcgaccgcggctacggcctctgcgccctggcggtactggccagcgggctggcgcgggtgctgtggtacggcaagggtgtcgactactacctgcacaatggcctgttccacgccaaggtcgggctattcgtcctcgctgccctggtctcgctgttgccgaccgttaccttccttggctggcgcggcgccctcaaggccggcgaagtgccggcggtgacgccggcccggggccggcgggtggtcctggcggtgcgcctgcaactgctcctgctgctggtcattccgttgctggctacgctgatggcgcgcggcttcggcatgcgcggctga

SEQ ID NO: 339597 - DNA, 1401 bp, Pseudomonas aeruginosa
atggaaagctatgacgtgatcgtgattggcgccggtccggggggctacaacgctgccattcgcgccggccagctaggcctgaaggtggcctgcgtggagggtcgcgaaaccctcggcgggacttgcctgaacgtcggctgcatgccgtccaaggccctgctgcacgcctcggagctatacgccgcggcgagcggcggcgagttcgcccggctcggcatccgggtcagcccggaactggacctggcgcagatgatgaagcagaaggacgagagcgtcgccgccctgacccgtggcgtcgaattcctcttccgcaagcacaaggtgcagtggatcaagggctgggcgcgcttgcaaggcgagggccgggtcggcgtggcccttgccgacggcggccacgcgcaactggaggcgcgcgatatcgtcatcgccaccggttcggaaccggcgccgctgcccggcgtgccggtggacaaccagcgcatcctcgactccaccggcgccctggagttggccgaagtgcctcgccacctggtggtgatcggcgccggcgtgatcggcctggagcttggttcggtctggcgccggctgggcgcacaggtcacggtgctggagtacctcgagcggatctgcccggggctggatggggaaaccgcaaggaccctgcagcgcgccctgacccgccagggcatgcggtttcgcctcggcacccgcgtggtcgccgcgcgcagtggcgagcagggcgtcgaactcgacctgcaaccggccgccggcggcgctacggaatcgctgcaggcggactacgtgctggtggccatcggccggcgcccctataccgaaggactggggctggagacggtcggcctggccagcgatcgtcgtggcatgctggagaaccagggacagcgcagcgcggcgccgggcgtctgggtgatcggcgacgtgacctcgggaccgatgctggcgcacaaggccgaggaagaggcgatcgtctgcatcgagcggatcgccgggcatgcggcggagatgaacgccgaggtgattccgtcggtcatctacacccagccggaagtggccagcgtcggcctcggcgaggagcagttgcaggcggcgaggcgcgagtacaaggtcggacgcttcccgttcagcgccaacagccgggcgaagatcaaccacgagagcgaaggcttcatcaagatcctttccgatgcccgcagcgaccaggtgctcggcgtgcacatgatcgggccgggcgtcagcgagatgatcggcgaagcctgcgtggccatggagttcagcgcctcggcggaggacctcgcgctgacctgccatccgcatccgacccgctccgaggcgctgcgccaggcggcgatggacgtgcatggccgggccatgcagaactga

SEQ ID NO: 339598 - DNA, 540 bp, Pseudomonas aeruginosa
atggaacagcccagccgcgaagaccgcctgaacgcctggatcgccaccgagcgggccgcccgcgcccgcctcggcgccagcggaaccctggagctggcgcaagtcgccgcgctctccccgcaggagttcttcgaccgcatcggcagcggcgagctgccctgcccgccctacggcgaactggtcgacttcgttcccatcgagtggtccgaagggcgcttcctgttccagggcaccccggaccgccgccactacaatccgctgggtagcgtgcacggcggctacgccgcgtcgctgctggattcctgcatgggctgcgcgatccatacccggctccaggccggccagggctataccaccaccgacctgcggatcagctacctgcgcgcgctgaccgacaaggtcggtccggtacgcgccgaaggccgggtggtgcacctcggccgctcgacggcggtcgccgagggccggttgtacgatgtcgacgaccgtctctacgccgtcggctcgaccacctgcctggtcctgcacatggccggatga

SEQ ID NO: 339599 - DNA, 561 bp, Pseudomonas aeruginosa
atgcgttatcccgaagaccacaagcagaagacccgccggcgtatcgtcgaggaggctgcccggctgttccgccaggacggcgtcggcgccaccgggctgcaaccgctgatgaaggccctgggcctgacccatggcggcttctacgcgcacttcaagtccaaggacgacctggtggaaaccgcgttgcggcattccgcggcgcaactcgacgaaatcaccgcgcccctggcggaggcggaacgaccgctggcgctgctgatagagcagtacctgtcgccgcgtcaccgcgataaccccggcgccggctgcccgttgccgaccctgtcggcggaactcggccagcgcggcacgccgagcccgaccaccgacagcatcgtgcgcaagcgcctggcgatgatcgaagcggccctggagggcgaggacgcaggcgagcgcgccgtgctgctgctcgcttcgctggtcggcgcgctgcaactgtcgcgcagcgtgcaggatgaggcgctgtcgcaacggatactggaagcgacgcgcaagaagctgctggagcagatggagcgctag

SEQ ID NO: 339600 - DNA, 798 bp, Pseudomonas aeruginosa
atgaacgaacagattggcaatggcgtcgccctggtcaccggcgcctcttccggaatcggcgcgacctacgccgagcacttggcccgccgtggccacgacctgttgctggtggcgcgcgaccggcaacgcctggaagccctggcggatcgacttcgccaagcccacggggtcagggtggagatcctgcgcgccgacctgtccgagcgcgacgataggttgcgggtcgagcgacggttgcgcgacgacgcctcgatcgcgttgctggtgaacaacgccggcgtggcgatgaacggtccgctggccgatgccgacatggaccgggcggagcggatgatcgccctcaacgtggtggccctgacccgcctggctgccggcgcggcggaggggttccgccggcgtggcggcggcgccatcgtcaaccttggttcggtggtggcgctggcgccggagttgttcaatgccgtctatagcgcgaccaaggcctacgtgctgagcctgagccagtcgctgcagcacgagctggccggcagcggcgtttacgtccaggcggtgctgcccggcgtcacccgtaccgagatctgggagcgcagcggcaccggaatcgccgggattcccgcggagatggtgatggaggtcgaggacctggtggaggcggcgctggtcggtttcgatcggcgtgaagcggtgaccatcccgtcgttgccggatgcggccgattggcaggcgctgatgacggcgcgggccaggctcgcgcccaatctgtcgcggcagcggccggccgagcgctacctcggctga

SEQ ID NO: 339601 - DNA, 618 bp, Pseudomonas aeruginosa
atgtatcacggtgaaagactcaatgcctggacccacctgatcggtgcggtcgccgcctgtaccggcgccgtatggctgacggtccaggcgagcctcaacggcagtccgtggaagatcgtcggggtcggcgtctacggcgtcaccctgacgctgctctacagcatctcgaccgcctaccacagcgtgcgcgggcgagcgaaggtggtgatgcgcaagctcgaccacctgtccatctacctgctgatcgccggcagctacacgcctttctgcctggtcacgctgcgcggtccctggggctggacgctgttcggcatcgtctggggcctggcggtactcggcatgctccaggagatcaagccacgctccgaggcgcgagtgctgtcggtggtgatctacgcggtgatgggctggatcgtgctgatcgcggtgaaaccgctgctcgccgccctcggcagcgccggcttcacctggctggcggccggcggcgtgctctataccgtagggatcgtcttctatgcctatgaccaccgcttccgccactggcatggcatctggcacctgttcgtgatcgccggcagcctcctccacttcgtggcgatctggcgctacgtactctag

SEQ ID NO: 339602 - DNA, 855 bp, Pseudomonas aeruginosa
atggtgctcgacctgctgaagagcggggtgctgctggcggtgctggcgtccttcaccttcagcgtgatgaacgccctggtcaaggaagccagcgccaccctgccggctgccgagatcgtgttcttccgcagcgccatcggtaccctgctgatctacctgctgatgcgccaggccggtgtcgccctgtcgcgccagggcgtgccgatgctgctggtgcgcggggtgatgggggcgctgtacctggtctgctatttctacgccatcgcccatatcccgctggcggacgcgagcatcctggcgcacatgtcgccgttcttcgtcatcctcttctccgcgctgttcctcggcgagcggattccccgggcggtctattggctgttgctggtggtggtgctcggcgcgctgatgatcgtcaagccgttcagctattccagctactcggtatacgccgtggtcggcctgctcagtgcggtgttcgccgccggtgcctcggtggcgatccgccaactgagcgcgcggcaccatacctacgagatcgtcttctacttcctggcggtggccaccctggtggccatcccgctgatgtggaacgacttcgtggtgccggcgacgctgcgcgagtgggggctgctgctggccatcggggtggtatcgctactcggccaggtgttcctaacccgcgccttcagtcacgagagcgcgaccatcgttgcggtgacccgctatatcggcatcgtcttcaacgccggctggggctggctgttctggagcgaggtgccggacgcgctgaccatcgccggcggcgtgctgatcgtggtggcgtgcatcgcgctgtcgcggacgaagaagggctga

SEQ ID NO: 339603 - DNA, 1302 bp, Pseudomonas aeruginosa
atgaacgccgctgatgagagcctgggcaacgtcctgctggtcggtctgggcgcggtggcgatccaggtcgcgctggacctgcgccgccacggtgccggtcgcctcggcgcgctgaaccatcccggccggcgcagccagcggatcgccgaggccctggcgcgcggcgcctgcctgcaactggaagggcaggggcagcatcgctggctgtccggcaacgccgcgctggacgtcttccaccaggaccccgctgagcttcgcgacgattggcagaccctggtgctctgcgtgccggccgacagttacctggacgtggtccgcgggttgccctgggagcgactcggcggggtgcgcacgctgctgctggtgtccgccttcatcggcgccaacctgctggtgcgcagcgccctgccggcggggtgccaggcgaccgtgctgagcctgtccagctactacgcggcgaccaaggtgatcgacgagacacaaccgctgcgggccctgaccaaggcggtcaagcgcagggtctacctgggttccagccggccggactgcccggcgcgggagacctggcggcgagtcctggccggcagcggggtggaggtggtacccctggcgacgccggaagcggcggagggccgcaacgtcaccacctacgtgcacagtccgttctttctcggcgagttcgccctcgcccggatactttccgagcaggggccgcccggtttcatgtacaagctctacccggagggacctatcacccccggggccattggcgccatgcggcggctgtggtgcgagctgagcgaactgttgcggcggatgggcgccgagccgttgaacctgctgcggttcctcaacgacgacaactacccggtgcacgagacgatgctgccgcgcgcggccatcgacggcttcgccgaggccggcgccgagcgccaggaatacctgctgttcgtgcgctacgcggcgttgctggtcgatccgttctctccggccgacgagcagggtcgccacttcgacttttccgccgtgccgttccgccgcgtcagtcgcgacgaggatggactctggcggctcccgcgggtgccgctggaggactatcgcaagctggcgctgatcgtcgcgctggccgcccacttcgacctggccatgccgcaggcgcgcagcctgttggcgagctacgagaacgccgtgtcccgattcatcgattgccaaggagcgagccagtgccatccaagcctgtatccgatcgacagccgtccggcggcggacgccatctatcgccaatggtgctcgacctgctga

SEQ ID NO: 339604 - DNA, 792 bp, Pseudomonas aeruginosa
atgcaaggacgcacaccgctgctggaaaccctccgcgaactggaatgcgagattcgcctgctcaccgtctatgcccgcgagtgttgcggctgctacgagatcctcaggcgcaagctcgaccgtctgagcggactgatcggggaggattgcagccgggcgcagtggcaggccgattcggacgaccctgcgttgcaggcgctcggcctgcgcctgcgcgacgcggcggtgcaggccctctgcgaactggagaagcacctttgccagggcgtgctgcatgaacccggcgagatgggccgctacctgggtagcctgctggaatccatccgcggcgaactcgacagcgccgggatagatgctgatgcacgggtcctgttcgtcggctccggtgccctgccgacctcggccctggtgctggcgcgggaggtcggcgcacatttgtgctgcctggacatcgacgaggaggccctgggctatgcccgcgagatcgcccgctgccaggggctggaggcgcgcatgcagttttcctcgctgccgccggcggaactggcgttttcccgcgatgccacgcatttcctgatcgcttcgctggtgcagcagaaaagcgcggtactggcgcagatccgccaggtcatgcgcgccgacgccaaggtcctgctgcgtcacggcagcggcatcaagggactgttcaactacccggttgagccggccgaactggagggctggcgggtttgcgcggagcgggtcagccagccgctgtacgacaccctgatcctggagaaggccggtcgatga

SEQ ID NO: 339605 - DNA, 2127 bp, Pseudomonas aeruginosa
atgagagtcagtgtgtcgcttgtcctcggtgtcggcctcggttgcagcagcccggcgctctgggcggaaacggaaagtcccgcggagcttgaggtcctcactgtcaccgccgaagcggagcgcgcggcgggcccggtgcagggctaccgggccaatcggtcggccagcgcgacgcgcaccgacacccgtatcgaggacatcccgcaagccatcagcgtggtgccgcgccaggtgctcgacgaccttgacagcgctcgtatcgaacgggcgctggacttcgccggcggggtctcgcggcagaacaacttcggcggcctgacgatgttcgagtacaacgtccgtggcttcaccacttcggagttctaccgcgacggcttcagcgccaaccgcggctatatgaacgccccggacagcgccaccatcgagcgcgtggaaatcctcaagggaccggcctccagcctgtacgggcgcggcgatcccggcggcacggtgaacctggtgaccaagaagccccaggccgagcgcttcgcccgcttgcatgccagcgccggcagttgggaccgctaccgctcgaccctggacctgaacacgccgctggacgaagagggcgacctgctctaccggatgaacctggcggtggaggacagcaagggcttccgcgactacgccgacggccagcgcctgctggtggcgccatcgttcagctggcaactggacccggacacctcgttgctggtggaagccgaggtggtgcgcaaccgccaggtcttcgaccgcggcaccgtggcgccgcacaaccacctgggcagcctgccgcgctcgcggttcttcggcgaaccggacgacggcaagatcgacaacaacaacgaaaccctccaggccaccctgcgccatcacttcaacgagcagtggagcctgcgcctggccagccactacaagcatggccacctggacggctacgcctcggagaactccagcctcgccgccgacggctacaccctgcgccgggagtaccgctaccgcgacttcgagtggcacgacagcatcacccagctcgacctgctcggcgatctccataccggctcgatccgccaccagttgctgatgggcctggagtacgagcgctaccacaacgacgaactgatcctgcgtagcatcccgtcgcgcaacccctatgccatcgacatccgccggccggtctacggccagccgaaaccacccttcggacgcgacgaccgcaaccacgaggaagtcgacgcgatggccctcaacctgcaggaccagatcgagttcaacgagaaatggcgcggcctgctcggcgtgcgcttcgaccgctaccgccaggacatgaacgccacgcgcctgaacaatggccgcttccgcgacaccagctcgcagcagacccagcgtgccgccaccccgcgcatcggcgtgctgtaccaggcgaccccggaggtcggcctgttcgccaacgcctcgaaatccttcaagcccaatggcggtaccgacatggccggcaaggccttcgacccggaggaggggcgcggctacgaggcgggggtgaagctcgacctgctcgatggccggctgggcttgaccctcgccgcgttccacctgaaaaagaagaacgtgctcaccgccgacccgagcaatcccggttaccagcagaccgccggcgaggcgcgcagccagggcttcgacctgcagttcagcggccaactcaccgagcagttgcggctgatcggcgcctacgcctatatcgacgccgaagtgaccaaggacgagaacatcgcccgtggcagccgcctgctcaacgtgccgaagcacagcggcagcctgatgggcgtctacgagttccgcgaaggctggctgcacggcgctgacgccggcgcggcggtcaactatgtcggcgagcgcgccggcgacagcagcgacagcggcttcgaactgccggcctacaccaccgtcgacctgctcgcgcactatccgctggcgagcaatgcgaccctcggggtgaacgtcaacaacctcttcgatcgtcgctactacgagcgttcctataacaacgtctgggtcgcccccggcgagccgcgcaacctgaccatgagcctgaccctgaactactga

SEQ ID NO: 339606 - DNA, 1155 bp, Pseudomonas aeruginosa
atgcccaactccatctccaattcctcccgcctgcacagcatcgacgccctgcgcggcctggtgatgctgttcatgctgctcgaccatgtccgcgagacctttttcctgcaccgccaggtcggcgacccgatggacgtcgccagcaccgagccggcgctgttcctcagccgcaccctggcgcacctgtgcgcgccggtgttcgtcttcctcaccggcctgtcggcattcctctacggcgagaagcaccagggacgccgggcggtctcggcgttcctgttcaagcgcgggttgttcctggtggcgctggaactgaccctggtgaacttcgcctggaccttccagttgccgccgacggtgatctacctccaggtgatctgggcgatcggcctgagcatgctcgccctggccgccctgctctggttgccgcgccctctgctcgcggcgctcggcgtgctgctggtggccggccacaacctgctcgatccgctgcatttcgctcccggctcggcctggcacctgccgtgggcggtgctccacgaccgcggctggatcgaagcgggcgacgccctgcgcctgcgcacctcctaccccctgctgccgtggatcggtgtgatcgccctgggctatgccgcaggcaactggttcagcggcgccacgccggcaaccacgcgccgacgctacctgctggcgggcggtggcgggctgctgctcggcttcatcctgctgcgcctgctcaacggctatggcgagaaaccctgggccttcggcgagacgccggcgatcaccctgatgggcttcttcaacgtcaccaagtatccgccgtcgctgctgttcctcgccctcaccctgggaatcggcctgctgctcctggcctggttcgaacgcctggactggagcggtcgcggcaaggccctggtggcgttcggcggagcgccgatgttcttctacctgctgcatctctacctactgaagctgctgtacctgctggcgctggcgatctggggcgccaatcggggcgactacttcggtttctcctcggtgcctgcgctatggctgtgcagcatcctgctggccgtggcgctgtacccggcggtgcactggttcgctggtttcaaggcgcggcggcgggatatcgcctggttgaagtacttctga

SEQ ID NO: 339607 - DNA, 1911 bp, Pseudomonas aeruginosa
atggccgctcgacggactcgcaaagacgatggcagcaactggaccgtggccgacagccgcggcgtatacggcatccgccactggggtgcgggttatttcgccatcaacgatggcggcaatgtcgaagtgcgtccgcagggcgccgactcgacgcccatcgatctctacgagctggtcggccagttgcgcgaggcgggcctgagcctgccgctgctggtgcgcttcccggatatcctgcaggaccgcgtgcgcaagctcaccggcgccttcgacgcgaacatcgagcgcctcgaataccagagccgctataccgcgctgtatccgatcaaggtcaaccagcaggaagcggtggtggagaacatcatcgccaccgagaacgtctccatcggcctggaggcaggctccaagccggaactcatggcggtgctggcgctggccccgaagggcggcaccatcgtctgcaacggctacaaggaccgcgagttcatcaagctggcgctgatggggcagaagctcgggcacaacgtgttcatcgtgatcgagaaggaatccgaggtgcagctggtgatcgaggaggccgccaacgtcggcgtgcagccccaggtcggcctgcgtgtgcggctgtcctcgctggcttcgtcgaagtgggcagacaccggtggcgagaaggccaagttcggcctttccgccgcccagctgctgtcggtggtcgagcgcttccgccaggccggtctcgaccagggcgtgcgcctgctgcatttccacatgggctcgcagatcgccaacctggccgactaccagcacggcttcaaggaagccatccgctactacggcgagctgcgcgcgctcggcctgccggtggatcacatcgacgtcggcggtggccttggcgtcgactacgacggcacccattcgcgcaacgccagctcgatcaactacgacatcgatgactatgccggcgtggtggtcggcatgctcaaggagttctgcgacgcccagggcctgccgcatccgcacatcttctcggagagcggccgggcgctgaccgcgcaccatgcggtgctgatcacccaggtcaccgacgtcgagcggcacaacgacgacgtgccgaagatcgtcgatctcgacgagcagccggagatcgtccgctggctggccgaactgctcggcccgaccgatgccgagatggtcaccgagacctactggcgcgccacccactacatcggcgacgccgccgcgcagtatgccgacggcaagatcagcctggcgcagaaagccctcgccgagcagtgctacttcgctatctgccggcgcctgcacaaccagctcaaggcccgccagcgctcccaccggcaggtcctcgacgaactcaacgacaagctcgccgacaagtacatctgcaacttctcggtgttccagagcctgccggatacctgggccatcggccaggtgctgccgatcctgccgctgcaccgcctgggcgaggagccggatcggcgcgcggtactgcaggacctgacctgcgactccgacggcaagatcacccagtacgtcgacgagcagagcatcgagaccagcctgccggtgcacgaggtgaaggagggcgaggactacctgatcggggtgttcctggtcggcgcctaccaggagatcctcggcgacatgcacaacctgttcggcgacaccgactcggtgaacgtctaccagcgcgcagacggcggcatctatcacgccggcatcgagacccacgacaccatcgaggacatgctgcgctacgtgcacctgtcgccggaggaactgatgaccctctaccgcgacaaggtcgccggggccaagctcaccgcccgcgagcgcaaccagtacctggatgcgctgcgcctggggctgacccgctcggcgtacctgtcctga

SEQ ID NO: 339608 - DNA, 372 bp, Pseudomonas aeruginosa; identical to SEQ ID NO: 318249

SEQ ID NO: 339609 - DNA, 537 bp, Pseudomonas aeruginosa
atggccgcgccgatcagcgccgaagaggtggcccaccgggccgcctccgacgccgaactcatcgcctgggtcgacgagcaggaccgcccgctcggtagcctgccgcgcgcggagctgcgcgagcgcgggctgatcggtcgcggcaccttcatcctgctgttcaactccgccggcgagctgtgcgtgcagcgccggaccctgagcaaggcggtctatccggggtactgggacctcgccgccggcggcatggtccaggccggcgagccctacgccgactccgccgcccgcgaactggaggaagagctgggaatccgcgacgcggttctgcgcgaacatggccgcttcttcttcgacgaaccgggcaaccggctctggtgcgcggtgttttccgctgtctccgatgcgcccttgcgcctgcaggcggaggaaatctccgaagcacgcttcatccgtcccgaactggcgctggaagaggctcgcagcctgccgtactgccccgattccctgcaggcgttgcgcctgtacctggatgcctga

SEQ ID NO: 339610 - DNA, 1071 bp, Pseudomonas aeruginosa
atgctggactggaagaagcgtcgtgggaccatgcgcgatcgcgtggacaattccgtggatgatgtgcgtacctacttcggcggcccctggctggtgcgcgtggtgggaggcctgctgggcgtctacctgctggtggcgatgctggtcggctggtactggagccaggaacccgacctgttccccgtgcagcaggacgcccaggccgccgccgagcgcgccgggcggcagatggtcaccggctacaccacggtggagaccctcaaggaagtggtcgacaccctgctgaccaagccgggcggctacatctccaacgacatcttcccgccgggcatctggatggacaacatgcccagctgggagtatggcgtgctggtccaggtgcgtgacatcagccgggcgctgcgcaaggacttcgcccgttcgcagtcgcagtccaccgaggacgccgacctggctcgcgccgagccgcgcttcaacttcgacaacaagagctgggcgctgccggcgtccgagtcggagtaccaggaaggcatcaagtcgctggaccgctacctggcccgcctgtccgacccgaaccagcccaacgcgcagttctatgcccgcgccgacaacctgaacaactggctgggcgacgtcgccacccgcctgggctcgctgtcccagcgcctgtcggcgagtgtcggccgggtcaagctgaacaccaacatcaagaaccccgaagaagtacagccgggcgaggcgcccaaggtcgaggaagtggtccaggaaaccccctggctgcagatcgacaacgtcttctacgaggcccgtggccaggcctgggcgctgtcgcacctgctgcgcgccatcgaggtcgacttcgccgacgtgctggcgaagaagaacgccacggtcagcgtgcggcagatcatccgcgagctggaggccgcgcaggagccgttgtggagcccgatggtgctgaacggcagcggctacggcatcctggccaaccactcgctggtgatggccaactacatttcccgcgccaacgccgcggtgatcgacctgcgccagctgctttcccagggctga

SEQ ID NO: 339611 - DNA, 132 bp, Pseudomonas aeruginosa; identical to SEQ ID NO: 318246

SEQ ID NO: 339612 - DNA, 1629 bp, Pseudomonas aeruginosa
atgatgaccgagcacgatgacccgaccctggaccgcctgaagcaccacttcgcccagcgagtgatcaaccaggcgcgccaggttctggaggtctggcaacgcctgacccgcgcggagtggaacagcgacggcatggaagaactggccgacgccaccctgcgcctgcagcgctacgccgaacgcttcgagcaagccgagcatgcccagctggccggtgccatcgaccgtaccctggacgtcgtcgaggccaaccgcggccggctttccagcgagtcgatcagcgaactcaaccagttgatgcagcgcctgtcgcgcaccggcctgcggcatggcgaccagctcgagcacaccgtcctgccgccattgcgcaaaccggtctacctggcactgaaggaccgcgaacgcgccgagcgcctggcccagcaactggagttcttcggtctgcaggcgctgagctgcgagaccgccgacgccttccgcgccagcatgcgcgaacgctacccggcggcgatcgtcatggaagtcgacttcgccggccccgacatgggcctgcgactggccagcgaggcccaggccggcctcgaacacaagctgccggtgctgttcttcagcgacagcgagaccgacaccccgacccgcctggccgcagcccgcgccggcggccaggaattcttcaccggcaccctggacgcctccagcgtgctggaaaagatcgagaccctcagccgcctgagcttctacgaaccctaccgggtactgatcgtcgacgactcccgggcccaggcgctgcacaccgagatggtcctcaacagcgccgggatcatcacccgcgcgctcaccgagccgctgtcggtgatggctgagctgagcgacttccagcccgacctgatcatcctcgacatgtacatgcccgagtgcctgggcaccgagttggccaaggtgatccgccagcacgaacgccacgtcagcgtgccgatcatctacctgtccgccgaggacgacctggacaagcagctggacgccatgagcgaaggcggcgacgacttcctcaccaagccgatccgcccgcgccacctgatcgccaccgtgcgcacccgcgccagccgcgcgcgcagcctgaaggcgcggatggtgcgcgacagcctgaccggcctgtacaaccacacccataccctgcaactgctcgaggacgcccgcctgcgcgcgcgtcgcgatggccgtccgctgagcttcgcgatgctcgacatcgaccacttcaagcaggtcaacgaccgtttcggccaccccatgggcgaccgggtgatcaagggcctggcgctgtttctcaagcagcgcctgcgcaagaccgaccacatcggccgctatggcggcgaggagttcgccgtggtccttccggacaccgatctggacgccgcgcgcctggtgctcgacgagattcgccagcgcttcgccgagatccactacccggcgcaaccgaccgacctgcgctgcaccttcagttgcggcatcgccgagctgaccccggacctcgatatcaagagcatggccaagcaggccgacgaagcgctgtaccgggccaagcacggcggacgcaaccggatcgaggtatatcgtcccgacgcccggtaa

SEQ ID NO: 339613 - DNA, 1974 bp, Pseudomonas aeruginosa
atgcgcctcaagcaactcaccaatctcaacaccctgctcctgctcaccgtctgcctcgccctgggaatcaccctgtggtggtcgcaacgcgccatggagcgcccgttccagttgctcgaccagtacctggagctgtcgcagcgcttcgacgaacaggtcgcgcgcaacgtccgccagtacctcggcagcggcgacgccgtacgccagcaggccgcgctgcaggccctggaaagcctcgccgaggccttgccggagctaccgccggacctcgccaggaccctcgcgccaagcctcgcggagttgcgcgaattcagcgccggcgacctgctcgccgccggcaagctcgccggcgacccgcagggcctgctgctacaggccgagcgcgacctcgccggcaacctggaacaatggtccgcctacctggatgccgcgacggagcagccccaggccggcgcctaccgcaccccgctgctgctcgccagcctgcacctgacccgcctcagcctggcccgcgccaagctggtggaaagcgccaacccggccctggccggcgacgtcgagcgcgaactggccaacctgcgcgagcaggccgggcggatcgaggccttgccgttgctcggcgtgctcgacgaacagcgctcggccagcgacgacttcgccgccatgatggggctggccggcgacgccgaggctggcgccggcaatgccgaagaccgcggcgtggcgctgcggcgcgaactcgccagcctgctgcaacgctatccggacgagttgcgccgcacccgcgacctgatcgagcgtcgccagcaactgtccgccgacaccggcgccaaactggacgcggtgcgccaggccctggccaccctggaaccgcaggtgcgcggcgagcgccagcgcctgcaaagccaggtacgcctgatccagggtgggatgatcgccctgatcctgctcatcgccctcgccatcgacagcctgcaaaggcgcctggcacgggtcctcgggcaactggtgccggcgctctcggcctgggccgacggcgacttctcacgccccatatccctgcgtacccgcaccgaggacctgcgcaacctggaggattcgctgaaccgcctgcgcagcttcctcgccgagctggtcggcgcgatccaccgccgcgccgaacaggtcgccggcagcagccagaccctggccgaggtcagcagcggcctgcatgccggggtcgagcgccaggccggcgataccgggcagatccgcgacgccctcggcgacatggaagcggcgatccagcaggtcgccggagacgccagccagaccgccgacgccagtcgcagcgcaggccaggcagtggagcacggccagcgggtgatcggcgagagcctgggcggcctgcgcgagctggtcgacgaggtgcagggcaacgcccagtcgatcgagcgcctggccgaggagtcggcgaccattggcagcgtgctgacggtgatccgctcgatcgccgaacagaccaacctgctcgccctcaatgccgccatcgaggccgcccgcgccggcgaccagggccgcggcttcgccgtggtcgccgaggaagtccgctcgctggcccagcgcaccgccggcgccaccgaggagatccagcagctcatcggccgcctgcaacaggccgcgcggcaatcggtggaggccatgcgcagccaggtcgagcatgccgaacgcaccgccgaacaggccggcgcggcggagggcgcactggacgaagtggtcgccgcgatccataccatcggcgtgatggccgaacgcatcgccgaaggctcgacccagcagagccaggcggtcggcgagattcgctcgcacagcgaacgcatccacgctctgggcggggaaaatctgcggctgatcggccatagccgcgaacagggcgagcaactgcggcaactgggcggcgacctgcgcaccacggtgcaggccttccgcctgtga

SEQ ID NO: 339614 - DNA, 1776 bp, Pseudomonas aeruginosa
atgcgccgcctgctgaccctgatcctcctgctggtcgccctgcccgccggcgcgggcctgttcgacagccgtcccggcgcctccctcggcggcggcctcgatggcggcgacttcctcaaggtcgaccaggcgttcaagcccagcgtcgagcgcagcgacgcgcagcacgtgctgctgcgcttcgtcaacgccgagggctactacctctaccgccaccgcttccagttcaaggtcgagccagcccaggtcagcctcggccaggtgcaactgccggcgggcaagcagcaccacgacgagtacttcggcgataccgaggtctactacaacatcgtcgacctggagattcccctgaacaacccggcccggcagccctataccctggtggtgacctaccagggctgcgccgacaagggcctctgctaccccccggaaaccaggcgcttcgacatcgacggcggtgccgcgacgccagccgcgagcgacgcggccggcaagggcccgctcgagcacaagggcaagcgcagcctgctgttcttcttcctcgccggcctgaccctgaccttcaccccctgcgtgctgccgatgctgccgatcctctccggagtggtcctgcgcggccggccgggcggtggtcgcggcttcgtcctgtcgctcgcctacgtgctgccgatggcgctctgcttcgccctgctcggcgcgctgatgggcatgttcggcgccagcctcaatctccaggcgcaattgcagtcgccctgggtactggtgccattcgcggcgttcttcgcgctgttcgccgtggccatgttcggcttcttcgagctgcgcctgcccggcttcatccgcgaaccgctcgaccgcctggccggcgatgcgcgcggcggctcgatcctcggcgcggccaccctcggcgtgctttccagcctgctggtctcgccctgcgtctccgccccgctggccgcctcgctgctctatatcagcgccagcggcgatgcctgggggggcggcctgcaactgttcgccctcggcctgggcatgggtacgccgctggtggtcttcggcgccggcggcggcgccctgctgcccaagagcggagcctggatgaacggcgtgcgcaacgccttcggcgtgctgttgctggcggtcgccgtgtggctgctggagcgggtggtgtccggcccggtggcgctgatgctctggggcatgctcgccggcggcgccggcctggccctgggcgccctcgaattcaccccgaagagcgccgcacgccgcctgctgcaactgcttggcctgatgttcctgacctacgcggtggccgcctggatcggcgccctgcagggcgagtcggacccgatccatccgctgggccgctcggtgccgtcgatccacgccgggccaccgagcacgcccggcgaatggcagaacctgaccaccccggcgcagctggacgccgccctggccgaggcacgccaggccggcaagccggtgctgctggactggtatgcggactggtgcatcagttgcaaggtcatcgagcgccaggttctcaccgatcccacggtgcaggcacgactgccggcctaccgcctgctgcgcttcgacatcaccgaaagcaacccggcccagcgcggcctgctggaccgctacaacctgttcggtccgccggcgatcctgttcttcgccccgggcggtgacgaatggagcgacttgcgcgtcatcggagagatcgacgccgccgggctcgccgaacgactgcgccgggccgctacccggcagtga

SEQ ID NO: 339615 - DNA, 444 bp, Pseudomonas aeruginosa; identical to SEQ ID NO: 318242

SEQ ID NO: 339616 - DNA, 471 bp, Pseudomonas aeruginosa
atggacattcgtaaagtcaagaaactgatcgagctgctggaagagtccggtatcgacgagctggaaatccgcgaaggcgaagagtcggtacgcatcagccgccacagcaagaccgccgcccagccggtgtacgcacaggctccggccttcgccgctccggtcgccgcgccggcgccggcagccgccgctccggccgccgctgccgcggaaagcgccccggccgctccgaagctgaacggcaacgtggttcgctcgccgatggtcggcaccttctaccgcgccgcctcgccgacctcggccaacttcgtcgaagtcggccagagcgtgaagaaaggcgacatcctgtgcatcgtcgaagccatgaagatgatgaaccacatcgaagccgaaattagcggcaccatcgagtcgatcctggtggagaacggccagccggttgagttcgaccagccgctgttcaccatcgtctaa

SEQ ID NO: 339617 - DNA, 1350 bp, Pseudomonas aeruginosa
atgttggaaaaagtgctgatcgccaaccgcggcgaaatcgccttgcgcatccttcgcgcatgcaaggagctggggatcaagacggtggcggtacactccaccgccgaccgcgagttgatgcacctgtcgctcgccgacgaatcggtgtgcatcggtccggccccggccacccagtcgtacctgcagatcccggcgatcatcgccgcggccgaggtcaccggcgccaccgcgatccaccccggctacggcttcctcgccgagaacgccgacttcgccgagcagatcgaacgctccggcttcaccttcgtcggcccgaccgccgaggtgatccgcctgatgggcgacaaggtctcggccaaggacgccatgaagcgcgccggcgtccccaccgtgccgggctccgacggcccgctgccggaagatgaagagaccgccctggcgatcgcccgcgaggtcggctacccggtgatcatcaaggccgccggcggcggcggtgggcgcggcatgcgcgtggtctacgacgaatccgagctgatcaagtcggccaagctgacccgcaccgaggccggcgcggcgttcggcaacccgatggtctacctggagaagttcctgaccaacccgcgccacgtggaagtccaggtgctttccgacggccagggcaacgccatccacctcggcgaccgcgactgctccctgcagcgccgccaccagaaggtaatcgaagaggcgccggcccccggcatcgacgagaaggcccgccaggaagtcttcgcccgctgcgtccaggcctgcatcgagatcggctaccgcggcgccggcaccttcgagttcctctacgagaacggccgcttctacttcatcgagatgaacactcgcgtgcaggtggagcacccggtatcggagatggtcaccggtgtcgacatcgtcaaggagatgctgcgcatcgcctccggcgagaagctctcgatccgccaggaggacgtggtcatccgcggccatgcgctggaatgccggatcaacgccgaagacccgaagaccttcatgcccagcccgggcaaggtcaagcacttccacgcccccggcggcaacggcgtgcgcgtcgactcgcacctctacagcggctacagcgtaccgccgaactacgactcgctggtcggcaaggtcatcacctacggtgccgaccgcgacgaggcgctggcgcggatgcgcaatgccctggacgagttgatcgtcgacggtatcaagaccaataccgaactgcacaaggacctggtgcgcgacgccgccttctgcaagggcggggtgaacatccactacctggagaagaaactgggtatggacaagcactga

SEQ ID NO: 339618 - DNA, 867 bp, Pseudomonas aeruginosa
atggaacgcatccgccgctggtaccgccaatcgctggccgccgcgaccgaggccgcgacctgcttcgccctgggcttcagggaaagcctgcaacccgccgcactcttccgctccgcgagcctgtgcattctcgtcagcgtgctgtgcacctggctgttcgtgcatttcttcgaaccgatcatccgcctctgcggctgggccgcgctgtacacggcattcagcgtggccaacttcgccctgatccccagcggctcgctgatcgaggccggcagcggtggcccgtacttcgatccgctggcggccttcaacggcctggcaggactggcgcaactggcgttctatttcgtcggctatgccgcgctgttcttcgtcgccctgtacgccgccagcatcgtcttcggcatccgcctgggcctgcgcatcggcctgctcggacaactgaaggaacaggtccgccaacgctacccgcgactggcacctgcctccggcgaaaggatctcgctgtggcgtgccgccggcttccgcctagcaccctggctgggcgtttccggatcgatcctggtcggcctgctggttccgctctacaacggtgtactcctgctgctggcgctggcctacctgaacatccgcttcctgctgcccgccacgctggccgggctggccgatgccggcgagcagctcgccgtgcttcgtgctcgccgcggcagcctgttgctgttcggcctgctgatactgctcctggcgctggtgccgctgctcaacctgctgctgccggcggtgctcggcggcggtacctgccacctggccaatcgcggcctggcgcaactgcgcggcgaggccacggcagagagtggcagcgccggctag

SEQ ID NO: 339619 - DNA, 885 bp, Pseudomonas aeruginosa
atgccctggttacaagttcgcctggccatcaccccggaacaggccgaaacctacgaagacgccctgctcgaagtcggcgccgtctccgtgaccttcatggacgccgaagaccagccgatcttcgagccggacctcggcaccaccccgctgtggtcgcgcacccacctgctggcgctgttcgaagcggacaccgacgagaccgccctgctcgcccacctcgccttgcttaccggcggcgacctgcccgagcaccatgtcgaggaaatcgccgaccaggattgggaacgcagctggatggacaacttccagccgatgcgtttcggccgccgcctgtggatcgtgccgagctggcacgccgcccccgagccggacgcggtcaacctgctgctcgatccgggcctggccttcggcaccggcacccacccgaccaccgcgctgtgcctggaatggctcgacggccaggaactggccggccggcaggtgctcgacttcggttgcggctcgggaatcctcgccatcgccgcgctgctgctcggcgccgaacgggcggtcggcagcgacatcgatccacaggccctggaagcctcgcgcgacaatgcctcgcgcaacggtatcgagcccgcgcggttccctgtctacctgccggcggacctgccgcagcgacaggccgacgtgctggtcgccaatatcctcgccggcccgctggtttccctcgccccgcaactgaccggcctggtacgtcccggcggcctgctggcgctgtccggcatcctcgccgagcaggccgaggaggtccgcgcggcctactccgcacacttcgatctcgacccgaccgccgagcgcgaaggctggatccgcatcagcggccgccgccgcgccgattga

SEQ ID NO: 339620 - DNA, 1278 bp, Pseudomonas aeruginosa
atgagcgaaagcgtcatcacccaatgtccccattgcagcaccagtttccgcgtcaacgacgcgcaactgggcgccgccaatggcgcggtccgctgcggcacctgcctgaaagtcttcaacgccctgcaacaccaggtcggtggcgcgccgcgcgcgaacgctccttcggcagccgaagcgaagccggccgccgctccgccacccgcgcccagcgtcgcggccgccacctcggccgcgcccccggcagcgcgcccgcgcgacgaaaccctgtggatccatgacgacctcgatctggacagcctcaacctcgacgaggaactggccaagctcgacgaattcgagctgaaccaggagttctccagcatcgagaaggccccgcgaccggcggagagcctgctggcgcgccgcgacgacgaacgcgatccacacgacgaacgctgggccgaggcgctgatcgccgatgccgaaccagcccagccggcgcgcggcaatccgcgccaggaaccgagcctcggcgaaccgctggcggaagagcgggtatccttcgtgccgctgcgccgcgccgaggatccgccggaacttcgcctcagcctcgatgacgacgatgacgacgagccccgcctcggcaagcgccgccacggactgagcgccctggatgaagacgacgaggaaagcgccgaggaacagtccgtcgcgcccctgggcagcgcccgcaagccggacgaggcgccggtcgagagtctcgaccagttgcgcgacgagccgctgcaactggcctgggagaagccccggcgccaatggccgcggcgtctcggttggctgctgctgatcctgctggcgctgggtggtctcgccgctcagtacgtcgcctaccatttcgacgagctggcgcgccaggacgcctatcgcccctggttcgcccagctctgcccggaaatcggctgcacccttccctccaaggtcgacgtggagcagatcaggagcagcaacctggtggtccgcagccatcccgaattcagcggcgcgctggtggtcgacgcgatcatctacaaccgcgccagcttctcgcagccgttcccgctgctggaactgcgcttcgccgacctcaacggccacctcatcgccaatcgccgcttcaagcccggcgagtacctcggcggcgagctggccggacgaacggaaatgccaccgcaggtaccgatccacgtgtcgctggacatcctcgacccgggtccgaaggcggtgaactacagcctgagcttccattccccggagtga

SEQ ID NO: 339621 - DNA, 999 bp, Pseudomonas aeruginosa
atgtcggtggtacgcatcggcccatatacactgcccaacagactgatcctcgcgccgatggccggggtgaccgatcgtccgttccgtcagctttgccgtcgccttggcgccgggatggtggtatcggagatggtgaccagcgacgtccgcctgtggaacagccgcaagtcgcgcctgcgcctgatccacgatggcgaggacgagccgcgctctgtgcagatcgccggcggcgatccggccatgctggccgaggccgcgcagcgcaatgtggaactcggtgcgcagatcatcgacatcaacatgggctgcccggcgaagaaggtatgcaacaaggcagcggggtccgccctgctgcgggacgaggcgctggtcgccgagatcctcgatgccgtggtcagggcggtcgacgtaccggtcaccctgaagatccggaccggctgggaccgggacaaccgtaacggcgtcagcgtcgcgaggctcgccgaacaggcggggatccaggctcttgcggtacatggccggacccgcgccgacctgtacaccggggaggcggagtacgagaccatcgcggcgatcaagcaggccgtgtcgataccggtgttcgccaatggcgacatcgattcgccggagaaggccaggaaagtcatcgagcagaccggggtggatgccctgctgatcggtcgggccgcccagggaagaccgtggattttccgcgagatcgaccattacctgcggaccggcgagcacctgccggcggcgccgcttcccgaagtgcagagcatcctgctcgaacacctcgcggagctgcaccttttttatggggaagaaatgggtgtgcggatcgcccgcaagcatgtggggtggtatctcgcgactctgccgggcgcaagggaattccgcgcccagttcaatcgtttgcaggacacggatgcgcagtgcgccagcgtcaggcagttcttcgccgagcgccagaacaacggaacaggggtggccgcatga

SEQ ID NO: 339622 - DNA, 324 bp, Pseudomonas aeruginosa
atgacaacgatgacgaccgagactttagtgagtggaacaacgcccgtgagcgacaacgccaacctgaaacagcacctcaccacgccgacgcaagaagggcagaccctgcgcgacagcgtggagaaggcattgcacaactacttcgcccacctcgaagggcagccggtcacggacgtttacaacatggtgctctgcgaagtcgaagcgccgctgctggaaaccgtcatgaaccacgtcaaggggaaccagaccaaggcctccgagctgctcggcctgaaccgcgggaccctgcgcaagaaactcaagcaatacgaccttctttaa

SEQ ID NO: 339623 - DNA, 1608 bp, Pseudomonas aeruginosa
atgaccgaccaaaccacccgcctgcccatccgccgcgcgctgatcagcgtttccgacaagaccggcgtcgtcgacttcgcccgtgagctggtcgccctcggcgtggaaatcctttccaccggcggcacctacaagctgctccgggacaacggcatctctgccgtggaagtggccgactacaccggcttcccggaaatgatggacggtcgggtgaagaccctgcacccgaaggtgcacggcggtatcctcggtcgccgcgacctggacggcgcggtcatggagcagcacggcatcaagccgatcgacctggtggcggtcaacctgtatcccttcgaggccacggtggccaggcccgactgcgacctgcctaccgccatcgagaacatcgatatcggcgggccgaccatggtccgttcggcggcgaagaaccacaaggatgtcgccatcgtggtcaatgccggcgactacgccgccgtgatcgaatccctcaaggccggcggcctgacctacgcccagcgtttcgacctggccctcaaggcgttcgagcacacctccgcctacgacggcatgatcgccaactacctgggtaccatcgaccagacccgcgataccctaggcaccgccgaccgcggcgccttcccgcgcaccttcaacagccagttcgtcaaggcccaggaaatgcgctacggcgagaacccgcaccagagcgcggcgttctacgtcgaggcgaagaagggcgaggccagcgtctccaccgccatccagttgcagggcaaggaactgtcgttcaacaacgtcgccgacaccgacgccgccctggaatgcgtgaagagcttcctcaagccggcctgcgtgatcgtcaagcatgccaacccctgcggcgtcgccgtggtgccggaagacgaaggcggcatccgcaaggcctacgacctggcctacgccaccgatagcgaatcggcgttcggcggcatcatcgccttcaaccgcgagctggacggcgaaaccgccaaggccatcgtcgagcgccagttcgtcgaggtgatcatcgcaccgaagatttccgccgccgcccgcgaggtggtcgccgccaaggccaacgtacgcctgctcgaatgcggcgaatggccagccgagcgcgccccgggctgggacttcaagcgggtcaacggcggcctgctggtacagagccgcgacatcggcatgatcaaggccgaggacctgaagatcgtcactcgccgcgcgcccaccgagcaggagatccacgacctgatcttcgcctggaaggtggccaagttcgtcaagtccaacgccatcgtctacgccaggaaccgccagaccgtcggcgtcggcgccggccagatgagccgggtcaactccgcacggatcgccgcgatcaaggccgagcacgccggcctggaagtgaaaggcgcggtgatggcctcggacgccttcttcccgttccgcgacggcatcgacaacgcggccaaggccggcatcaccgcggtgatccagccgggcggctcgatgcgcgacaacgaagtgatcgcggcggccgacgaggcggatatcgcgatggtgttcactggcatgcgccatttccgccattga

SEQ ID NO: 339624 - DNA, 1290 bp, Pseudomonas aeruginosa
atgaacgtactcatcatcggcagcggcggtcgtgaacatgccctggcctggaaagtcgcccaggacccgcgcgtggcgaaggtcttcgtcgccccgggcaacgccggcaccgccaccgaagccaagtgcgagaacgtcgccatcgacgtgctggccctggagcaactggccgacttcgccgcgaagaacgtccagttgaccatcgtcggccccgaggcgccgctggtggcaggcgtggtcgacctgttccgcgagcgcggcctggatatcttcggcccgaccgccggcgccgcccagctggaaggctcgaaggccttcaccaaggacttcctcgcccgccaccggatccccaccgccgcctatcgcaacttcaccgaggtcgagccggccctggcctacctgcgcgagcagggcgcgcccatcgtcatcaaggccgatggcctggccgcgggcaagggcgtgatcgtcgccatgaacctggacgaagccgaagccgccgtgcgcgacatgctcgccggcaatgccttcggcgacgccggctcgcgcgtggtgatcgaggagttcctcgatggcgaggaggccagcttcatcgtcatggtcgacggccagaacgtgctgccgatggccaccagccaggaccacaagcgcgtcggcgatggcgacagcgggccgaacaccggcggcatgggcgcctactcgccggccccggtggtcaccgccgaggtccaccagcgggtgctggacgaagtgatctacccgacggtgcgcggcatggccgaggaaggcaacgtctataccggcttcctctatgccggcctgatgatcgacaagagcggcgcgcccaaggtcatcgaattcaactgccgcttcggcgatccggaaacccagccgatcatggtccgcctggagtcctccctggtcctgctggtcgaggccgccctggccaaggcgctggacaaggtcgaggcgacctgggacccgcgtccgaccgttggcgtggtactggccgccggcggctatccgggcgactacgccaagggcgaggtcatcgaaggcctggccgaggccgccgcgctggacggcaaggtgttccacgccggcaccgcgctgaaggatggccaggtggtcacctccggcggccgcgtgctctgcgccaccgccatcggcgagagcgtgtccgccgcccagcaacaggcctatcgcctggccgagaagatccgctggaacggctgcttctaccgcaaggacatcggctaccgtgccatcgcccgcgagcgcggcgagtcctga

SEQ ID NO: 339625 - DNA, 2829 bp, Pseudomonas aeruginosa
gtggtacggcttcggatcgccataggactactcgtcagcttcctgctgcttctgctcggtccgatgtcgccggcggtcgcggacgacgccggcgtttccagcgttcccctgcaaaccaccgccactactcccagcgccaaccagaactggcgcctgctgcgcgacgagagcgcgcaactgcggatcgccgacgtcctccagcgcaaggagcagttccgcccgctggccaagcgctccttcatcttccccgccagcccccaggcggtctggctgcaggtccagcttcccgcgcagaaggtgccgagctggctgtggatcttcgccccgcgggtgcagtatctggactactacctggtgcaggacggccaactggtgcgggaccagcacaccggcgagtcgcgaccgttccaggagcgcccgctgccctcgcgctcctacctgttctcgctgccggtcgacggcaagccgatgaccctgtacgtgcggatgacctccaaccatccactgatggcctggttcgaccagatcgacgaagccggcctggtcggcctggagaagcccgcctacgccttcggcatgctgctcggcggcatgctcctgctgctgatgtacaacctgatccgcttcgcctactcgcgcagcgccagcagcctgtggctggcggcggtgcacgcggcgctggcggtctgcgccgcggcgaacctggggctggtggcgttctggctgccgggactcaagttcaaccagtcgctgaccgccgacctcggcgccctcggcgccgcggtgagcctgctgtggttcgcctgcagcttcttccgcggcactgcggaaagccgcctgaaccgcctcctgcaaggcgaggcgctgttgatcctggcggtcggcgcgatcatcgccttcacccagcaactctggttcagctggctgatctacctgctggtgatcctcagttcgctcagcgtcccgctggtcgcggcctggcactggtatcgcggctaccagccggcgcgcctgatcgttgccgggatgatcgtgttcaacgccggcttcatggtgttcctgccggtgctgttcggcaccaagcaactcgatccgggctggctggtgctcggcgtgttcagcttcgccaccctcgccgggctggtcctgagcgtctcgctcaccgaacgccagcggctgatccagcagctcaacctgcaacagcgcaccagcgaggcggcgcacaccgcggaattgcagaccaaggccgagttcctggccaagatcagccacgagatccgcacgcccatgaacggcgtgctggggatgaccgaactgctcctcggcaccccgttgtcggcgaagcagcgcgactacgtgcagaccatccacagcgccggcaacgagctgctcacgctgatcaacgagatcctcgacatctccaagctggagtccggacagatcgagctggacgaagtgcagttcgacctcaacgcgctgatcgaggactgcctggatatcttccgggtcaaggccgagcagcagcgcatcgagctgatcagcttcacccagccgcaggtgccgcgggtcatcggcggcgatccgacgcgcctgcgccaggtggtcctgagcctgctggacaacgcgttcaagcagaccgaggaaggcgagatcctgctggtggtggccctcgacgaccagggcgagacaccgcgcctgcgcatcgccgtgcaggacagcggccacccgttcgacgccaaggagcgcgaggcgctgctcaccgccgagctgcacagcggcgacttcctttccgccagcaagctcggcagccacctcggcctgatcatcgcccgccaactggtgcggctgatgggcggggagttcggcatccagtccggcagcagccagggcaccaccctgtcgctgaccctgccgctcgacccgcagcagttggagaaccccaccgccgacctcgacggcccgctgcagggcgcccggctgctggtggtggacgacaacgaaacctgccgcaaggtgctggtgcagcagtgcagcggctggggcctgaacgtcagcgcggtgtcgtccggcaaggaggcgctggcccagttgcgcaccaaggcgcacctgcgcgagtacttcgacgtggtcctgctcgaccaggacatgcccggcatgaccggcatgcaactggcggcgaagatcaaggaagaccccaacctcaaccacgacatcctgctgatcatgctcaccgggatcagcaacgcgccgagcaagatcatcgcccgcaacgccgggatcaagcgcatcctggccaagccggtggccggctacacgctgaaggcgaccctcgccgacgaactcgcccagcgcggcgtcagcggcgtcaccaactacctgcaaccggccaaggaagcgcaggcgccgagcctgccgagcgatttccggatcctcgtcgccgaggacaacagcatctccaccaaggtcatccgcggcatgttgaacaagctcaacctccagccggacaccgccagcaacggccaggaggcgctcagcgcgatgaaggcgacccagtacgacctggtgctgatggactgcgagatgccggttctggacggcttctccgccaccgagcagctccgcgcctgggaagcccacgaacagcgcccgcataccccggtggtggcgctcaccgcgcacatcctcagcgaacacaaggaacgcgcgcggctggtcggcatggacgggcacatggccaagccggtggagctgtcgcaattgcgtgagctgatcgcctactgggtcggcgaacgcgatcgccgccgccagggcgacgccctgccctcctga

SEQ ID NO: 339626 - DNA, 594 bp, Pseudomonas aeruginosa
atgcatttgctgttcagcgtctacctgaagatgctggtgctctatagccccttcttcgtgctgtcctgcttcatcagcctcagccgcggcttcggcccgcgcgaccgcaagcgcatggcctggcgggtggccctggcggcgctgatcgccagcgtcgcgctgtacctgttcggccgctacatcttcatcctcttcggtatcaccgccgacgccttccgcatcggcgccggcagcgtgctattcatctccgcgctgggcatggcccagggccgcgcggcggtgcagagcgacaacgtgcagcaggacgtgaccatcgtcccactgaccattcctctcaccgtcggccccggcaccatcggcgcgctgctggtgatgggcgtcggccagggctgggaggccaagctgatctccctggtggcgatcttcctcgcctgcctgaccctcggcaccacgctctatctttccgaccgcatcgaacgcctgcttggcgaccagggcctgcagatcgtcagtcgcctgatggggctgttcgtctgcgcgctggcggcgcagatcatcgtcaccggcctgaagggttcgctgttcccaggctga

SEQ ID NO: 339627 - DNA, 1266 bp, Pseudomonas aeruginosa
atgaaacgtcgcagtctgctcaaggccttcacgctgtccgcgtccatcgcttccatgggcctgtcctggtccatccaggccgccgaaaccatcaaggtcggcatccttcactcgctgtccgggaccatggcgatctccgagacctcgctgaaggacatggtcctgatgaccatcgacgagatcaacgccaagggcggggtcaacggcaggaagctggaggcggtggtggtcgatcccgcgtcgaactggccgctgttcgcggaaaaggcccgccagttgctgacccaggacaaggtcgcggtggtcttcggttgctggacctcggtgtcgcgcaaatcggtgttgccggtgttcgaggaactcaacggattgctgttctacccggtccagtacgagggcgaggaactctcgccgaacgtcttctataccggcgcggcgccgaaccagcaggcgatcccggcggtggagtacctgatgagcgaggacggcggcggtgccaggcgcttcttcctgctcggcaccgactatgtctacccgcgcaccaccaacaagatcctgcgcgccttcctgcacagcaagggcgtggacgacaaggacatccaggaggtctacacgccattcggccacagcgactaccagaccatcgtcgccgacatcaagaagttcgccgcaggcggcaagaccgcggtggtctccaccgtcaacggcgactccaacgtgcccttctacaaggaactggccaaccagggcctggaagccaccgaggtgccggtggtggccttctccgtaggcgaggaagaactgcgcggcatcgacaccaagccgctggtcggcaacctggcggcatggaactacttcgagtcggtgagcaatccggtcaacgagaagttcgtcgccgactggaaagcctacgccaaggcgaagaacctgccgaactacgccaccgcggtgaccaacgaccccatggaagccacctacgtcggcatccatatgtgggcgcaggccgtggaaaaggccggcagcaccgaggtcgacaaggttcgcgaggcgatggccgggcaaagcttcaaggcgccatccggctacacgctggtcatggacaagagcaaccaccacctgcacaagccggtgatgatcggcgagatccaggacgacggccagttcgaagtggtctggaagacccccgaaccgcttcgcgcgcaaccctggagcccgttcatcccgggcaacgagaagaagccggagcatgcgctgaagagcaactga

SEQ ID NO: 339628 - DNA, 1590 bp, Pseudomonas aeruginosa
atgccccttgccctcctcacccgcccgctccaggcctgtgtcctggtcctggccgcccttctcgcggtgacggcctacgccggaccggcgcaggacttcgccgctgccgacaacggcggtcgcgcccacctgctcgaacactgggcggcgacgcccgacgccgatcgcctggcctttctcgaagcactgcgccacaaccgcattgcgctggacagccgccagcagccattcatcctcggcgccgaccagcgtttccaggccgccgaaggcgacgccctgccggacggcgagccgaagccgctgcgcctgaacaatcgcctgcgcggcctgctcaacaccgccctggccagccaccagttggtggccaacgaagtgccgctgcggctggccgccgcgcagcagttgcagaaaaccgccaaggccgcgcaacggccgctgctcgaagcgcgcctgcggatcgagagcgacgctggcgtgaaggaagccctcggcctggccctggccaacctgcaactcggcgatcccgacccggcgctacgcctttccgccgtgcgcctgctcggcgagtccggcgatccgctggcgcgaacccgtctggagaacctgctcgacccgacggtagaaccggaggaaggcgtgcgcatcgccgccgccaccagcctggcccaggtcaagcgccggctgctggtcggcgacctgctcggccaggccttcagcggcctgtcgctgggctcgatcctgctgctcgcggcgctcggcctggcgatcacctacggcctgctcggggtgatcaacatggcccacggcgaaatgctcatgctcggcgcctattccacctacgtggtgcaactgctgttccagcgcctggcgccggaatggctagcgctctacccgttgctggcgctaccggtggcgttctgcgtcagcgccgccatcggcatggccctggagcgcacggtgatccgccatctctacggccggccgctggaaaccctgctcgccacctggggcatcagcctggtgctgatccagctggtgcggatgctgttcggcgcgcagaacgtcgaggtagccaacccggcctggctgtccggcggcatccaggtgctgccgaacctggtgctgccgtggaaccgcatcgtcatcatcggcttcgccctgttcgtgctgctcctcacctggctgctgctgaaccgcacgcggctcggcctgaacgtccgcgcggtgacccagaaccgcaacatggcggcctgctgcggggtgcccacagggcgcgtggacatgctcgccttcggtctcggctcgggcatcgccgggctcggcggggtagccctgtcgcaggtcggcaacgtcggcccggacctcggccagggctacatcatcgactccttcctggtggtggtgctcggcggcgtcggccagctcgccggcagcgtcctcgccgccttcggcctcggcgtggcgaacaagatcctcgaaccgcagatcggcgcggtgctgggcaagatcctgatcctcgcgctgatcgtcctgttcatccagaaacgcccgcagggactgttcgccctgaaagggagggtcatcgattga

SEQ ID NO: 339629 - DNA, 1080 bp, Pseudomonas aeruginosa
ttgaaccagccactcaccgtcaccctcgcccgccgggccggcggccgcgtcaccgctatcgcgctcggcgcagccttcgccacgctgctggccatgccgctgctgcacctgctgccggcggacagcgcgctgcacctctcggcctacagcctgaccctgaccggcaagatcctctgctacgccatcgtcgccctcgccctcgacctggtctggggctacgccggcctgctgtccctcggccacgggctgttcttcgccctcggcggctacgccatgggcatgtacctgatgcgccaggcctccggcgacagcctgccggcgttcatgaccttcctttcctggaacgaactgccctggtactgggccggcacccagcacttcctctgggcgctgtgcctggtggtgctggtgcccggcgcgctggccttcgccttcggctacttcgccttccgctcgcggatccgcggcgtgtacttctcgatcatgacccaggccctgaccttcgccggcatgctgctgttcttccgcaacgagaccggtttcggcggcaacaacggcttcaccgacttccgcagcattctcggcttcccgatcaccgcgccgggcacccgcgccgccctgttcctcgccaccgtcgcgctgctcgcggccagcctgctgctcggctggcgcctggcgcggagcaagttcggccgggtcctcaccgcgctgcgcgacgccgagaaccgcctgatgttctgcggctacgacccgcgcggctacaaactcttcgtctggaccctgagcgcggtgctctgcggcctcgccggcgcgctgttcgtgccgcaggtggggatcatcaaccccagcgagatgtcgccgaccaactccatcgaagccgccgtctgggtcgccctcggcggacgcggcaccctgctcggcccgctgctcggcgccggcgtggtgaacggcgcgaagagctggttcaccgtggccttcccggaatactggctgttcttcctcggcgcgctgttcatcgtcgtcaccctgtacctgccgcgcggcctgctcggcctgctgcgcaaggagaaggagcaatga

SEQ ID NO: 339630 - DNA, 858 bp, Pseudomonas aeruginosa
atgaggaccaccccgcacctgatgctcgaaccggccttccaccccggcctcgataccgccggcagcggccgcgacgccatcggcctgggcgccgccaccagcggccgactggacgcgcgccacggcaccatcctcagcctggaagacatcaacgtcagcttcgacggcttcaaggccctgcgcgacctgaccctgtacatcggcgtcggcgaattgcgctgcatcatcggccccaacggcgccggcaagaccaccctgatggacgtgatcaccggcaagacccgcccgcagagcggtaccgcgtatttcggcgacaccctcgacctgacccgcatgagcgaggtgcagatcgcccaggccgggatcggccgcaagttccagaagcccacggtgttcgaggccctgagcgtgttcgagaacctcgaactggcgcagagggccgacaagtcggtgtgggccagcctgcgcgcgcggctcgacggcacgcagagggaacgcatcgaggaggtgctcgccaccatccgcctgctggagtcgcggcagcgtccggcgggtttgctgtcccacggccagaagcagttcctcgagatcggcatgctgctggtgcaggaaccgcagttgctgctgctcgacgagccggtggcgggcatgaccgatgccgagaccgaattcaccgccgagctgttcaagtccctggcgcgcaagcactcgctgatggtggtggagcacgacatgggtttcgtcggcagcatcgccgaccatgtcaccgtgctgcaccagggccacgtgctggccgaaggctcgctggcggaggtacaggccgacgaacaggtgatcgaggtctacctcggtcgctga

SEQ ID NO: 339631 - DNA, 699 bp, Pseudomonas aeruginosa
atgctgcaagtcgacaagctgcaccagtactacggcggtagccatatcctccgtggcctgagcttcgaggcgaaggtgggcgaggtgacctgcctgctcggtcgcaacggggtgggcaagaccaccctgctgcgctgcctgatgggcctggtccctgcccgcgagggccaggtcgcctgggaaggccgttcgctcaccggactcaggccgcaccagcgggtccgcgccgggatcgcctacgtgccgcagggacgggaaatcttcccccggctgacggtggaagagaacctgctgatgggactgtcccgtttcagcgccagggacgcccggacggtgccggacttcatctacgagctgttcccggtcctgcgcgaaatgaaacagcgccgcggcggcgacctctccggcggccagcagcagcaactggcgatcggccgcgccctggccagccagccgcgactgctgatcctcgacgaacccacggaaggcatccagccttcggtgatcaaggagatcggcacggtcgtccgcagcctggcggcgcgcggcgacatggcgatcctgctggtcgagcagttctacgacttcgccgccgaactggccgaccaatacctggtgatggcgcgcggcgagatcgtccagcagggccgcggccgcgacatggagagcgagggcgtgcgcgggctggtggcgatttga

SEQ ID NO: 339632 - DNA, 453 bp, Pseudomonas aeruginosa
atgaccgtcactctgcgcccggccgtccaggccgacgcgggcttcgccgcgctctgcgtcgccgccgcctatgccccgtggatcgcggtgatcggccgcaagccctggccgatgacccaggactaccacgaggtgatcgccagcgaccgggtcctcatcgccgagcacgacggccagccggtcggcctgctggtgacccgggaaaccgccgacggcttcctcgtcgacaacctcgccgtgcttcccgaatgcaagggccagggcatcggccgacagctgctggaacgcgccgagcgcgacgcgacgagcctcggctaccgctcgctgtacctctacaccaacgagcggatgacggaaaacatcgcgctctacgccagggtcggctacctcgaatacgaacgccgccaggaagagggattccgccgcgtgttcatgcgcaaggccctggcctga

SEQ ID NO: 339633 - DNA, 843 bp, Pseudomonas aeruginosa
atgaccgccgccctccccgacctgagcttccaccccgcctggcacgcccagctggagctggcctacgcccgcgccggcgacgccacacgcccggtgacgcggcgccacgccggaccgctgcgggtgcagaagcacctctacgccgaaggcccggaagtctgccagcacatcctcgtgcatccgcccggcggcatcgccggcggcgacagcctggccttcgacgtgcgcctcggcgaacgcgcctgggcccagctcaccagccccggcgcggccaagtggtaccgcgccgcctgcccgtcgcggcagaccctggagatccacctggagcccggcgccaccctggaatggctgccgcaggaaagcatcgtcttcgccggcgcccaggccgaactggaaacccgtatccaactgcgcggcgacgcccgcctgttctactgggacatggtcgccctcggccgcccggccagcggcgagcgcttcgccagcggccatttcgtcgcggccctggacatccgccgcgacgaccgcctgctctggcacgagcgccagcgcatcgacggcggcgaccgcctgctcgactcgccgatcggcctcgccgggcacccggtgctggcgaccctggtcgccagcggcgagatcgacaccgacctgctgcaacgctgccgcgcgctcccctgcgccggccgcggcaacctcagccagttgcccggcggcctgctggtggcgcgctgcctggccgacgaggcgctgcacgcgcgagcctggctgatcgaactctggcgcctgctgcggccggcgctgctcggccgcgaggccgttcccccacgcatctggagtacctga

SEQ ID NO: 339634 - DNA, 303 bp, Pseudomonas aeruginosa
atggacttgtccccccgcgagaaagacaagctgctgatcttcaccgccggcctgctcgccgagcgccggctggcacgcggtctcaagctgaactacccggaggcggtggcgctgatctccgccgccctgctggagggcgcgcgcgacggccgcagcgtcgccgaactgatgcactacggcaccaccctgctgagccgcgagcaggtgatggagggcgtgccggagatgatcccggacatccaggtggaggccaccttccccgacggcaccaagctggtgaccgtccaccagcccatcgcctga

SEQ ID NO: 339635 - DNA, 519 bp, Pseudomonas aeruginosa
atgagcgcttcgatccgcgacgccggcgtcgccgacctgcccggcatcctcgccatctacaacgacgccgtgggcaataccacggcgatctggaacgaaaccccggtggacctggccaaccgccaggcctggttcgacacccgcgcccgccagggctacccgatcctggtggcgagcgacgccgccggcgaagtgctcggctacgccgcctacggcgactggcgacccttcgagggcttccgcggcaccgtcgagcactccgtctacgtgcgcgacgaccagcgcggcaaaggcctcggcgtgcaactgctacaggcgctgatcgaacgtgcgcgggcccagggactgcacgtcatggtggccgccatcgaaagcggcaatgccgcctcgatcggcctgcaccggcgtctcggcttcgagatcagcgggcagatgccgcaggtgggccagaagttcggccgctggctcgacctgaccttcatgcaactgaacctcgacccgacgcgcagcgcgccctga

SEQ ID NO: 339636 - DNA, 306 bp, Pseudomonas aeruginosa
atgatccccggtgaatacgacatccagcccggcgatatcgaactcaacgccggccgccgcaccctcgccctgagcgtggcgaacaccggtgaccggccgatccaggtcggctcgcactaccacttcttcgaggtcaacgacgccctcgccttcgaccgtccggccacccgtggcatgcgcctgaacatcgccgccggcaccgcggtgcgcttcgaaccggggcagagccgcgaggtggagctggtggaaatcggcggcggacggcgggtatacggcttcgccgggcgggtgatgggggacctctag

SEQ ID NO: 339637 - DNA, 1701 bp, Pseudomonas aeruginosa
atgaaaatcagcagacaagcctacgccgacatgttcggccccaccgtcggcgaccgcgtgcgcctggccgacaccgacctgtggctcgaggtggaacgggacttcaccgtctatggcgaggaagtgaagttcggcggcggcaaggtcatccgcgacggcatgggccagagccagctgggcgcggcgcaggtggtcgacacggtgatcaccaacgcgctgatcctcgaccactggggcgtagtcaaggccgacgtcggtctcaaggacgggcgcatccaggccatcggcaaggccggcaacccggacatccagcccggggtgaacatcgccatcggcgccggcaccgaggtgatcgccggcgagggcatgatcctcaccgccggcggcatcgacacgcacatccacttcatctgcccgcagcagatcgaagaggcgctgatgagcggcgtcaccaccatgatcggcggcggcaccggccccgccgccgggaccaacgccaccacctgcacctccggtccctggcacatggcgcggatgctccaggccgccgacgccttcccgatgaacatcggcttcaccggcaagggcaacgccagcctgccgctgccgctggaggagcaggtactcgccggcgccatcggcctgaagctgcacgaggactggggcagcaccccggcggcgatcgacaactgcctggaggtggccgagcgccacgacatccaggtggcgatccacaccgacaccctcaacgaatccggcttcgtcgagaccaccctcggcgccttcaagggccgcaccatccacacctaccacaccgagggcgccggcggcggccacgcaccggacatcatcaaggcctgcggcttcgccaacgtgctgcccagctcgaccaacccgacacggccgttcacccgcaataccatcgacgagcacctggacatgctgatggtctgccaccacctcgacccggccatcgccgaggacgtggccttcgccgagtcgcgcatccgccgcgagaccatcgccgccgaggacatcctccacgacctcggcgcgttcagcatgatcagctccgacagccaggccatgggccgggtcggcgaagtgatcacgcgcacctggcagaccgccgacaagatgaagcgccagcgcggccgcctcgacggcgacggtgcgcgcaacgacaacttccgcgccaggcgctacatcgccaagtacaccatcaacccggcgatcacccacggcatcagccatgaagtgggctccgtcgaagccggcaagtgggccgacctggtgctctggcgcccggccttcttcggcgtcaagccgagcctgatcctcaagggcggggccatcgccgccagcctgatgggcgacatcaacggctcgatccccacgccgcagccggtgcactaccggccgatgttcgccagctacgccggcagccgtcacgcgaccagcctgaccttcgtcagccaggccgccttcgccgccggcgtaccgcagcagctcggcctgcgcaaggccatcggcgtggtcagcggctgtcgtggtgtgcagaagaccgacctgatccacaacggctacctgccgaccatcgaggtcgacgcacagaactaccaggtacgcgccgacggccagttgctctggtgcgaaccggcggacgtgctgccgatggcacagcgctatttcctgttctga

SEQ ID NO: 339638 - DNA, 1368 bp, Pseudomonas aeruginosa
atgtcctcccgccaatcgtcccgcaacgcttccaccccgtatctggccaaggccttccaggcgacggccatcgtcgtggtcagctacttcctctactggacctaccagctctaccagtacggcgagattcccatcagcaagaaggacgtgatgctgcgccaagccatcctcgcgcgctttccggcggactacgaggtggagatcaagggcgccgacctgctcggcttcggcgagaaattcctggtcgcctacggcaatcggcgcttcgtcggcaaggccttcgccatggacgaccaggtcatcgagcgcctggagcggaaccagggacggaccaacctgccgctggtgaaggtgttctacatcgccgaacccggcctcctctcctcgctgctcaacctctccccgttcctggatatccagaagaacatggtcgagctgagcctccgggaataccggaagatccagttggtccccttcgatccggacgcgaagcggaaaccgcgcgagcagttcgaaaccgattatgccttcccccagctgttcagcctcagccaactggaagtcgccgactacgacggcgacggccgcgacgaactgcacctgggctacctgtcctacgccggcggttcgggagggacgcgctggtcggtgatctacgacctgaaggacggcgcgctgaccgcccattccggctatccggaaatgctcgacatcgacgtcgcccggttcatccaggcggtcaacctgtacgccggcctcgacggcaccctgccgcgcgaccagcgtcagctggaagacgtggtcggccgaggcagcgagcgcttcgcgctgaccgccgcggagcgccaggcactggtcgccgacccgccgcagcgggacgactacgccagggtcctgatgagcctttcgccgcgctcgccctacgcccccgatcgcttcatcgacctcggcgatggcagccgactgagcctggccccgcgccataccgacgattactcgaccttcctcgacatcggcgggaagaaaatcttcgtcgaagccttctacgtcgacgacgacgcctgccactggtgcgagcatcgctggcgagtgatggctttccattacgacgacggtcgctggatctcggaccgcaccatcaacggtgacagcttcaacgggcagtggctgcgcaacgcggagccgctgggcctcaacgacgttttcggcacctaccgcgaccagggcccggcgggcctggcctggtccttcatcgacccgcgctggaccgcctccagccagcatgacatggacgatccgctgggcgtggggatgcgcaccctgtcgccggtggagcaatgggtgaaggaacgctatcgggaaaactga

SEQ ID NO: 339639 - DNA, 267 bp, Pseudomonas aeruginosa
atggccagcgggtgggcgaacgacggtgcggtgcaggaacagatcgacagcacgatcgaggatgccatcgctcgtgcgcgcagccagttgccccgtggcgagagcctgacccattgcgaagagtgcgacgcggcgatccccgaggcgcggcgccgggcgattcccggcgtgcgcctgtgcgtcaactgccaggccgagcacgacagggaacaggcgaagttcagcggctacaaccgccgcggcagcaaggacagccagttgcgctga

SEQ ID NO: 339640 - DNA, 702 bp, Pseudomonas aeruginosa
atgggcgttcgcccgcggctttgcaagggcggcgcgaccatcggcctggcgtggcacaatcgccagccaagcctgaaggtacaccgcatgatgggaccgttccgccgcctcgcccacctgatcgaccagggccgccagctcgacgccgcgctcgccggcgatccgttcgccctgccggcgccggaggaccgctatagcgtccggcaactgcacggcctgtatccgcgccgtcatcccggtctctacgcaccgctgctcggcagcctggcgctgctgctcggtgccgcgccgctgggtcttgccgcgctgcgcctggcattgccggaggctcctttgcggccgctgggctggctctccgccctgccgctgctggcggcctggctgtggctgatcgccctgctctcccgcggcgccagcctcggcccgcgcctggcccgcgacgccagcctgctgctggtcggcgccgggctcctgctgcgcctggccagcggcgagacgtcgggcctggtggcgctcggcggcggcgcctgtgcctggctgctgttcaacagccgcgcgatgcaacgctacatggaactggtctacgcccagcgcctgtaccgcgcccagtcggccaaccgccccggttcggcgcagcggcgcctggccaaccaggccgcctaccgcgaacgcaagcgacgcgagcgctccgggcgatcctga

SEQ ID NO: 339641 - DNA, 747 bp, Pseudomonas aeruginosa
atgaagatcgactcagcctccagctctccgagcctggcccagcggcagctgatgacccgcactcccgaccaggatttccagcgcgacttccaggccgcctacgcgcgcctcgcggtcgccgccgaaggcagcgcggagcaggccggggcgctggccgacaccctcggcgccacccagctggaatacagccgggtgcgcggcgtcagcctggaagaccagttgcgcttcgcccatgtgctcaaccgcgcctgcgaaaacggcgcgcaactggacgcccgcggcttcctcgcccgcctgggcgccgacgacctgcaggcgctgcagcgcaacatgggcctggccgagccgatccgggtcgaggcgctgagcgaggaaggcgcgcgcaacctgctgctgccggaaggctacagcgtcgacctggacggcgacggcatcaccgaggtgggcgccgcgaagatccgccacttccccccgcgcgacgcaccgcaggccttcctcgaccagtggctggcgctcaccgccggcatggacggcgccgcctattcgaacgcccgcgacgggttgcaatgggctttcgacatccgcgccatggccggccagcccctggccaccgaccagttggccagctaccacacggcggtggacgactacctgggcatgctcgccgagcaccgccacgccctggttcccggccagtatgaacgcgacctgccgctgtaccaggcgctgcgccagcgcctggcctga

SEQ ID NO: 339642 - DNA, 831 bp, Pseudomonas aeruginosa
atgtttcgcgcgctgttggactcctcccgttgctaccacaccgcttccgtgttcgatcccatgtcggcgcgcatcgccgccgacctcggcttcgagtgcggcatcctcggcggttcggtggcttccctgcaggtcctggcggcgccggacttcgccctgatcaccctcagcgaattcgtcgagcaggccacccgcatcggccgggtggcgcgcctgccggtgatcgccgacgccgaccacggctacggcaacgcgctgaacgtaatgcgtacggtggtcgaactggagcgcgccggaatcgctgcgctgaccatcgaggacaccctgctgccggcgcagttcgggcgcaagtccaccgacctgatctgcgtcgaggaaggcgtcggcaagattcgcgcggccctggaggcgagggtcgacccggcgttgaccatcattgcccggaccaacgccgaactgatcgacgtcgatgcggtgatccagcgcaccctggcctaccaggaagccggcgccgatggcatctgcctggtcggcgtgcgcgacttcgcccacctcgaggcgatcgccgagcacctgcacatcccgctgatgctggtcacctacggtaatccgcaactgcgcgacgacgcccgcctggcgcggctcggtgtgcgtgtcgtggtcaacggccacgccgcctatttcgccgcgatcaaggcgacctacgactgcctgcgcgaggagcgcggggcggtggcctcggacctgaccgcctcggagttgtcgaagaagtacaccttccccgaggagtaccaggcctgggcccgcgactacatggaagtcaaagagtag

SEQ ID NO: 339643 - DNA, 417 bp, Pseudomonas aeruginosa
atgaatatcctgcgtatcccgatgttcgtattggccatggccgtctcggcccatggtttcgctgccaccgcgcagcaggagaagatgaccgcctgcaacgccgaggccaccaccaaggcgctcaagggcgacgaacgcaaggcgttcatgagcggctgcctgaaggccggcgcgcctgccggcggcaaggccaccgcgcagcaggagaagatgaagagctgcaacgccgacgccagcgccaagtcgctcaaaggcgacgagcgcaaggcattcatgagcagttgcctgaaggccggcggcagcgccaaggcggcgacccagcaggagaagatgaagacctgcaacgccgacgccaccgccaaggcgctcaagggcgacgaacgcaaggcgttcatgagcacctgcctgaagaagtga

SEQ ID NO: 339644 - DNA, 540 bp, Pseudomonas aeruginosa
atgcaacaggtcatcgcggtgagcctctgcgccacccacgcgttcagcaagcaagtgcgtcccgccatccgcctcctgaaaggcctcggcgtcgagggcgacgcccaccacggcgtcaccgtgaagcaccgctcgcgggtgcggcaggacccgacccagccgaacctacgccaggtccacctgatccacgaggaactgcacgacgagctacgcgccagcggcttcgccatcggcccagggaccatgggcgagaacatcaccacccgtggcgtcgacctgctcggcctgcccaccggcacccgcctgcgcctgggggaaagcgccctggtcgagctgaccggcctgcgcaatccctgctcgcagctggacaactaccagcccggactgaccgccgccgtgctcggccgcgacgaacagggcaacctgattcgcaaggccggggtgatggcgatcgtcctggaggacggcgaggttcgccccggcgacgccatcgatatccagctgccacccttgccgcaccgggccctggagaaggtctga

SEQ ID NO: 339645 - DNA, 345 bp, Pseudomonas aeruginosa; identical to SEQ ID NO: 327588

SEQ ID NO: 339646 - DNA, 408 bp, Pseudomonas aeruginosa
atgccccgtggcgacaagagcaagtacagcgacaagcagcagcgcaaggccgagcacatcgaggagagctacaaggccaagggtgtgagcgaatcggaagccgaggcgcgcgcctgggcgacggtgaacaagcagtccggcggcggcgagcgcaagggcggttccggccgcgccaagagcgagacggccaagcgcgccgaccgcaaggactcggcccatcgcgccgcccaggcccgctcagggagaccggccaaccgcggctcggcgagccgtggcaaacgtcagggcagcacctcggtgagcgagatgacccgcgaggaattgatgcagctggcgcgcaagcgcgacatccgcggtcgttcgacgatgcgcaaggccgaactgatcgaggccctgtcccgggcctga

SEQ ID NO: 339647 - DNA, 813 bp, Pseudomonas aeruginosa
atgctcaccatcggccaactggcgcgaatcttcgagatctccaccaagacgcttcgccactacgatgccatcggactgttcgtccccgcgcgcaccggtagcgacaacggctaccgctactaccagccggaacagatcgagcagctctcgcgcatactcgcgctgcgccggctggacgttccgctggaagccatcgaccgcctgaaacgcgatggcgcgctggacgacccgcaacgcctgcggcatttcctgcaacgacaccagcacaccctgcgcgaagagatcagcgcccgccagcgcctgctggcggaactcgaccgaaccctggcgacgctcgcccactggaggatccgcaacatgcatgcacgaatcgtcgaacgtcccgccttcagcgtggtgggcatggaatacttcggcagcgcccccggcgacaccatcggccagctctgggaacgcttcatcccgcgcgagcacgagatcgctggcaagcacgatcccgaggtctcctatggcatctgcgcgcagcagcccaacggtgaattccactacgtcgccggcttcgaggtgcaggaaggctggccggtgccggagggcatggtgcgcttccaggtgccggcgcagaagtacgcggtgttcacccacaagggcacggcgccgcagatcgccgagagcttccaggcgatctacagccacctgctcgccgaacgcggcctggagcccaaggcgggggtcgacttcgaatactacgaccagcgtttccgcggaccgctggatccgaactcgcaagtcgacctgtatatccccatctactga

SEQ ID NO: 339648 - DNA, 2070 bp, Pseudomonas aeruginosa
atgacgcgcggccgaaagatcctgacctggagcctcgccagcctggtcctgctgctggcggcgttggtggtgttcatcgccaccttcgactggaacctgatcaagcccaccctcaacgaaaaggtctcggcggcgctgaaccgcccgttcgccatcaacggcaacctcgccgtggcctggcgccgcgaggagggcgaggaaggctggcgcgcctggatcccctggccgcgcttcagcgccgaggacatcaccctcggcaacccggagtggacggcgggcaagaccaaggcgagcgagttcgccagcctggaacgcatcgaattccgcctcgcgccgttgccgttgctctggcagaccatccgcattccacagatcaagctgacccagccgcgcgccgacctcctgcgcctggccgacggccgcgccaactgggatttcgacctgcctgccagcgacagcgacgagccgtccgcctggcaactggacatccgcgagatcggtttcgacaagggtagcgtcagcctcgacgaccagcgtttgaagacccgcctggaagtgctggtcgacccgctcggcaagccggtgccgttcggccagttggccggcaaggcgctggccacgggcgatgcggcgaacgcccaggactatgtgttcggctggaaggtcaagggcacctacaagggccaggctctggccggctcgggcaaggtcggcgggatgctggcgttgcaggatgcgagcaagcccttcccgctacaggccgaggtcagtgccggcagcacccgtgccgcggtggtcggcaccctgaccgacccgctcaacctcggcgccctcgacctgcgcctgaagctgtccgggaccagcatggccaatctctatccgctgaccggcatcaccctgccggacactccggcctactccaccgacggacacctgctggcgcggctcaaggaggagggcggcgcactgttccgctacgagaacttcaacggcaaggtcggcgccagcgacctgcacggcagcctgaccttcgtcgctcgccagcctaggccgaagctgtccggaaagctgacctccgagcaactgcgcttcgccgacctcggcccgctgatcggcgccgacagcaatgccgagaaacagaagcgcgggcagaccagccgccagccgggcgacaaggtgctgccggtggaggaattccgtaccgagcgctggcgcgacatggacgccgacgtggaattcaccggcaagcgtatcgtccacagcgaccagttgccgatcagcgacctctatacccatctggtgctcaacgacggcctgctgcgcctggagcccctgcgcttcggcgtggccggcggcaagctggagtcggacatccgcctggacggcggcaagcagccgatgcagagccgagtgaagatgagcgcgcggggcttcaagctgaagcagttgttccccggcttcgcgccgatgcagaccagcttcggcgagctgaacggcgacgccagtctcagcggcaatggcaattcggtggcgaagatcctcggcggcgccgatggcgaattgaagatgctgatcaacgacggcgcgatcagcaagggcctgaccgaaatcgccggcctcaatgtcggaaactacctggtgaccaagctgttcggcgacgacgaggtgaagatcaactgcgcggccgccgacttcggcctgcagaagggcctgatgaccagccggctgttcgtcttcgacaccgagaacgcgctggtcaacgtcgacggcacggtgaacttcgccaacgagaagctcgacctcgatgtcaccccgcacagcaagggcctgcggatcttctcgctgcgctcgccgctgtacgtgcgcggcaccttcgccaagcccgacgccggggtccacgctgggccgctggtggcgcgcggcgcgggaatgatcgccctcggcgtggcggtgggcccggcggccagcctgctggctctggtggcgccgagcaagagcgacgacaaccagtgcaccgccctgctgcaacgcatgcgccagccggccaaggcgccggccggcaagcgctga

SEQ ID NO: 339649 - DNA, 534 bp, Pseudomonas aeruginosa
atgaccaccgttcaactgacggacgtccagacccttcgcgaccgtgcccgcaagaacatccaggaaggcgcggtcaccgaaggctattcggccgatcgccagaccgtcctgcgcctgctcaacgaagcgctcgccaccgagctggtctgcttcctgcgctacaagcgccactacttcatggccaccggccttaaggcgagcatcgccgccgccgagttcctcgagcacgccaaccaggaaatgcagcatgccgaccagttggccgagcgcatcatgcaactgggcggcgagccggacttcaatccgcgcggcctggaggagcgctcccatgccgaatacgtcgaaggcaagaccctgaaggacatggtcaccgagaacctgatcgccgagcgcatcgccatcgacagctatcgcgagatcatcacctacctcggtaacgacgaccccaccacccgacgcattttcgaggaaatcctggcccaggaagaagaacacgcggacgacatggccgacatcctcgacgacctcgcctga

SEQ ID NO: 339650 - DNA, 273 bp, Pseudomonas aeruginosa
atgaaagcttccctgatcctcggcctcgccctcgccaccctgaccgccaacgccgccttcgccgccgatggctccagccgcaccatcgaccggctgcaccaggacatgtccagcgtcgaactgcgcatcgccgacaacggcagcgagcagaccatcgaccgcctgcacaaggacatgaccaaggccgaagcccgcctggccgacaacggcagcgaacagaccgtggaccgcctgcatcgcagcatgagccgtttcgacctgcgcaccgcctga

SEQ ID NO: 339651 - DNA, 768 bp, Pseudomonas aeruginosa
atgaaggggccggagaagaagcgcgcgaagatcgcgatcgacccgcccagcgagcggcagatggtcgatttgcaacgccgcctgctgttgcgcggcggcctgtccctgggcgccctggcgatgctctcggggtgccggctacaggatggcgattcggtcgacaaggtactctgggccatgtcgcgctggaacgaccgggtccaggcctggctgttcagccgtacgcggctggcgccgaccttcgatccgtcgcaggtggcctcgccgttccccttcaacgcgttctacccggcctacaacgtgccggagatcgacctgccggaataccgcctgcaggtttccgggcgggtccgcgacaagcgcccctggagcctggagcaactgcgccggctgccgcaggccagccaggtcacgcaactgatctgcatcgagggctggagcgcgatcggccagtggagcggagtgccgctgcgcacctttctggagctggtcggcgccgacacctcggcgaagtacgtcggcttcaagtgcgccgaccgctactactccagcctcgacatgcccagcgcgctgcatccgcagaccctgctggcgctggagatgtccgggcaggcgctgccggaggagaacggctatccgctgcgcctgcggattcccaccaagctcggcttcaagaacgccaagcacgtggtggagatcttcgtcagcaacagcaatcccggaggttactgggaggaccagggctacaactggttcagcggagtctga

SEQ ID NO: 339652 - DNA, 615 bp, Pseudomonas aeruginosa
atgaaccgtgcgttgcacgcctggccggtgagactctgccactggctcaatgcctatgccatggcctgcctgatcggcagcggctggggcatctacaacgcttcgccgctgctggatttccgttttcccgcctgggctaccctcggcggctggctcggcggttccatcgcctggcatctcgccgccatgtggctgctgctcggcaacggcctgtgctacctcgcctacggactgtccagcgggcattttcgtcgcgacttcctgcctttgagcgcggccggcgtctggcgcgacctgcgcctcgccctcggcctgcgcctggtgcatgagccgggccgctacaacgcggtgcagcgcctgctgtactggctggtcctggggctcggtgcgctgctggtgctgtccgggctggcgatctggaaaccggtgcaactgcacgggctgaccgcgctgttcggtggcttccagggggcgcgctgggtgcatttcctggccatggccggggtcgtcgggttcgtcgtcgtgcacctgctgctggtgctgttggtgccgcgcaccctggtgccgatgatcatcggacgcgagtggcggcgcggacggaggagcggaggatga

SEQ ID NO: 339653 - DNA, 624 bp, Pseudomonas aeruginosa
atgcttcgactcaaggcttcccccgcgctgctcttcggcctgctcctggccagtgccgccagcttcgccgcgcaaccgactgcgggcatgctgcagccgctgcgcggcaccatccagcaggccgccgacgaccacctgcaactgaaggcccgcaacggccagcaactgacggtcaggctcaccgacaagaccgcgatccgcgccgtgtcgctggcgaagccggaggacatccagcccgacagcttcatcggtaccgccgccgtgccgcagcccgacggcaccctgaaggccctcgaggtgcatgtcttcgcccccagcctgcgcggcagcggcgaaggccaccggccctgggagaacgccgatggcagcgcctcgaccatgaccaacggtacggtcggcaacctggtggtcagccagggccggcgcatgacggtgaaatacggcgatggtgagaagactgtggtggtgccggacgacgtgcccatcgtcagcctggagccgggcgagcgcagcctgctcaagcctggcgccaaggtcgtgctgttcccgcagaagggcgccgacggcagcctcaccgccctggccatctcggtcggcaaggacggcgtgaccccgccgatgtga

SEQ ID NO: 339654 - DNA, 690 bp, Pseudomonas aeruginosa
atgcgcatcctggtgatcgaagacgatacgaagaccggcgagtacctgaagaagggcctcggcgagtcgggctatgcggtcgactggtcgcagcacggcgccgacggtctctacctggcgctggagaaccgctacgacctagtggtcctcgacgtgatgctgcccggcctggacggttggcagatcatggaagtgctgcgcaagaagcacgatgtgccggtgctcttcctcaccgcccgcgaccagttgcaggaccgtatccgcggcctcgaactgggtgccgacgactacctggtgaaacccttctccttcaccgagttgctgctgcgtatccgtaccctgctgcgccgcggcgtggtccgcgaggcagagcaggtgcaactggccgacctgcacctggacgtgctgcggcgcaaggtcagccgccaggggcaggtgatcgccctgaccaacaaggagttcgccctcctgcacctgctgatgcgccgggaaggcgaggtgctgtcgcgcaccctgatcgcctcggaggtctgggacatgaacttcgacagcgacaccaacgtcgtcgacgtggcgatcaagcgcctgcgcgccaaggtcgacaatcccttcccgaacaagctgatccataccgtgcgcggcatcggctacgtctgcgaggagcgcccgtgcccgcccgccgctccctga

SEQ ID NO: 339655 - DNA, 1392 bp, Pseudomonas aeruginosa
gtgcccgcccgccgctccctgaccctctacgcggcgctgctgttcgccgcggtggcggcgctggtggtcagcgcggtcggcttctacctgtaccgctcggtggaagaggcgatgctgcggcgcagcgacgtgatggtcgccggccgggtcgagcacttccgcaacctgttgcgcgacaacctcaccctggccgagctgaaggcgcgcccacgtctgttcgagaacatgctcggcaacgagcaggacatcctgctcctcggccagcccggcgaggcgccgatcgtcgcggtcaacccgcgccacgaacgcctgccgtcgctacgggtggtcgccgccggccaggcgttgaatccgtccgtcgtgcacgccgcactgacccacgacggcatcccgatgcgcgtgctcgccgccgaggtcctggtcggcggccgcgagccgttgcagatcaccgccgcgcacctgctgctgggcgagacgcggatgctcgcccagtaccgcgaccgggtcatcgccgccgtgctgctggcgttcctcggcaccgccctgctcggctggctggtcctgcgccacggcctgcgcccgctgcgcacgctggcggcgaaggcggcggagatccatccgaccagcctggatacccgcctcgacgtcgccgccgcgcctgccgagttgcagcaggtggcacagtcgttcaacgccatgctcgaacgcctagacgacggctaccagcgcctgcagcagttctccgccgacctcgcccatgagatccgcacgcccatcggttcgctgatgggccacggccaggtggccctgcgccagccgcgcagcaacgaggagtaccaggcgctgatcgcctccaaccaggaagagctggagcgcatcgcgcggatggtcgagagcatcctgttcctcgctcgcgccgacgacgtgcgggcagcggtggagcgcagccgcctggacctgggcgaagagctgcggcgccaggcggagtatttcgaagggctggccgaggaacgtgggctgagcctcgacatccagatcagcggccagctacgcgccgatccgcaactgttccgccgggcgctgagcaacctgctggccaacgccatccgctacgccagcgccgagagcctgatcgaagtgcgcggcctgcgccgctcgggggaattcctgctgagcgtggagaacgcctgcgacaggctgccggccgagccgctgtcgcgcctgttcgaccgcttctaccgtggcgacgccgcgcgcagcgacgcccagtccagcggtctcggcctggccatcgtccaggcgatcatgcgcctgcacggcggccgcgccgaagcgagcgccccggctccgggacgcatccgcttcgagctggcgttcccggctcaggactga

SEQ ID NO: 339656 - DNA, 1317 bp, Pseudomonas aeruginosa
atgttcagcccgctcgtcacctttcccgcgctctacaccgccaccctgctcatgctggccggctccggcctgttcaccacctacatcggcctgcgcctgacccaggaaggcgcaggcgacctgtgggtcggcgggctgatggcgtcctactatttcggcctggtctgcggtggaaaattcggacacaagctgatcgccagcttcggccatatccgctcctacgtggcttgcgccgggattgccaccgtgaccgtgctgctgcatgccctggtcgatcagctggaagtctggctgctgctgcgcttcatcaccggtgcggtgatgatgaaccagtacatggtgatcgagagctggctcaacgagcaggccgagagccaccagcgcggcaaggtgttcgccggctacatggtcgccgtcgaccttggcctggtgctcggccagggcctgctggcgctgagcccgaccctcgactacaagccgttgctgctggtcgccatctgcttcgcctcgtgcctgatcccgctggccatgacccgtcgcgtgcacccggccaagctggtcgccgcgccgctggaagtgcgtttcttctggcaacgcgtgccgcaggcgctgggcaccatcttcatcgccggcctgatggtcggcgccttctacggcctggcgccggtctacgccaaccgcaacggcctggatgcctcgcaatcgagtttcttcgtcggcatgtgcatcgtcgccggtttctgtgcgcagtggccgctgggctggctgtccgaccgcctcgaccgcagttggctgatccgcggcaatgcggtgctgctgtgcctggcctcgatcccgatgtgggggctggtgacgctgccgtactggctgctgctggccaacgggttcgttaccggcatgctgctgttcaccctctacccgctggcggtggcgctggccaacgaccacgtcgagcagccgcgccgggtcgcgttgtcggcgatgctgctgaccacctacggggtcggcgcctgtatcggcccgctggtggccggcgcgctgatgcgccacttcggtccggggctgttctacatgctggtgtccggctacgcggtgctgctggtgttctgggtgcagcccaagcgcgtcaccggcgaacaccgggtcgacgaggcgccgctgcaacacgtggcgatgccggacacggtcagcccgatggccgccaccctcgacccgcgcgtcgaggaagtgccggaggagttggtggtggaggcgccggcgaatatcggccgctccgacggtgagccggacgccggcgagaagcccgctcagtcctga

SEQ ID NO: 339657 - DNA, 1089 bp, Pseudomonas aeruginosa
atgcgcgacgaccgcgaactgaccccggaacaactggcggccttcggcgccgaactcgacgccctgcgccagcgtaccctggccgatctcggcgcggacgacgcgcgctacatccgccgggtccgcgcggcggtgcgcgtctgctgctggagcggcagggcgctgctgatgttcggctggctgccgccgacctggctgctcggcagcctgcttctcggcctgggcaagatcctcgagaacatggaactgggccacaacgtcatgcacggccagtacgactggatgaacgatccggaattcgccggccgcgcctacgagtgggacatcgccgggccgtccgacttctggcggcacacccacaaccatatccaccacacctacaccaacgtgctgggcaaggacgacgacgtcggctacggggtcgtgcgcctgttcccggagcagcgctggaagccgttctaccgctggcaaccgctgtgggtgacgctgcaggcgctgctgttccagtacgcggtggcgatccagcatctgcgcctggacaagtacgccaaggggcgcctggacaaggccgaactcatgccgctgctacgccgcctgcgtgccaagctgggtcgccagtggaccaaggactacctgctgttcccgcttctcggcctgttcgccggcggctttggcgcggtgttcgtcggcaacctgctggccaacgtgctgcgcaacctgtggaccttcacggtgatcttctgcggccacttcaccgagaaggcggtggtcttcccgccctcggtgctggagggggagacccgtggccactggtacctgcgccagttgcgcggctccagcaacctggagggcgggccgctgttccacatcctgaccggcaacctcagccaccagatcgagcatcatctctacccggacctgccggcgcgtcgctacgccgcgctgtcccgcgaggtccgcgaaatcgcccggcgctacgggcagacctacaacagcggacgcctgggacggcaattcctcactgtcttgcggcgcatctgggtatatcggctgccgccgcgcgagccgctcccggcggggcgcagctga

SEQ ID NO: 339658 - DNA, 1101 bp, Pseudomonas aeruginosa
atggccttgcttcccctcgctctcctgacccccttgctcgcacccctgcgccgtctcgccgcccgtggctggctgcgcgaggccgatgtcgacggcctgctgcgccacgcccatccgctggcgtcgctgaaccgccactatgcgcgggtcgaggcacgctactgggtggccgacgatatgctcgccctggccctgcgtaccgcccccggctggccgccggcgcggccgggccagcacatccagctgctggcggagcgcgacggggtgcgggtcgggcgcagctacagcctgacccgggtggtcggcgagcgcctggaaatcgccgtcaagcgtcacccggacgggctgctctcgccctggttgtgcgaacacctggcggtcggccagcgtgtcgagttgcagcccgcgcaaggcgatctgcgctggccgatgcaggccgaggcggtctgcctgctggccgccggcagcggcctgacgcccttgctcggcctgctccgcgaggcgctggagaacggctatcgcggtcccgtgctgtggctgcactacgcccgtcatcccggccagcgcgcctggctcggcgagctggaggcgctggcggcgcgccacccgaacctggagttgcgctggagcctgacccgcggggcgcgggccgatggctgcctggaggggcatttccagccgcgccacctggacggctgggcagccgacctggcgcgcagccaggccctggcctgcgggccggcggctttcgtcgaggcggtgggcgagcaactgggggcacgcttcgccggcttgcagacggaatccttcagcgtcccgcgctggcgcagcggggaggcgccgcgcgaagtgcgcctgcgcttcgcccggtcgcagcgggaagtctccggcgacagcgccgccagcctgctggaacaggccgaggcccacggcctgcgcccggcccacggttgccgccagggcatctgtgccagttgcacctgcgtcctgctcagcggctgcgtgcgcgacctgcgcagcggcgcgctgtgcagcgagcccggccagcctatccgcctctgcgtcagcgccgcccacggcgacctggcgctggacctgtga

SEQ ID NO: 339659 - DNA, 630 bp, Pseudomonas aeruginosa
atgtcctcaccccgcgccgaacagaaacagcagacccgccacgcgctgatgagcgccgcgcgccacctgatggaaagcgggcgcggcttcggcagcctcagcctgcgcgaagtgacgcgcgccgccggcatcgtcccggccggcttctatcggcacttcagcgacatggaccagctcggcctggcgctggtcgccgaggtcgacgagaccttccgcgccaccctgcgcgcggtgcgccgcaacgagttcgaactgggcgggctgatcgacgcctcggtgcgcatcttcctcgacgcggtcggcgccaaccgctcgcagttcctcttcctcgcccgcgagcaatacggcggctcgttgccgatccgccaggccatcgccagcctgcgccagcgcatcaccgacgacctggccgccgacctggcgctgctgaacaagatgccgcacctcgacggcgcggccctcgacgtgttcgccgacctggtggtgaagaccgtcttcgccacccttccggagctgatcgacccacccgccgccgacctgccgccgcacctgatgccggccgcgaagatcacccaccaactgcgtttcatcatgatcggcggcaagcactggcacggcctgcccgactga

SEQ ID NO: 339660 - DNA, 504 bp, Pseudomonas aeruginosa
atgctggtcattcaccaacgcctgcccgcccgctcgccccgctgggacgaagaactccacctgacctacgaggcgcgcagcaaaagccgcctgcgctgcttcgcggcgagcggcgaggaggtcggcctgttcctcgagcgcggccagccgccgctggccgacggcgactgcctggaggcccgcgacggtcgcctggtgcgggtcgtcgcccgctccgaacgtctgctccacgtcacctgcgccagcccgctggaactgacccgcgccgcctaccacctgggcaaccgtcacgtcgccctgcaggtcggcgacggctggctgcgcctgctcgacgactacgtgctgaaagccatgctcgaacagctcggcgccacggtggaggccatcgaggcgccgttccagccggagcacggcgcctacggcggaggccaccaccactcgcaccatggcgaggcggagttcaactacgcgccgcgcctgcaccagttcggcgtgcgccggtga

SEQ ID NO: 339661 - DNA, 672 bp, Pseudomonas aeruginosa
gtgaacagcatctgggcgcgcctgcgcctggccagctcgcagttgccgatcggcggatacagctattcccagggcctggaggcggccctcgacaatggctgggtgcgcgacgccgagagcgcgcggacctggctggtcgaccagttgcaactgaacctggcgcgcttcgaggcgccgctgctggccggcctgctgcgcgccgcgttgatcggcgactgggccgcctgcgatgcggccagcgagcgccatagggccagccgcgagacccgcgagctggcccaggagagccggcagatgggcttttccctgcaccaattgctggaagccctgcccgaactcgacgctcccggccgcgcctggctggcgcgccaggacccgcccaatctcgccgccgcctgggcgatggccgcgcgcgcctggcgcctggacgccgaggaggcgctcagtgcctggttctggagctggctggagaaccagttggcggtgctgatgaaaaccctgccgctcggccaactggccgcgcagaaacttgcttccagcctgctgccggaactcgaccgcgcctgcgccgaggcgctgcgacggcccgccgtcgagggcagcgccgcgttcggcctggcgctggccagcatgacccacgaaacccagtacagccgtctgttccgttcctag

SEQ ID NO: 339662 - DNA, 615 bp, Pseudomonas aeruginosa
atgacatcccaacccctgcgtgtcggcatcggcggtccggtgggctccggcaagaccgccctgaccctggccctgtgccgcgaactgcgcgagcgctacaacctcgcggtggtcaccaacgacatctatacccaggaagacgcagagttcctggtgcgcaacgaggccctcgcccccgagcggatcatcggcgtggaaaccggcggctgcccgcacacggcgatccgcgaggacgcctcgatcaacctggaggcggtggaccagctcaaccggcgcttccccggcctcgaactgatcctggtggaatccggcggcgacaacctgtcggccaccttcagccccgagctgtccgacctgaccctctatgtgatcgacgtttccgccggcgacaagatcccgcgcaagggcggccccggcatctgcaagtcggacctgctggtgatcaacaagatcgacctggcgccgctggtcggcgcctccctcgacgtgatggaccgggacgcccggcgcatgcgcggcgacaagccgttcgtgttcagcaaccagaagaccggccaggggctggacgaaatcatcgccttcatcgagcgccagggcctgctgaccgccgcctga

SEQ ID NO: 339663 - DNA, 573 bp, Pseudomonas aeruginosa
atgaaactgcccaagctgctcgccgccctcgtcctgctcgccgcgccggcgctggccttcgcccaccccggccacggcgaacacggcctggtcgccggcctcgcccatccgctcaccggtctcgaccacctgctggcgatgttcgccgtcggcctctgggccgcccagcaacagggagccgcgcgcctcgccctgccctgcaccttcgtcggcaccatgctggtcggcgggctgctcggcttcgagggcctgcaactgccgttcatggagaccggcatcgccgcctcggtgctcgccctcggcctctgcgtggccctcgccgtgcgcccgccgctggcgctggcgatggccgccaccgcgctgttcgccctggcccacggggtcgcccacggcctggagctgccggacctctccagcccctggctgtacgcgctcggtttcgtcgccgccaccgccgcgctgcacgccgccggctacgcgctggtgcgcttcctgccgcaggcggccgcgcccctggtacgtctcgccgggctggcctcggcgggcgccggggtctggttgctggccggctga

SEQ ID NO: 339664 - DNA, 1023 bp, Pseudomonas aeruginosa
atgaatgaccgcgcttccagccgggcgccgcaggcgggcgatacggagctttccgggccgccggccgccgaggcgatcgccccgcaggtgctcagggagaccgcctcctggctgctgctgatgcaggaggggccgctggctccggcgcagcaggccgagctggagtcctggcgctcgcgcagccccgagcaccagcgcgcctggcggcgtgccgagcgtctgctggcgaatatcggttcgctgccgccggcgttggcccggcgtgcgctcgagcgtccgtccggcagcggccggcgcgcggtcctgcgcggcctggccctgctgctcggcggcgcaccgctggtctggtggggatggcgcgcccaggtctggcgcgacggcttcggcgccgactacctcactgtcgtcggcgagcggcgcgatctggtgctggaggacggcagccaggtcgagatgaacaccgacagcgcgctggacgtgcgctacgacgccggccagcgcctgctgcgcctgtatcgcggagagatctacctccgcaccgcggcggatcggcgcgagccgccgcggccgttcctggtgcgcaccgaacagggcctgatgcgcgcgctgggtaccgccttcagcgtccgacgcgagggcgcagagacagtgctggcggtgtacgaaggcgcggtccaggtgcgtccggagggcgccgcgagcgcggcggatggccgggtgatcgaggctggccagcgggtgcgcttcgatcgccagcggatcggccccgtcgagtccgccagcgaggccgcgctggcctggcgccagggcctgctggtggccgacgacatgccgctgcggcagtgggcgggagaactgatgcgctacgggggcgagagcatcgagtgcgagccgtcgctggacccgcttcgggtctccggcacctttcccatcgacgacctgccgctggccctggcgatgctggcgcagacccatggcctgcgcctcgtgcaccaaggtcggcgggtgctgatcaggcgctga

SEQ ID NO: 339665 - DNA, 537 bp, Pseudomonas aeruginosa
atgaatgcgccaagcccctgcctgcaagcggaccgcgactgcgtcgccacgctctaccgtgaaaaccatgcctggttgcgcaactggctggcctaccgccttcgctcctggggacgtggcgtggccgacgacctggcccacgacactttcctgcgcatcctcgccagccgcgatggcggccagcgtgacgcgatccgtcagccgcgcgcctacctcacccgcatcgccaactgcgtgctggtcagctggcgccgtcgccaatcgctggaactcgcctggctggaggccctggccacgttgcccgagccgttgcagccgtcgccggaacaacagagtgtgatcgtcgagaccctgcacgagatcgacgcgctgctcgacaccctgcgaccgcgggtgaaacaggcattcctgatggcgacgctggacggcatgaagcagaaggacatcgcccaggcgctgggcgtcgcgctgccgacggtgaagaagttcatccaccaggcctacgtgacctgcctgagcctgatgcccgatgaatga

SEQ ID NO: 339666 - DNA, 2970 bp, Pseudomonas aeruginosa
atgacgggcgccaaccctgcgagcgaagaagtcatgtccctacaacgccctatccccagcctggcgcgtcccttgtcgcgcctctccccgctcacccttgccctgcgctgcgccctgctcggcctgtcggcggtcggcgccggcctgctcggcggcggcctggcccacgcgcagagcgtcggccagcacagcgcggctacccgcctggacgacgccacgccgcgcagctacgacatcccggcgggttcgctgggcgcctccctgggcgccttcgccagccagtcgggcctgctgctgtccttcgaccccgcgctgacccgcggccgcaccgcgccggcgctcaagggccgctacagcgtactggaaggcttgcagcgagtgctgtcgaacaccggcctgcaggtcgcggcgggaacctccggcgcctacctgctggtcgagccgcgcatgtccggagaagccccggccgacctgtcgccggtggtggtctcggccgccgagctggccgatccgcagaaggaaacctataccgcgccgcgctcgtcggtgtacctctccagcgaagacatcgaccgcttcggccgggtttccgtgggtgacctgctccagggcatcccgggcgtacagatcggcgacagccgcaacggtggcgcgctggacgtcaacatccgcggcatccaggggcagagccgggtggcggtgcgggtcgacggcgcggagcaggcgctggacgtctaccgaggctacgccggcacccagcagcgcagctacatcgatcccgacctggtcagcagcgtgaccgtcgacaagggtccctcgacccgctcgggcgcgatcggcggcagcgtggaaatgcgcaccatcggcgtcaaggacatcctggtggacggcaaggacctcggcatgcgcttcaccggcaacgtctggaacaacggcgtcgccccgcagcaccgcagcgccagttcgaagaccgagaatctcagcagcgtgccgcacgatgaccgcggcagcctgttcggctcccaggccaagtccggcagcgccgccttcgcctaccgcaacgagcatctggacctggtcgccgcctatgcgcagcgcaatcagggcaactacttttccggcaagaaaggccaggaccgctatcgcgtctacaaccgctacggtcgcgaggaaagcagcgtagccaaggtctacaacgcaggagaggaagtgctcaactcgtcgtcggagaccgagtcctacctgctcaaggcgacctggcgcatcgccgacgagcacaccctggacctcggctatcgtcgctacgacgggcgcaccggggagatcatgccgtcggacatcttccgtttcggcaccgccggcatctaccagtacccattgagcgaagtgaagatcgacacctacaccgcacgctaccgttacctgcccgagaacaatccgctggtggacctcagtaccggcctgtggatgaccgaggcgaagagcgacatgctgacctcggtgctggcaccgcgctcccaggcctatcgctccgaccgcaactggacgcgccaggacaaccggcgcatcggcggcgacctgaacaacgtggcgcgcttcgaaaccgacttcggcgatttcaagctcgacctcggcggctcgttccaggtagaagacatccagccgcagaaaagcgtggtcaccaccctccacgacatcaacgccaaccgcaccctgagggacgccacccgccaggaatacggcctcaacggcaagctcgagttcaagccggtcgagcgcctgacactatggggcggcggccgctacagccacttcaacagcaaggacaacggcatctccgcctcgccgcggcgcgaggatcgcgacatgcgcttcatcacggtgagcaggcccggctactacggctcgatgatgtggttccccgaccagaacggccagtacaccgacgccaccgatccgcgcctcaacaacggcatcgtcaccaacaacaccaataatccgttcgaaggcattcccttcgacgagttcggcccggccaacgtgacggtccatccctcgcgggtcaccaacgtggtcaccggctacaactacagcaagaagggcagcagccgcggcggcggtttctcgccggcattcgggatcaatttcgagctggccccggataccttcgtctacgcctcctacaccgaaggcctgcgcctgccgtcgctgttcgagaccagccagggcactctccaggtcgagccgggcaaggacctcaagcccgagcgttcgcgcagctgggagatcggtgccagcgcgctgcgcgacagcctgttggccgacggcgactcggcggcgatcaagctggcctacttcaacaacaccatcaagaactacatcacccgctattacgatccgggccagatgggcctgatgaccttcagcaacaccgacagctaccgcaccagcggtctcgaactgcaatcgcactacgacgcagggcgggtgttcgccgacctgtcggcgacctactacctgaagaccgagacctgcgacgccgccttcgccgccaggctgcgcgccggcgccaaccgctaccagcgcaccgagaacacgccgaactgcacaccgggcagcttcatgggctcctataccaacacgcagaacccgccgcggctggcgaccaacctgaccgccggcctgcgcttcttcgaccaggccctgaccctgggcgggcgcatgacctatacctccggccccaccgccacggcggacaagccctggcaggtcggcgccaccacaccgcagatcgagtaccgctcggtgcagctgttcgacctgttcctcaagtacaagctgttcgagcacaccgaactgaatgcctcgctgcagaaccttaccgaccgctattacctcgacccgctggcacagagtttcatgcccgcgcccgggcgtaccctgcgggtggggatgcaggcgaagttctga

SEQ ID NO: 339667 - DNA, 1470 bp, Pseudomonas aeruginosa
atgagcgattcccgttataccgacctcggtctccagcccctggccggcgagtggcgccacggccgggccggccgccggctgaaggtgagcaatccgttcgacggcagcctgctgctggagatcgagcaggccgaccgcgacgacctcggtgccgcctacgccaaggccgccgaggtccagccggcatgggccgcgcttggcccctcggcacgcgcggcggtgctgtacaaggcggtggaggtgttcgaccgccgccacgaggagatcgtcgactggctcatccgcgagtccggcagcacccgcctgaaggccgagatcgaatggggcgcggcgcgcgcgatcaccctggagtcggcgtcgttcccggcacgggtgcacgggcgcatcgtcgagtccgacgtgccgggcaaggaaagccgggtctaccgcagcgccatcggcgtggtcggggtgatcagcccgtggaacttcccgctgcacctgacccagcgctccatcgccccggccctggcgctgggcaacgcggtggtggtcaagccggccagcgacacgccggtctgcggcggactgctgctggcgcggatcttcgaagaggccgggctgccggccgggctgttcagcgtggtggtcggccccggcagcgagatcggcgacgccttcgtcgagcacccggtgccgggcctggtgaccttcaccgggtcgaccccggtgggccgcaacatcggccgcatcgccagcggcggcgcgcacctcaagcacgtggcgctggagctgggcggcaacagtccgttcgtggtgctcggcgacgccgacctggagcaggcggtgaatgccgcggtgttcggcaagttcctccaccaggggcagatctgcatggcgatcaaccgcatcatcgtcgaggacagcctctacgacgccttcgccgcgcgcttcgtcgagcgggtcaagggtctccgcgtcggcgatccgcagcgcgccgataccgcggtcgggccgatcgtcaacgcgcgccagctcgaaggcctgctggaaaagatccgcctggcccgccaggaaggcgccaagccgctgtacgagggcggcgtcgatgggcagttgctggctccgcacgtattcggcgaggtcagcgcgacgatggagatcgcccgcgatgaaatcttcggcccgctggtcggcctgctccgcgcgcgcgacgaggcgcatgcgctggagttggccaacgccagcgaatacgggctgtccagcgcggtgttcagccgcgacctggaacgcgcggtgcgctttgcccgccagcttcgcgcggggatgacccacgtcaacgacattccggtgaacgacgaggccaacgcgcccttcggcggcgagaagaactccggacttggccgcttcaacggcgactgggccatcgaggaattcaccaccgaccactggatcagcgtgcagcacgcgccgcgccagtacccgttctga

SEQ ID NO: 339668 - DNA, 1341 bp, Pseudomonas aeruginosa
atgaacaggcaatccgctgcggcggtgatcgacgctgcccgctttaaccgtactcactggctgatcctcggctgggggtgtttcatcatgctgttcgacggctacgacatggtcatctacggctcggtggtgccacgcttgatgcaggagtggcagctgagcccggtgcaggccggcaccctcggcagttgcgcgctgttcggcatgctcttcggcggcaccctgctggcgccgctggcggaccgtttcggccggcgccgcctggtgatcgccaccaccctgctggcgagcctcgccgccttcctcaccgggcacgcccgcgacccgctggaactgggcgccggacgcttcttcaccggcctggcgctgggcgcgctggtgcccagcgcgatcaacctgatcagcgaattcgctccggccgggcggcgcagcaccctggtcacggtgatgtcggccttctactcggtgggcgcggtgctctcggcgctactggcgatcgccatgatccccgcctggggctggcaatcggtgttctacgtggcggtgctgccggtactggcggtgccgctgatgttgcgctggttgccggagtcggcggcgttcctcgaactcaagggccgccgcgccgaactggacgcgctgctgcgcaaggtcgatcccgactaccggcccggcgccgagcgggcgaacgctgtcgcggccgaagcgccgagcggacgggtcgcccagttgttcgaggggcgccaggcactgggcaccctcttgctgtgggtggccttcgccatgtgcatgctgatgagctacgggctcaacacctggttgccgaagctgatggccggcggcggctacgccctcggttcgagcctggcgttcctcgtcaccctgaatgtcggggcgaccctcggtgcgttgttcggcggctggctggccgaccgcctcggcgccggccgcaccctggtgctgttcttcgccctggccgcggcctccctggcggccctcggcctggggccaggcccctggctgctcaacggcctgctggtggtggccggcgccaccaccatcggcaccctggcggtgatccatgcctacgccgcgcagttctatccggcctgggtgcgctccaccggggtcggctgggccgccggtgtcggccgcctcggcgccatcgccgggccgatgctcggcggcagcctgctggccctggagctgccgttccagcagaacttcctggccttcgccgcgcctggcgtgatcggcgcgctggcgatcgcctgcatccacctgcggccgcgcgtgccggcggaagtgtccgtcgacgcgacggcgaagaaacccctgtga

SEQ ID NO: 339669 - DNA, 1587 bp, Pseudomonas aeruginosa
atgaaaaccgtccattccgcgtcttacgagatcctccgtcgccacggcctgaccaccgtcttcggcaaccccggctccaacgagctgccgttcctcaaggacttccccgaggatttccgctacatcctcggcctgcacgagggcgcggtggtcggcatggccgatggcttcgccctggccagcggccgcccggccttcgtcaacctgcatgcggcggcgggcaccggcaacggcatgggcgcgctgaccaacgcctggtactcccatagccccctggtcatcaccgccgggcagcaggtgcgctcgatgatcggggtcgaggcgatgctcgccaacgtcgatgccggacaactgcccaagccgctggtgaaatggagccacgagccggcctgcgcccaggatgtgccgcgcgcgttgagccaggcgatccagaccgccagcctgccgccgcgggcgccggtgtacctgtcgattccctacgacgactgggcgcaaccggcgccggccggcgtcgaacacctggccgcgcgccaggtcagcggcgccgcgctgccggcgccggcattgctggccgaactcggcgagcgcctgtcgcgctcgcgcaacccggtgctggtgctcggtccggacgtcgacggggcgaatgccaacggcctggccgtgcaactggcggagaagctgcggatgccggcctgggtcgcgccgtcggcctcgcgctgtccgttccccacccgccatgcctgcttccgcggcgtgctgccggcggccatcgccgggatcagccggctgctggacggccacgacctgatcctggtggtcggcgcgccggtgttccgctatcaccagttcgcccccggcgactacctgccggccggcgccgagctggtgcaggtcacctgcgatcccggcgaagcagcacgggcgccgatgggcgacgcgttggtcggcgacatcgcgctgaccctcgaggcactgctcgaacaggtccgccccagtgcgcggccgttgcccgaggcgctgccgcgaccgccggcgatggctgaggagggcggaccgctgcggccggaaaccgtgttcgacgtggtcgatgcgctggcgccgcgcgacgccatcttcgtcaaggagtcgacttccaccgtgactgccttctggcagcgcgtggagatgcgcgagccgggcagctacttcttcccggccgccggcggactcggcttcggcctgccggcggcggtcggcgcgcaactggcgcagccgcggcggcaggtgatcgggatcatcggcgacggctcggccaactatggcatcaccgcactctggagcgccgcgcaataccgtgtgccggcggtgttcatcatcctcaagaacggtacctacggcgccctgcgctggttcgccggggtgctcgaggtgcccgatgcgccggggctcgacgtgcccggcctggacttctgcgcgatcgcccgcggctatggcgtcgaggcactccacgcggccacccgcgaagagctcgaaggtgccttgaagcatgccctggccgctgatcgcccggttttgatcgaggtgccgacgcaaaccatcgaaccctga

SEQ ID NO: 339670 - DNA, 897 bp, Pseudomonas aeruginosa
atgagtccgatcgatctcaacctgatccgcaccttcgtcaccctctacgaagcgggcagcgtgaccctcgccgcggagcgcctgttcgtcacccagccatcggtgagctacgccctggcgcgcctgcgcgaactgttcgacgacgctttgttcacccgcacccgcgacggcatccagccgaccttcgtcgccgagcagctctacggcaccttccgcgagtcgctgacgcgcatcgagggcgcggtacagagcgttcgccacttcgatccggcgaccaccgagcgacgtttccgcatcgccctcaccgatctcggcgaagtgggtttcctctcgctgatcctcgaacgcctgacccgcgacgcgccgttcgccgaagtggaagtgctgccgctgcaggtggacgaggtcggcgcctggctgagcagcgccaaggtcgacgcggcgatctgccgccagccggtgcccggcgcgcgcagccaacgggtcctgcacgagcgctacgtgtgcctgctcagcgaccgccacccacggatcggcgacagcctgagcctggagcagtacctggccgagcggcacatcgtggtgacccgcacctccggccacggcatcgccgaggacgtgctcgaggccatgcaggtgcagcgccgcatcagcctgcgggtgccgcacttctcggtgctgccgaagatcattcccggtaccgagctgctgaccatcctgccggcgcagatcgcctatcgcttcgtcgccgaaggcggcatgcgcatgctcgaactgcccttcaccctgccgccgttcgacgtctccctgcactggcacgagagcagcgaacgctcggcggcgctgaactggttccgtaccaccatcgccgaggcgatcatcgccgcccagcgctga

SEQ ID NO: 339671 - DNA, 1335 bp, Pseudomonas aeruginosa
atgaaccgggacttgcgccgcgctctcgacgacgaaccgatgcggccgttccagtggctggcggtggctgtgtgcatcgtgctcaacctgatcgatggcttcgacgtgctggtgatggccttcaccgcatcctcggtggccgccgaatggaacctgggcggcgccgagatcggcctgctgctcagcgccggcctcttcggcatggccgccggctcgctgttcatcgcgccctgggccgaccgctgggggcgccgcccgctgatcctcgcctgcctggcgctgtcgggcctgggcatgctcgcctcggcactgagccaggcggcctggcaactggcgttgctgcgtgggctgaccggactgggtatcggcggcatcctcgccagcagcaacgtgatcgccagcgagtacgcctcgcgccgttggcgcggcctggcggtaagcctgcaatccaccggctacgcgctcggcgcgacccttggcggactgctcgcggtatggctgatcggcgcctggggctggcgctcggtgttcgtcttcggcgctggcctgaccctggcggtgatcccgctggtctgcctgtgcctgccggagtcgctggacttcctcctggcgcgccggccgccgcgggcgttgcaacgggtcaacgcgctggcccggcgcctgggccgcgcggcgctcgccgaactgccgagcccgcctggcggcggagcggagcacggtagccgcctcgcccggttgctctgcgtcgcccagcgacgcaccacgctgctgctctgggcgctgttcttcctggtgatgttcggcttctacttcatcatgagctggacgccgaagctgctggtcgccgccggcctgtccaccgcccagggcatcaccggcggcaccctgctgagcatcggcgggatcttcggtgccgccttgctcggcgggcttgccgcgcgctttcgcctggaacgggtgctggcgctgttcatgctgcttactgccgctctgctcgcgctgttctcgctgagcgccgggctgcccggcgcggccttgccgctgggactgctgatcgggctttgcgccaacgcctgcgtggccggcctgtatgccctggcgccgagcctctacgacgcttcggtgcgcgccaccggggtcggctgggggatcggcgtcggtcgcggcggggcgatcctctcgccgctggtggccgggctcctgctcgacgacggctggcagccgctgtccctctatggggcgttcgcggcggtgttcgtcgccgcggccgccgtgttgccgctgctcggtgcgcggcgtcgcgagcgctcgccgacgctgggagacgctgcgtga

SEQ ID NO: 339672 - DNA, 1056 bp, Pseudomonas aeruginosa
atgtttccgaagaacgcctggtacgtggcctgcacccccgacgaactggccggcaagccgctcggccgacgcatctgcgacgagccgatggttttctaccgaggcgaggacggccgcgtggcggccctcgaggatttctgcccgcaccgtggcgcgccgctgtcgctgggcttcgtcgaggacggcgtgctggtctgcggctaccacggcctggcgatgggcgaggacggtcgcacccgcgcgatgcccggccagcgggtccgcggcttcccctgcatccgtcgcttcccggtgcaggagcggcacggcttcgtctgggtttggccgggcgcggaagaacaggccgacgccgcgctgataccccgcctggaatgggcggaaagccccgattgggcctatggcggcgggctgtaccacatccactgcgactatcgcctgatgatcgataacctgatggacctgacccacgagacctatgtccatgcgtccagcatcggccagaaggaaatcgacgaggccgcgccgaccacgcgggtggaaggcgacgaggtgatcaccagccgccacatgcagaatgtcatggccccgccgttctggcgcatggccctgcgcggcaacggcctggccgacgacgtggcggtggaccgctggcagatctgccgcttcacgccgcccagccacgtgctgatcgaggtcggcgtggcccacgccggccacggcggctaccaggcgccggcggagcgcaaggcggcgagcatcgtggtcgacttcatcaccccggagagcgccacttccatctggtacttctggggcatggcgcgcaacttccaggcccacgaccaggcgcttaccgagagcattcgcgaaggccagggaaagatcttcggcgaagacctggaaatgctcgaaagccaacagcgcaacctgctgcgccatccacggcgcgacctgctgaaactgaacatcgacgccggcggcgtgcaggcccggcgcatcatcgagcgcctgctggcggacgagcgccaggccgccgcccccaaccgcgcccaggcctga

SEQ ID NO: 339673 - DNA, 954 bp, Pseudomonas aeruginosa
atgatcgaggtcatcgtcggcgccatccgcctggaggcgcaggatatccacagcttcgaactgttccgggccgacggggcggcactgccgtccttcgagccgggcgcgcacatcgacctgcacctgcccaacggcctggtccgccagtactccctctgcggccccgccgaacggccgcgccactaccgtatcgccgtactccgctgccgcgactcgcgcggcggctcggccacgctgcacgccgaactgcgggtcggccagcggctgcgcatcggcgagccgcgcaatctcttcccgctgtcgccggagcccggtccgcgcctgctgttcgccggcggcatcggcatcacgccgctgctggcgatggccgaacgcctggcccgcgatggcgccgacttccagttgcactactgcgcgcattccgccgagcgcgcggccttcgtcgactatcttgaccggtgcgccttcgccgaccgcgtgcactgccacttcgaccacggcgacagcagccgccgcgcggaccttcgcgccctgctggcggccagtccgcgcgacgcccagctatacctttgcgggccggcgggcttcatgcagtggatcgaagaaagcgcccgcgaactgggctgggaagcaagccgcttgcatcgcgagcacttcgccgccgcgccacgggacgccaatgcggacggcaccttcgaagtgcagttggcgagcaacggggcgctgatccgggtcgccgccgggcagaccgtgctggcggccctgcgcgaagccggggtggacctgccggcctcctgcgagcagggcatctgcggcacctgcctgacccgcgtgctggacggcgagccggagcatcgcgacctctacctcagcgaagaggagcaagccgccaacgattgcttcacgccctgctgttcgcgttcgcgcagcccacggctggtgctggatctctag

SEQ ID NO: 339674 - DNA, 714 bp, Pseudomonas aeruginosa
atgagcaaaccgggccaacgcgtgctggccgagctgcgcaagctgatcgcttccggcgaactcgccgccggcgagcgcatcgtcgagattcccaccgccgaacgcctgcaggtctcgcgcatgccggtgcgcatcgccctgcgtaccctcgagcaggaaggcctgctgtgcaagaccgggcgcggctacagggtgcgcgcggtgacccgcgaggatatcgccggcgcggtcgaggtgcgcggcgttctggaaggcctggcggcacgccaggcggccgagcgcgggctgtccgccgaggcacgggcgaccctggaggaatgcctggccgagggcgaccgattgttcgccaacggccaggtcctgctggaggagctggagcgctaccagcgcatgaacatgcgtttccaccgcaccatcatcgaggccagtggcaacccggcgatcgccgtggcgctggcgcgcaacgaccacctgccgttcgcctcggtgagcgccctggcggtggatcgcgacaatctcgagcaggaattccgccgtttcaacttcgcccacatgcagcaccacgcggtggtcgacgcgctggtcaacggccagggggcgcgcgccgaggcgatcatgcgcgagcacgccaacgcgaccctgcgctatgccgactacttcgatccggcgcggaagggcgtcaccgtgcttcacggcgacgtcgccgccgactag

SEQ ID NO: 339675 - DNA, 762 bp, Pseudomonas aeruginosa
atgtcgtccaccctgttcatcaccggcgccacctcaggcttcggcgaagcctgcgcccgtcgtttcgccgaggccggctggtcgctggtgctcaccggccgtcgcgaggagcgtctgcaggccctggccggcgagctttcggcgaagacccgggtgttgccgctgaccctggacgtgcgcgaccgcgcggcgatgagcgcggccgtggacaacctgccggaagagttcgccaccctgcgcggcctgatcaacaacgccggcctggcgctgggcaccgacccggcgcagtcctgcgacctggacgactgggacaccatggtcgacaccaacatcaagggcctgctctacagcacgcgcctgctgctgccgcggctgatcgcccacggcgccggggcgagcatcgtcaacctgggttcggtggccggcaagtggccctatccgggtagccatgtctacggcggcaccaaggccttcgtcgagcaattctccctgaacctgcgttgcgacctgcagggcaccggggtgcgcgtgaccaacctcgagccggggctgtgcgagagcgagttctccctggtccgcttcggcggcgaccaggcgcgctacgacaagacctacgccggggcccatccgatccagccggaagacatcgccgagaccatcttctggatcatgaaccagcccgcccacctgaacatcaacagcctcgagatcatgccggtgagccagtcctgggccggcttcgccatccaccgcgaaagctga

SEQ ID NO: 339676 - DNA, 933 bp, Pseudomonas aeruginosa
atgcacagcctgcgctttttcagcaacgccgaggtcgccgagcgcctgtcctatccacaactgatcgaggcgttgcgcatcggcctggccaagccttgcagtgcgccgctacgcagctgccatgccttgccggcgcaggcctcgctgctacagatgccggtgtggcaggccggtgaggggatcggcgtgaaactggtgacggtgttccctggcaatggggcgcgtggcctgccggcggtggccgcggtgttcgctctgttcgacggcgaagacggtcgcccgctggcgttgctggaggcttcggagttgaccgcccggcgtaccgcctgcagctcggcgctggccgccgactacctggtgcgggacgatgcgcggcgcctgctggtggtcggctgcggaaccctggctgcgcacatggtgcgggcccacgcctgcgtgcgcgactatcgccacatcgacatctggggccgcgatccggccaaggccgccgcgctggccgcccggctgcgcgcggagggctacccggcgcgagcggccgacgggttgcgcgcggcggtggaggcggccgattgcgtcagttgcgttaccacctcccgcgaagcgctggtgcgcggcgcatggctgaagccgggcgtccatctcgacctggtcggcgccttcctgccgtccatgcgcgagactgacgccctggcggtggcgcgcgcgcgggtcgtggtggatacccgcgcaggcgcgctggaagaggctggcgacttgttgcaggcgatcgccgaaggcgccatcgggcgcgaggcgatatccaccgaactgcgcgacttgctgggcggggcagggcggcgcggcgatcccggggaaatcaccctgttcaagtcggtgggttatgcgctggaggacctggtcgccgcgcgccgggttgtggataacgccgcctga

SEQ ID NO: 339677 - DNA, 717 bp, Pseudomonas aeruginosa
atgagcgcggcgttgctggaattccgtgaggtggacgtgttctacgggccgatccaggcgctgaagaaggtctcgctgcaggtcaacgagggcgagacggtgagcctgatcggtgccaacggcgcgggcaagtcgacgctgttgatgtcgatcttcggccagccgcgcgcggcggccgggcagatcctctatcgcggccaggacatccgccagaagtcggcgcactacgtggcgtccaacggcatcgcgcagtcgccggaaggacgccgggtgttccccgacatgagcgtcgaggaaaacctgctgatgggtaccatccccatcggcatggaccacgccgaggaggacatgcagcgcatgttcgagctgttcccgcgcctgaaggagcggcgcaaccagcgcgccatgaccatgtccggcggcgagcagcagatgctcgccatcgcccgcgcgctgatgagccggccgaagttgctgttgctcgacgagccctccctgggcctggcgccgatcgtggtcacgcagatcttccagaccctgcgcgagctggccaggagcggcatgaccatcttcctcgtcgagcagaacgccaaccatgcgctgaagctctccgaccgcgcctacgtgatggtcaccggggaaatccgcatgagcggcagcggcgaagaactgctcggcaaccaggaggtgcgcaacgcctatctcggcggacattga

SEQ ID NO: 339678 - DNA, 873 bp, Pseudomonas aeruginosa
atgagcgacaagatcctcagcgtcgagcacctgatgatgcacttcggcggcatcaaggcgctcaacgacgtcaacctcgacgtcgagcgcggttcgatcaccgcgctgatcggccccaacggcgccggcaagaccaccgtgttcaactgcctcaccggcttctacaaggccaccggcggcaacatcctgctcaacacccaggggcgcaccacggacgtcatccaggtgctcggcgagccgttccagctggacgacttcgtcaagccgccgcaactgggcagtcgcctctactacaagatgttcggcggcacccacctggtgaaccgcgccgggctggcgcggaccttccagaacatccgcctgttcaaggacatgtcggtggtggagaacctgctggtggcgcagcacatgttcgtcaaccgcaacctgctcgccggcatcctcaacactcccggctatcgccgcgccgagagcgaggcgctggaccacgcgttctactggctggaggtggtcgacctggtggactgcgccaaccgcctggccggcgagatgtcctacggccagcaacggcgcctggagatcgcccgggccatgtgcacgcggccggaactcatctgcctggacgaaccggccgccggcctcaacccggccgagacccacgccctgagcaacatcgtccgctacctgcgcgaccaccacgggatcaccgtactgctgatcgagcatgacatgggcatggtgatgaacatctccgaccacatcatcgtgctcgaccacggcgacgtgatcgcccgtggcaaccccgaacagatccgccatgacgagaaggtgatcgccgcctatctcggtgccgacgaagaggagctgtcatga

SEQ ID NO: 339679 - DNA, 1278 bp, Pseudomonas aeruginosa
atgagcaacgagacttccatcgatctcaagcagtgcgtcctcgatgccgtgctctccgggttgatcgccctggtggtgttcggccccatcgtcggcgtggtcctcgacggctacggcttcaacctgcattacgagcgggtcggctggatcatcgcgatcgtgatggccgggcgcttcctgctcagcctctacctgcagacccgcggcgggcgggccgtgctggagcgcttcgagggggctggcagcggcgtccacgtcctgccgccgggctacaagacccgcttgcgctggatcgtgccgctgatcctggtggccgcggtgatcttcccgttcttcgccagcaagtacctgctggcggtggtcatcctcggcctgatctacgtgctgctgggcctgggcctgaacatcgtggtcggcctcgccgggctgctcgacctcggctacgtggccttctacgccattggcgcctatggcctggcgctgggctaccagtacctcggcctgggtttctggaccgtcctgccgctggccgcgctgaccgccgcggtggccggggcgatcctcggcttcccggtgttgcgcatgcatggcgactacctggcgatcgtcaccctgggcttcggcgagatcatccgcctggtactgaacaactggctgtccttcaccggcgggccgaacggcatgccggcgccggcgccgaccttcctcggcctggagttcggccgccgggccaaggatggcggggtgccgatccacgagttcctcggcatcgcctacaaccccaacatgaagttcctgttcatctacgtggtgctgttcctggtcgtgctgctggtgctctacatcaagcaccggctgacccggatgccggtcgggcgcgcctgggaggcgctgcgcgaggatgagatcgcctgtcgcgcgatgggcctcaaccatgtgctggtgaaactctcggcgttcatgctcggcgcctccaccgcgggactggccggggtgttcttcgccagctaccagggcttcgtcaacccgtcctcgttcaacttcttcgagtcggcgctgatcctcgccatcgtcgtgctcggcggcatgggctcgacggtcggggtggtgatcgccgccttcgtcctcaccgtggcgccggagctgctgcgcagcttcgccgacatccgcgtgctgctgctcgggatactcatggtggtgatgatgatctggcggccgcgcgggctgatccgcatcagccgggtgggcttcgccccgcgcaagggggtggcgccatga

SEQ ID NO: 339680 - DNA, 915 bp, Pseudomonas aeruginosa
atggacggcatcttcctccagcaaatgatcaacgggctgaccctcggctcggtctacggcctcatcgccatcggctacaccatggtctacggcatcatcggcatgatcaacttcgcccacggcgaggtgtacatgatctccgcctacctgtcggccatcgcccttgccctgctggccttcttcggcctgcagaacttcccgctgctgatcctcggcaccttgctgttcaccgtgctggtgacctgcacctacggctgggtgatcgagcgcatcgcctacaagccgctgcgcaactccacgcgcctggcgccgctgatctcggcgatcggcatgtcgctgattctgcagaactacgtgcaggtggcacagggaccgcgccagcaggggatcccgaccctgctcgacggcgccctgaaattccacgtcggcgacggtttcgtccagctcacctacaccaagctgttcatcctgatcgcttcgctgatcggcatggcggtgctgacctacgtgatccgctacaccaagctcgggcgcatgtgccgggcgacccagcaggaccgcaagatggcttcgatcctggggatcaacaccgaccgggtgatctcctacgtgttcgtcatcggcgcggcgatggccgccctggccggggtgctgatcaccatgaactacggcaccttcgacttttacgccggcttcatcatcggcatcaaggcgttcaccgcggcggtgctcggcggcatcggctcgctgcccggggcgatgctcggcggcctggtgctgggagtggccgaggcgcagttctcggggatggtcaacaccgactacaaggacgtgttcgccttctcgttgctggtactgatcctgatcttccgtccccagggcctgctcggccgcccgcagatcgccaaggtgtaa

SEQ ID NO: 339681 - DNA, 1125 bp, Pseudomonas aeruginosa
atgtccaagaagctgttcagaaaaggcatcctggctctcgcggtttcgtccgtgatgggtctttccacgcatgcgctggccgacgtcgtgatcggcgtggccggaccgcataccggcgccaacgcctccttcggcgagcaatactggcgcggcgcgtcccaggcggcggaagacatcaacgcggcgggtgggatcaacggcgagaagatcaagctggtcaaggccgacgacgcctgcgaaccgaagcaggccgtggccgtggccaaccgcctggtggaccaggacaaggccatcgccgtggtcggccatttctgctcttcttcgaccatccccgcatccgaggtctacgacgaggccgggatcatcgccatcacccccggttccaccaacccgcaggtcaccgagcgcggactctccgggatgtttcgcatgtgcggccgcgacgaccagcagggcgtggtcgccggcgactatatcgtcaaggtgctgaaggccaagaaggtcgcggtgatccacgacaaggacacctatggccagggcctggcggacgccaccagggcgcaactgaacaagctcggcgtgaaagaggttctctacgagggcctgacccgcggcgagaaggacttcaacgcgctggttaccaagatccgcgcctccggtgccgaggtcgtctacttcggcggcctgcatccggaagccggtccgctggtacggcagatgcgtgaacagggactgaccgccaagttcatgtccgacgacggcgtggtcaccgacgaactggcgaccaccgccggcggtccgcagtacgtcaagggcgtgctgatgaccttcggcgccgacccgcggctgatccccgacggcaaggcggtggtggagaagttccgtgccggcggtttcgagccggaaggctacaccctctactcctacgcctcgatccagtccctggcggcggccttcaacggcgccggcgccaacgatccggccaaggccgccgagtggctgaagtcgcatccggtgcagaccgtgatgggcaagaaggaatgggacaagaagggcgacctgaaagtctccgactacgtggtctacgagtgggacgacaagggcaagtaccaccagttgccctga

SEQ ID NO: 339682 - DNA, 939 bp, Pseudomonas aeruginosa
atgctgaacaaacgccgcctgccgtcgatgaccgccctgcaatgcttcgaagcggtagcccggcacctgagcttcacccgcgccgccgaagagttgagcctgacccagagcgccatgagcaagcaggtcgcgcaactcgaggagcagttgcagcacgccctgttccgccgggtgcgcaagcgcctgcaactgaccccggccggcgagctgtacctggccgaggtacgacgcatcctgcagcaggtagagctgtccacccgcttcctgctttcctacggcggcgagaccgaagtgctgcgagtggcgaccccgccgaccttcggcgcgcgctggctgatcccgcaactgaacggctggcgccaccgccacccgaacatccacctcgacctgcgccaggaactggaaccggacgacctgcgccagggccattgcgacctggcattcttcttcggccccggcaccctgccgggcgccgagtgcatacgcctgttcggcgaacaactggtggcggtctgcgcgccatccctgctgccggccggcggactggacgaaccgacccaactggcggggctggtgctgctgcagaacgccagccgcgcggaggcctggcacgactggttcgccagcctggagcgaaattgccagggttgctaccacggtccacgcttcgacaccttctacatgtgcatccgcgccgcccaggccggttgcggggtagccctgctaccgcgcttcctggtcgaggaggaactcgccgaaggcaagctggcgatcgcctggccgcacgccctgcccagccaggaggcttactacctggcctatcccgagcatgccgcggaagtccccaaggtgcgccatttcatcgagtggatggtagagcgcctggagcaggagcaaccctcagcgggcccccgccagacgcgccacggcccggtttga

SEQ ID NO: 339683 - DNA, 1626 bp, Pseudomonas aeruginosa
atgctcactggcgtcacggttcgaatccgcctgctggtcctggcgttgctgcccctgacgatgctcgtcacggtcatcgcgatggcgctggccaacgccagtcgactcgatgccagcttccaggaccttttcaacaaccggatgaagcccatcagccagctcaagatcgtcgccgacgccgttgcggtcagcgtggtcgacgccctgcacaagtaccgtgcgggcgtcttcgatgaagagcgcctgcagcaggagttgagtggggcgctgtcgcgcatcgagaagtcgtgggccgactattccgcagaccaccggactgccgccgagaaggaaatcatcgagtcgctggtccccaccctggaacaggtcaagcggatgaccctggcatacggcgagcaggccagggccggaagcctgcgaaacgtcgaggccggcacgttcaatcgcgagatgtatggtgcgttcgatcccctgggaaccgcgctgtcgacgctgatcgacctgcagctcagcgaaggcgccaagctcaacgagcagatggagaaacgctacgactccatgcgcaccaccttcctgctcatcggcgccgcagccctggtcctcatcgtcgccgcggcctggttcatcagcctgtcgatcatgcgcccgctttccgatctgcgcggggtgatccgccgcgtgcaggactcctcgaatctcacgctccgcgccgatgcgcgcgggcgcgacgaagtgtccgatacggcgcgcgcattcaatatgatgctggaaagccagcaggcgctgctccgccatctcgccgaaacggccaggaagctgaccgtcacctcggacgagatgagcgccatcagcaaccaggtcagccatgtcgccacgtcccagggcgaccagaccgacatggtcgccacggcggtacaccagatgagcatggcggtccaggacgtggcgcggaacgcccaggccgccgcggccagcgcggaatcggcgaacagcgaggcgcacaccggaaccggcctcgtgcatgcgaacctcgacgccatccagggcctgtcggtcatggtcggagaggcgggagccgtcatcgacacgctgcgcaacaagaccgaggaaatcagcaccgttctggaagtcatccagaacatcgcccagcagaccaacctgctcgccctcaatgccgcgatagaagccgcacgggcgggcgaggccggacgcgggttcgcggtggtcgccgatgaagtgcgcagcctggccaccaatacgcacaaggccaccgaaaccatccgcgagatgatcgaagccctgcaggcaggcgccagcagcgcggtcagcgtgatgcagcagtcacgtgagcaggcccaggtcagcgtccagcgcgcccacgaggcgggaaaggcgctcggtctcatcgcccaggcgatcgaaggcatcgcccagagcaacgcgcagatatccacggcgacggaagaacagaccgccaccgcgagcgaggtcagccagaacatcgactcgctcaatgccagcatcggtgaagtcgccgagggcgcggtgaagacctccacctccagtgtcgagctggcgaagctggcaaacggactggagcagcagatccagcgcttcaccgtctag

SEQ ID NO: 339684 - DNA, 696 bp, Pseudomonas aeruginosa
atgagttcagcggaagtattggccagcgtggatatcgtggcgttgcgcctgaaccccgggcacggactggagctgttgctgatccgccgcgcccaggcgcctttcgccggccagtgggccttgcccggcgtgctggtcaacggccgcagcgccgaccacagcctcgacgacgcggcggtgcgcgccctgcgcgacaaggcgcggctggagccggcctacatcgagcaggtggccacggtcggcaacgcggtacgcgacccgcgcggctggtcgttgagcgtgttctacctggtgctggtcggcccggacacccgggtggaggacgacgacctcgacttcgtgccgctgcgcgacgtttgcagcgagcgcttcgccctgccgttcgaccacgcccaactggtacagcaggcctgcgagcgcctggcgagcaagtcggtgtacagcgccctgccgctgttcctgctggcgccgcgcttcaccgtggccgaggcgctgaaggccttcgagtgcgccatcggccaggaagtccagcattccagcctgcgcgggcgcctggagcggatgaaagaggctggctgggtcgaggacaccggcgaacgccagcgtccgcccatggggcgcccgcaacacgtcctgcatttcaccccgaagcagggcggcgccttcgttttcgaccgcagcctgctggcgtcctga

SEQ ID NO: 339685 - DNA, 603 bp, Pseudomonas aeruginosa
atgcgtgatgaaataagttcccggattcgccgactgcctgccgggatgagcggcggacgcgcccccgacttcgctctcgcggtctatggtggggcgttcgacccgccgcaccccggccatgagtcggtgatccgccgggcgctgctttgcgccgaacgggtcgccctggtgccgagccaccgccacgccttcggcaagcgcatgggcgatttcgagctgcgctgccgctggctggcgcggctggcccggcggatcgatccgcggcgggtgtattgcgagccgatcgaagcaggattgatgcctgatcgtccggcggtctacagcatcgacctgctggaagcgctggccgcgcgtagcggcctggcgtcagcgcggatcgccctgctgatcggcgctgacaacgaggcggaactgccgcgcttcgaacgcgccgccgaattgtgctggcgcttcggccggctggtggcggaggagcggctgccgctgcacagctcgatgatccgccagcgcctgcgcgaaggactggcgataccggaggcctggtgcctgccggaagtgaaggacgaactgcactgctatggcggcgaacgccaggcggtctga

SEQ ID NO: 339686 - DNA, 660 bp, Pseudomonas aeruginosa
atgaatcgccccagcaagatcgccagcttcgatgtcgacgcccagaaaggcttcaccccgctgtgcccggacgaactgccggtgcccggcggcgacgccatcggcgccgccctcaaccaactggccagccgcgccgcgctgcgcctgggcagcaaggacgcgcacagcccgaaggctgcctgggtagtggaaagcgccgagcagatgctgcggccgctggcctatccggatgccgacctgacctgggtgagccactgcgtaccgggtacgccgggcttcgagctgctcgacgaactgccgcggccgatcgactacgacttcttcgtctggaagggcgtggagccggacctgcacccctacggcgcctgctaccacgatctggcggaacgccgcagcaccggggtcatcgaatacctgaggcagaatggcgtgagccatgtgctggtgggtggcctggcgctggactactgcgtgaagaacaccgccctgcaactgcgccgcgccggtttcgaggtgctgctctacctgcccgcctgccgggccatcgccgaggacaccgcgcagcgggcctgcgacgagatgcgcgacgccggggtgatcctctgcgccgacctggaacgactggatagcgccctcgccggcgccgacaaggagaagtga

SEQ ID NO: 339687 - DNA, 1200 bp, Pseudomonas aeruginosa
atggccgaaagcgtctttgccgagcgcatcgtgcagaacctgctcgataccgatttctacaagctgaccatgatgcaggcggtgctgcacaactaccccaacgccgaagtggagtgggaattccgctgccgcaacgccgaggacctgcgtccgtacctggcggagatccgctaccagatcgagcgcctcgccgaagtcgaggtaaccgccgaccagctcgccttccttgaacgcatcccgttcatgaagccggacttcatccgcttcctcagcctgttccgcttcaacctgcgctacgtgcacaccggcatcgaggatggccaactggcaatccgcctgcgcggcccatggctgcacgtgatcctcttcgaggtgccgctgctggccatcgtcagcgaggtgcgcaaccgttatcgctaccgcgaggtggtcctggaacaggtcggcgagcagctctaccgcaagctcgactggctctccgcccaggccagcagcgaggaactcgcggaattccaggtcgccgacttcggcacccgccggcgcttctcctaccgcacccaggaggaagtggtgcatatcctcaagcgcgacttccccgggcgcttcgtcggcaccagcaacgtgcacctggcccgcgagtacgatctcaagccgatcggcaccatggcccacgaatggctgatggcccaccagcaactcggcccgcggctggtcgacagccagcaagcggcactggactgctgggtccgcgagtaccgcggacagctcggcatagccctgaccgactgcattaccatggatgccttcctcgacgacttcgacctgtacttcgccaagctcttcgacggcctgcgccacgattcgggcgacccgctggcctgggcggagaaagccatcgcccactaccgccgcctgggtatcgacccgctgagcaagaccctggtgttctccgacgggctggacatgcccaaggcgttgcagctgttccgcgcgctacgtggcaagatcaacgtcagcttcggcatcggcaccaacctgacctgcgacatccagggagtcgagccgatgaacatcgtcctgaagatgacggcctgcaacggccatccggtggcgaagatatccgacgccccgggcaagacccaatgccgcgacgagaacttcgtcgcctacctccgccacgtcttcaacgtgccggcctaa

SEQ ID NO: 339688 - DNA, 828 bp, Pseudomonas aeruginosa
atgcaacagatccaacgcgacatcgcccaagccctgcaggtccagccgccgttccagtcggaggccgacgtgcaggcgcagatcgcccggcgcatcgccttcatccagcagtgcctgaaggattccgggctgaagaccctggtgctggggatcagcggcggcgtcgactcgctcaccgccggcctgctggcccagcgcgccgtcgagcaactgcgcgagcagaccggcgaccaggcctaccgcttcatcgccgtgcgcctgccctaccaggtgcagcaggacgaggccgatgcccaggcctcgctggcgaccatccgcgccgacgaagagcagaccgtcaacatcggtccgtcggtgaaagccctggcggaacagctggaagccctggaaggactcgagccggcgaagagcgacttcgtcatcggcaatatcaaggcgcgcatccgcatggtcgcccagtacgccatcgccggcgcacgcggcggcctggtgatcggcaccgaccatgccgccgaggcggtcatggggttcttcaccaagttcggcgacggcgcctgcgacctggctccgctcagcggcctggccaagcatcaggtacgcgccctcgcccgcgccctcggcgctccggagaacctggtggagaagatccccaccgccgacctcgaggacctgcgccccggccatccggacgaggcttcccacggcgtcacctatgccgagatcgacgccttcctgcacggccagccactgcgcgaggaagccgcgcgggtgatcgtcgacacctaccacaagacccagcacaagcgcgaactgccgaaggcgccctga

SEQ ID NO: 339689 - DNA, 924 bp, Pseudomonas aeruginosa
atgcgcacccgtctccccgccctgctcctcggtgtcctgctggccggccaggcctgcggacacacgtccccgctgctcgcgccggtacggcagatccacgccttcggcgacagctattcggacaacggcgaaagccagcgactgacccgcgagatgctcgccaagggcatcgccggcgcccaggcattgcccggcgaagtctactggcagggccgctggagcaacggcccgaccgccgtcgaggtgctcgcccgccagctcggcgcacaactggccgaccatgcggtgggcggcgccaagagcggagcggacaactactacggctggatgagcgcctaccgccataccggcctcgccggccaggtcgacgcctacctcgccacgctggacggcaagccggccgacggccaggcgctgcacttcatcttcgtctccgccaacgatttcttcgagcatgaggatttcgccggcgagcagaccctggaacaactggccggcagcagcgtggcgaacatccgcgccgcggtgcagcgtctcggagaggccggcgcacgacgcttcctggtggtcagttcgaccgacctgagcgtggtcccggcggtggtcgtcggcaaccgggtcgagcgggcgcagcgctacctgcaagcggtcaacgccagcctgccgatccagctcgccgccctgcgcaagacccgcggcctggagctgagctggttcgaccatctcaccttcagccgccacttgcggcgcaacccggcacgctacggcctggtggagctggacgcgccctgccagccgacccagcccagcgtccgcccggcctgcgccaacccggaccagtactacttctgggacgagtggcatccgacccggcgcgtgcaccaactggccggcgaagcgatggcggcgcgctacgcgcgctga

SEQ ID NO: 339690 - DNA, 447 bp, Pseudomonas aeruginosa
atgctacgtaaactcgctgcggtatccctgctgtccctgctcagtgcgccgctgctggctgccgagtgctcggtggacatccagggtaacgaccagatgcagttcaacaccaatgccatcaccgtcgacaagagctgcaagcagttcaccgtcaacctgtcccaccccggcaacctgccgaagaacgtcatgggccacaactgggtactgagcaccgccgccgacatgcagggcgtggtcaccgacggcatggcttccggcctggacaaggattacctgaaacccgacgacagccgtgtcatcgcccacaccaagctgatcggctcgggcgagaaggactcggtgaccttcgacgtctccaagctgaaggaaggcgagcagtacatgttcttctgcaccttcccgggccactccgcgctgatgaagggcaccctgaccctgaagtga

SEQ ID NO: 339691 - DNA, 588 bp, Pseudomonas aeruginosa
atgaccttgcgttccgtctgcgtattctgtggcgccagccccggcgcttccccggtctaccaggaagccgccgtggccctcggccggcacctggccgagcgcggcctgaccctggtctacggtggcggcgcggtcggtctgatgggcaccgtggcggacgccgcattggccgccggcggcgaagtgatcgggatcatcccgcagagcctgcaggaggccgagatcggccacaagggcctgacccgcctggaagtggtagacggcatgcacgcgcgcaaggcgcgcatggccgagctggccgacgccttcgtcgccctgcccggcgggctcggcaccctggaagagctgttcgaggtctggacctggggccaactgggctaccacgccaagccgctgggcctgctcgaagtgaacggtttctacgacccgctgctgaccttcctcgaccacctggtcgacgaacgcttcgtccgcgccgaacaccgcggcatgctgcagcgcggtgccagtccggaggcgctgctcgatgccctcgccgcctggacgccaagcgtggcgccaaagtgggtcgaccgcaccccgcagtga

SEQ ID NO: 339692 - DNA, 696 bp, Pseudomonas aeruginosa
gtgttcttcagattgctcttgatcgccgtcctgctggcggtatccgcgtgcagctccaaggctcccggcccgggggcgtcggtgccgaaggtcgtgcgcggcgagtatcgcgtcaagcgcggcgacaccctctattcgatcgccacccggcacggctggaactacaaggacctggcgcgcgccaacggcatccgcccgccctacgcggtcaaggtcggccaggtagtgcgcttcgacgggcgcaagtcgacctacgtcgccagcagccgctcctcgtcgagcagccgtgcgcgcaagccgccgcctccgccgccgtcggtgaccctgcgcggctggcagtggccgatgaaggggccggtgatccgccgcttctccagttccgacaagctcaacaagggcatccgcatcgccggcaccctgggccagccggtacaggcctcgctggccggcaaggtggtgttcgcggtgaacaacatgcgtggctacggcaacctggtgatcatccagcacggtacctcgtacaccagcacctacgcgcacaacagccgcttgctggtgaaggaggggcagatggtcagcaagggccagaagatcgccgaggccggttcctcggatgccgaccgggtgcagctgtacttcgagatccgccagaacggccggccgctcgacccgctgagcctgctgccgccgtcctga

SEQ ID NO: 339693 - DNA, 852 bp, Pseudomonas aeruginosa
atggatgacacgacgatcgtcaacgtaggtaccgagaagatcaacgcgctctgggcgacggtgtcccagtacgccttcgccttcggcatcaagattctcgcggccatcgccttctgggtgatcggccgctggctgatcggcttcgccgtcggcatggtgcagaaatccctcgagcggcaaaaggtcgatcccaccgtgctgcgctacgtgggttcgttcatcacggtgaccctgaacgtgctgctggtggtgggcatcctcggtttcttcggcatccagaccaccagcctggcggcgctgatcgcggcggtcggcctggccatcggcatggcctggtcgggattgctggcgaacctggcggccggcggtttcatcatcgtcctgcggccgttcaaggtcggcgacttcatctgcgccggcggagtgaccggcacggtcaaggagatcggcctgttcaccacggcgatcaacactccggacaacgtgctgaccatggtcggcaacaacaagatattcggcgacaacatccagaacttcacccacaacccgttccgccgggtcgagttgaaggcgcagctttccggtgccgccgactaccaggcggccattgccctgctcaagcagcgcgtcgcggcgattcccaacgtgctcggcgagccgccggtggacgtggagatcctcgagttcaacctggtcgggccggtgctggcggtgcgcccgtattgccacaacgaccattactggcaggtctatttcgataccaacaaggtgatcaaggacgccctcggcgccgacttcccggcaccgatgccggcgcagacggtgatcgtgcagcagtccgccggcgcctga

SEQ ID NO: 339694 - DNA, 936 bp, Pseudomonas aeruginosa
atgtccgcacccgcgcttcgctccgttccgctccagggcgcccgctaccaggtgctgcacgacacccattaccgctatgcgacgccggtctcgctgtcgcggcaactggcgcatctctggccacgcgaatgcgcctggcaggcctgtcatgagcgggcactgctgatcgagccggggccgagccggcgcgaggatggccacgacgcattcggcaatccgctgagccggctggccttcgagcgtccccacgaggcgctgcgggtcagcgcgcggctgcaggtcgaggtgttcgcccatgcgccggcgcaactggccgcgtcgccggcatgggagcgcgtcgccgccgggctggcattttccgggcgggcgctgtccgccgccgaactggaagcctgccgctaccgcgtcgagtcgccctatgtgcgcatccagcggcggttcgtcgagttcgccgccgactgcttcctgcccggacggccgttgctggtggtggcggcggcactgatggggaagatcttccgcgagttcgccttcgatgcgcaggccacccaggtggcgacgccgctggacgaagtgctggagcgccgtcgcggggtctgccaggacttcgcccacctgatgctcgcctgcctgcgcgcgcgcggactggcggcgcgctacgtcagcggctacctgctgacccgcccgccgcccgggcaggcgcgactgatcggtgccgacgcctcgcatgcctgggtctcgctgtattgcccggagaacggctgggtggatttcgacccgaccaacgacctgttgcctgacctggagcacatcaccctggcctgggggcgggatttttccgatgtgtcgccgctgcgcggggtgatcctcggtggcggtagccatgacccggaggtgcgggtgacggtgctgccgctacgggaaactgccggctga

SEQ ID NO: 339695 - DNA, 2499 bp, Pseudomonas aeruginosa
atgcccgagctgcttgcccactatccgttcaccgatacggcctaccatgagctgctcgatcgccagggtggcgtgcgtccccattggcagcggctgttccgccaactggagcgcagcagccctgagcaactgcgccagcgccaggccctggtggaacggcagatccaggagaacggcgtcacctacaacgtttacgccgatcccaagggtaccgaccgcccctgggcgctggaccttctgccgaacctgctgtccgccgccgagtggcagccgatcgccgccggcgtggcacagcgtgctcggctgctcaacgcgctgctggccgacctgtacggcgagcagcgtctgctcgccgaagggctgctgcccagcgaactggtcttcggccatccgaacttcctctggccggcgctcggcatccggccgcccggcgggattttcctgcacagctatgccgtcgacctggcgcgcgatgccgacggacgctggcaggtccttgccgaccgcacccaggcgccgtccggcgcgggctatgcgctggagaaccggcagatcgtctcgcgggccttgccggaactctatcgcgacctgcgtgtgcagcatctcgccgggtatttccgcaccctgcaggagaccctcgccagccaggccgccggcgacggcgagacgccgctggtggtgctgctgactcccggacgtttcaacgaaacctacttcgagcatctctacctggcgcgccagctcggtttcccgctggtcgaggggcacgacctgacggtgcgcgacgccaccctctatctcaagaccctcggcggcctgaaacgggtgcacgcggtattgcggcgcctcgatgacgacttctgcgacccgctggaattgcgtaccgactcggcgctgggcattcccggcctgctcgaggcggtacgccaggggcgcgtactggtggccaacgcgttgggcagcggggtgctggaatcgcccggcctgctcggcttcctgccgcaggcctgtcgccgcctgctcggcgaggagttggcgctgccctcgctcgacacccgctggtgcggcgagccgcaggcactcgaggcgatactcgcggcactgcccgacctggtgatcaagccggcctttcccggccagcgctgcgaaccgctgttcggccacgccctcgacggtgccggcctggcatccctcggcgagcgcttgcgcgagcgcccgcaggcctacgtggcgcaacgcctggcgcagttgtcccaggcaccggtctggcgcgacggcaaggccggcgtcggcctgcagtcgcgggccatcggcatgcgcgtattcgccgtcgccgccagcgacggccgctactgggtgatgcccggcggcctgacccgcgtagcctcggcggcggacgctgaagtggtgtcgatgcagcgcggcggcgcgagcaaggacacctgggtactggccgagcgtgcggtcggcggcgagccgtggcggccgcgccggctcggcgtgcgcgacctggtccgcgaggatccctacctgccgtcgcgggtggtggaaaacctgttctggtacggccgctatgccgagcgttgcgacgaccacgcgcgcctgctgcgggtggtgctgtcgcgctacgtggatgccgatggcgacgaagaggcgctgcgcagcgccctggccctggccggcggcatcggcctgctgcccggggatggcgcgccgctggagcggcgcctgttgcaggcgctgctcgacgagcactggccggccagcctgtgcgccaacctgcggcgcctgcactgggcggcggcgcaggtgcgcgggcgcttgtccggggaaaactggctggccttgctggagctgcaacgcgacatgcaggcgctcgatccggcacgcaccgacctcggcgaagcgctggacttcctcaaccggctagtgatgtccctggccgcgttgtccggtttcgccctcgacgacatgacccgcgacgacggctggcgtttcctgatgatcggccggcgcatcgagcgcgtgcgcttcttcgccgagagcatcgccgccttcctcgacggcggtagcgcctgggacgccggcgcgctggagtggctgctggagctgggtaacagcggcatcacctaccgctcgcgctacctggcgtcgccgcagctggtcccggtgctcgacctgctcctgttgcacgagcagaacccgcactcgctgcgcttccagttgcaggccctggagcgttcgctggagcgcctgcacgaggagttcggcgggccacgcgagcgggaactcaggaccctgggcgaacgcctgcgcagcttcgatctggcggccctggaaagcccgctgttcggcgcggcaggactcgacgaggtgctcgtcgggctggcgcgactgctgcgcgacatcgccgcctgcgccggacaggtctccgatcggctaggcttgcgctatttcgcccatgtcgacgatgtcagccagagaacggtatccacctga

SEQ ID NO: 339696 - DNA, 2244 bp, Pseudomonas aeruginosa
atgcaagccgccaagccgctgttcgactatcccaagtactgggccgagtgtttcggtccggcgcccttcctgcctatgagtagggaagagatggatcagctcggctgggactcctgcgacatcatcatcgtcaccggcgatgcctacgtcgaccacccgtccttcggcatggccatcatcggccgcctgctggaggcccaggggttccgcgtcggcatcatcgcccagccggactggcagtcgaaggacgacttcatgaagctcggcgagccgaacctgttcttcggcgtggcggccggcaacatggactcgatgatcaaccgctacaccgcggacaagaaggtccgttccgacgacgcctacacccccggcggcctggccggcaagcgcccggaccgcgccagcctggtctacagccagcgctgcaaggaggcctacagccatgtgccggtgatcctcggcgggatcgaggcctcgttgcgccgtatcgcccattacgactactggcaggacaaggtccgccgctcgatcctgatggacgccacggccgacatcctgctctacggcaacgccgagcgtgcggtggtggaaatcgcccagcgcctggcccagggcgaaccgctgagcgcgatcaccgacgtgcgcggcaccgccttcgtccgtcgcgacaccccggaggggtggttcgagatcgattccacgcggatcgaccggccgggcaagatcgacaagatcatcaatccctacgtgaatacccaggacactgccgcctgcgccatcgagcaggaaaagggcgtgcaggaggacccgcaggaagccaaggtcgtgcagttgctggcgaaccccaggctgacccgggagaagaccgtgatccgcctgccgtctttcgagaaggtgcgcaacgacccggtgctctatgcccacgccaaccgcgtgctgcacctggagaccaacccgggcaacgcccgtgccctggtgcagaagcacggcgaagtggatgtctggttcaacccgccgcccattccaatgagcaccgaggaaatggactacgtgttcggcatgccctatgcccgcgtaccgcacccggcctacggcaaggcgaagattcccgcctacgagatgatccgcttctcggtgaacatcatgcgtggctgcttcggcggctgcaccttctgctcgatcaccgaacatgagggacggatcatccagaaccgctcgcacgactcgatcatccgcgagatcgaggagatgcgcgacaaggtgcccggcttcaccggcgtggtctccgaccttggcggaccgacggcgaacatgtaccgcatcgcctgcaagagcccggacatcgagcggcactgccgcaagccgtcctgcgtgttccccggcatctgcgagaacctcgataccgaccacagctcgctgatcgagctgtaccgcaaggcccgggcgctgccgggggtgaagaagatcctgatcgcctccggcctgcgctacgacctcgccgtcgagtcgcccgagtacgtcaaggaactggtgacccaccacgtcggcggctacctgaagatcgccccggagcacaccgagcgcggtccgctggacaagatgatgaagccggggatcggcacctacgaccgcttcaagcagatgttcgagaagttctcgaaggaagccggcaaggagcagtacctgatcccgtacttcatcgccgcccaccccgggaccaccgacgaagacatgatgaacctggccctgtggctcaagcgcaacggcttccgcgccgaccaggtccaggcgttctatccctcgccgatggccaccgccaccgcgatgtatcactcgggcaagaacccgctgcgcaaggtcacctacaagagcgatggcgtgaccatcgtcaagagcgaccagcagcggcgcctgcacaaggccttcctgcgctaccacgacccgaaaggctggccgctgctgcgcgaggcgctggagcggatggggcgcgccgacctgatcggcaatggcaagcaccacctggtcccgacctaccagccggataccggcgaataccagagcgcccggcggaagaactcgacgccggccggcagcaagaaggccggcaagctgctgacccagcataccggcctgccaccccgcgccagcgacggcggcaagccgtggagcaagggccagcagaacaaggcgacggccttcgccaagggcaagaagaagtcgcgccagccgaacatcccgcgctga

SEQ ID NO: 339697 - DNA, 1881 bp, Pseudomonas aeruginosa
gtgcgccatcctcttgccctgctcgcggtcatcttcctgctactggccagcgccgtttcgcgcgccgcgccggagtttccagcgcccccggccagcggcgcctggttgaacggctcgctggacctgctcgaagaccccgatggcaacctggcggtggaggacctcgaacaaacggagcaggccggccgcttcgtcgccgccgccggccgcaccagcgtcggcctcagtcgcagcgtctggtggctgcgcctcgacctgccgagacgcgaggcggtatccggcggctggtggctggaagtcgccagcgccagcctgcacgacctgcgcctgtacctccccgacgagcgcggcgggttccgcgaacatcgcagcggcgaagcggtgcccttcgccgagggccgcgaccacgcctatcgtcatccgctgttccagctccctcccggcgatgggccgttgcgcgtctacctgcgcagctacgatcccggcggcaacgcctttccgctgaggctctggagccacgacgaactgctggaataccgcagccagggcaacctgctgttcggcatggcctacgggctgatcctcgccctgctgctgtacaacctgttcctcttcaccagcctgcgcgatcgcgcctatttctggtacgtgctgaccgctgccagcgcgctggtgctgaccctgagcatcagcggccatggtttcgagtatttctggcccgagcgggcggtgccctggtggcttgaccgcctggcgctgctggcgatctggggcatctgcgtgatccgcttcagccagaacctgctgcaaagccggcagcacgcacgctgggcccatcacctgctgaacgcctgttgcctgctgttccttgcctgcctggcgttcaacgccgccggctggcgctggcaggcggccggcgtgctggcgctgaccctgctggccaacctgccgatcgccatcggcctggcagtgcagcgctggcgccagggttcggccacggcgcgcctgtacctgatcggtttcggcctggtgctcggcagcgtcagccttggcgtgatgcgcgccaccgcgctggtccagccgacctcggccaacgccatggtcttccccctggcgctgaccctggaggccctgctgttttccctggcgctcgcctcgcgcatccaggacctgaagcaggaaagggccctggccctggaccaggccgaccaggaaaagaatgcgcgcctggccctgctgcacagcgcccagcgcgacctggcacgcgccgtggaagtccgtaccaacgagctgagcgaggccaatcgccagttgcagatgcgcgaagcgcaactgcagtacgccgcccatcacgacccgctgaccgggcttggcaaccgcaggcacctgatggagttcgccgaaagtgccctggacgacgcgcgccgccacggcaacagcatggcgctgctgctgatcgatctggatcacttcaagccgatcaacgacacccatggccacgatgccggcgacttcgtcctgcagaacgtggcccagcggctgcgccattgcgtgcgcaccgaggattgcgtggcacgcctcggcggcgacgaattcgccgtgctggtcggcgggtcgaatgccgagcagcatgcccgcgacatcgccgaacgcctgctgcgagaactggcgaaaccggtggagttcgccaagcagtggctggtgatcacaccgagcatcggcgtcgccctgtttcccggcgacgccctgcagttcggcaaactctacaaggccgccgaccaggcgctgtaccgggtcaagggcgccgggcgcgccggctatgcgatggtccaggagctacagttggagcaagccatggacagccttcgaacttacaaatga

SEQ ID NO: 339698 - DNA, 1215 bp, Pseudomonas aeruginosa
atgcgcaaactcggagtcaactcgtaccgtttctcgataagctgggcacgagtgctgcccgatggccagacgataaaccccaaagggctcgagtactacaagatactcatacaagatttgaaggaagccggaataactccaattgtaacactttaccactgggatatgcccttagctctttacaagaaaggtggatggtactcctctaaatcgcccgactggttcgctggctacgcaaagctcattttcagcaattttggcgaagaggtaccttacttcataactttcaatgagccggagggcaatatctttaccctgacgcccttggtagagaacttcctcaccgagaccccctcaccctatgagaaagtactatccgtagagtcacgcgcagctcaggcagaggccatgcacaacctcctgctggcgaactcgctagcggttacctcatacaaggaagcagggtacaagggacgaatcggtattgccctgaatctatccccctgtgtcgataatgagaacccgaacagcgcagccaagaggaactgtaactctgtgcacaatgcctgggttctggacgcgctttacaaaggaaactacccgaaagatataaaaactctctatcagaagtacgcacccgcgttccagccctctcaggatgatatgaaaaagatcatgcagggaagacctgacttcatcggcgtaaacttctactctcccaccctggtgaaagacgatccaagccaacccttcggaatagcaaatcgcccaaatccagaccagtatccttcctataacggccccgtctctccttctcatctggtcgaactactaatgcagatagacaaagaatacgaccatcctactctgatcataacggagaacggagccggtttcggagtggacgatgaaaaactcactgaaaatagggtgctagatccactcagggcaaagtatctctctgaccacattgatgcagtgctctcagccaggcatgcaggagtgaaagtagaagggtatctattctggagtcttctggacaacttcgagtggctgttcggctacagaaatcgcttcggaatgattggggtcgactttgaaagcccacaactagcgaggacaccaaaatccagctattacaaataccaagagaaaatcagggattataaagagcgtaacaagtgcctgccccagcaaagccggcactcaggttaa

SEQ ID NO: 339699 - DNA, 1092 bp, Pseudomonas aeruginosa
atgcgtcccctcgttgccaccgtcgacctttccgccattcgccacaactatgccctggccaagcgctgcgcgccgcagcgccaggcgttcgcggtggtcaaggcgaacgcctatggccacggtgcgcgcgaagtggttaccgcgttgcacgacgatgccgatggcttcgccgtagcctgcctggaggaggccgcggtagtccgcgccttgcacgccagcgcgcgcatcctgttgctggaaggctgcttcgaggcgagcgaatacgccctcgccgggcaattgcgcctggacctggtgatccagggcgcggaacagggcgaggcgttcctcgccgccggcctggatattccactcaacgtctggctcaagctcgactccggcatgcaccgcctgggcttcgatcccgtcgcgctgcgcgcctggcatgcgcgcctgcgcaaccatcccggtgtgcgcgaactgaacctgatcagccatttcgcctgcgccgacgaacgcaaccatccgctcaccgagcagcagttggagagtttcctcggcctgctcgacctggatttcgaccagcgcagcctggccaactcggcggcggtgctgaccatcccggccgcccacatggattggctacggccggggatcatgctctacgggtcgaccccgctggccgacctgagtgccgccgaactgggcctgaggccggccatgagcctgggcgcgcagttgatttcgctgcgcgaggtggccgtgggcgagagcgtcggctacggcgccacctggatcgccgagcggccggcgcggatcggcacggtcagttgcggctacgccgacggctacccgcgcaccgcgccagccgggactccggtactggtcgggggacgccgcgcgaccctggccgggcgggtctcgatggacatgctggcggtcgacctctccgacctgccggaggctcgcgttggcgacccggtggagttgtggggcgccgggttgtcggtggacgaggtcgcccgtgcctgcggcaccctcggctacgagcttctgagcaaggttggtgcgcgggttccgcgtgccttccagtacggacctggccgcctatag

SEQ ID NO: 339700 - DNA, 1395 bp, Pseudomonas aeruginosa
atgaacgagatcaccagccccgagcaatacgacctggaaaccacagccctgaaggtgccgccgcactcgatcgaggccgagcaggccgtgctgggtggcctgatgctggacaacaacgcctgggagcgggtgtcggactcggtgtccgacggcgatttctaccgccatgaccatcgcctgatcttccgcgccatctacaagctggccgaggccaaccagccgatcgacgtggtgaccctctccgagcagttggagaaggaaggacaactggcccaggtcggcggcctggcctatctcggcgaactggcgaagaacattccgtcggtcgccaacatcaaggcctacgcgcagatcatccgcgagcgcgccaccctgcgccaactgatcggcatcagcaacgagatcgccgacagcgccttccacccggaagggcgcggcgccaacgagatcctcgacgaggccgagcggaagatcttcgagatcgccgaagcgcgaccgaagaccggcgggccggtggggatcagcgatatcctggtcaagaccatcgaccgcatcgactacctgttcaacaccagcgaggcgctgaccggggtgtccaccggtttcaccgacctcgacgagaagaccagcggcctgcagccggccgacctgatcatcgtcgccgggcgtccgtcgatgggtaagaccaccttcgccatgaacctggtcgagaatgcggtgatgcgcaccgacaaggccgtgttggtgtactccctggagatgccctccgactcgatcgtgatgcgtatgctctcgtcgctcggtcgcatcgatcagaccaaggtccgttccggcaagctcgacgacgaggattggccgcgcctgacctcggcgatcaacctgctcaacgacaagaagctgttcatcgacgacaccgccggcatcagcccctcggaaatgcgtgcgcggacccgtcgcctggtgcgcgagcacggcgacctggcgctgatcatgatcgactacctgcagctgatgcagatacccggctccagcggcgacaaccggaccaacgagatttccgagatctcccgctcgctgaaggccctggcgaaggaattcaactgcccggtgatcgccctgtcgcagctcaaccgctccctggagcagcgacccaacaagcgcccggtgaactccgacttgcgcgaatccggggcgatcgagcaggacgccgacgtgatcatgttcgtctaccgcgacgaggtgtaccacccggagaccgagttcaagggcgtcgccgaaatcatcatcggcaagcagcgtaacggtccgatcggcacggtgcgcctggccttcatcggcaaatacacgcgcttcgagaaccttgccgccggcatgtacaacttcgaggacgaatga

SEQ ID NO: 339701 - DNA, 447 bp, Pseudomonas aeruginosa
atggaagtcatcctgctggaaaaagtcgccaacctgggcaacctgggcgacaaggtgaacatcaagggcggttacgcccgtaacttcctgctgccgcagggcaaggccaccgtcgccaccgccgagaacgtcgctgcgttcgaagcccgccgcgccgagctggaaaaggctgccgccgagaagaaggccgctgccgaagcccgtgctgcccagctctccgagctggtggtaaccctcggcgcccacgctggcgacgaaggcaagctgttcggttcgatcggcacccgcgacatcgccgaagccgtttccgctgccggttacccgctggaaaaagccgaagttcgcctgcccaacggcgcgctgcgcaacaccggtgagttcgacgtcgccgtgcacctgcacaccgacgtggaaaccactctgaagctgatcatcgtcgctgagtaa

SEQ ID NO: 339702 - DNA, 870 bp, Pseudomonas aeruginosa
atgcgcgcactggctgagttcaccatgcgcggccgcatgcaggccacgctcgccgtggcaggctccgcggttgttccactgttgttctggctgagtgccgccgccggtagcctggtgctgctgcggcgcggattcggcgacgccttcggcgtcctggcctgggcggtgctaccggcgatgttctggtggtacctgggcgatccgagcatccttctggtcctgctcggtaccctgacgctggcgcagatcctgcgcgccagtacgtcctggagccatgtgctgctgggcagtgttgcagttggcgtggtattcgcgctggtgctggggcatacctccagcgagctgatcggcgccctggcgacggaagtcaccaaggtcctgacccagcttcgtggggagtcccagctgtcgggcgaagagctggacaagttgcaggtggcgctggtgccgaccctgaccggggtcatggcttcctcgctgcaggtgacctgcctgctctgcctgatgctcgcgcggtactggcaggcttcgctgtacaacccgggcggcttcggccgcgaattccggagtttgcggctggcgccggcggttgccgtgatcctgctgctgggggccgtcgtggtcccggcgctggaagtgcaggccgcggtgctcggcccgttgtgcagcgtgccgctgatcatcgccggcgtggcgctcgggcatggcctgatcgccctgaagcgcctcgcgggtggttggctggtgggcctgtacctggctgtattgctgctggggaacctgatctgtcttttggcggttgtcgacagtctgtttgattttcgtggacgcctggcccggcgccagggttccacgaacggtgaaggttaa

SEQ ID NO: 339703 - DNA, 231 bp, Pseudomonas aeruginosa; identical to SEQ ID NO: 318155

SEQ ID NO: 339704 - DNA, 420 bp, Pseudomonas aeruginosa
atgcgtcattacgaaatcgtgttcctggttcacccggaccagagcgaacaagtcggtggcatggtcgagcgttacaccaaggccatcgaagaagacggcggcaagatccaccgtctggaagactggggccgtcgtcagttggcctacgccatcaacaacgtgcacaaggcccactacgttctgatgaacgtcgagtgcagcgccaaggccctggctgagctggaagacaacttccgttacaacgatgccgtgatccgtaacctggtcatgcgtcgcgacgaagctgtcaccgagcagtccgagatgctcaaggctgaagaaagccgcaacgagcgtcgcgagcgtcgtgagcgtccgaacgataacgctgaaggcgccgatggcgacgacaacagcgatagcgataacgctgacgagtaa

SEQ ID NO: 339705 - DNA, 747 bp, Pseudomonas aeruginosa
atgagtcagtgggaaaaggtctacggcgtgcatgccgtggaagcgttgttgcgtcatcacccgaagcgggtcaagcagttgtggctggccgaggggcggcatgatccgcgggtccaggtgctcaccgagctggccgccgggttccgtattccggtagggcagcgcgaccggcgcgaactcgacgagtgggcggaaggcgtccaccagggcgtggtcgcggaagtcagccccagccaggtctggggcgaaaacatgctcgaggaactgctcgagcggagcgagggcgtgccgctgctgctggccctggatggcgtcaccgatccgcacaacctcggcgcctgcctgcgtaccgccgatgcggcgggggtgcaggcggtgatcgtgcccaaggacaagtccgcgaccctcaacgccaccgtgcgcaaggtcgcttgcggcgccgccgaggtgatcccgctggtggcggtgaccaacctcgcgcgcaccctggaaaagctccagcagcgcggcctgtgggtggtcggcaccgccggcgaggcggacaagaccctctaccagctcgacctcaaggggccgaccgtgctggtgatgggcgcggaaggcaagggcatgcgccggctgacccgcgagcactgcgacttcctcgccaggttgccgatggccggcagcgtcagcagcctgaacgtctcggtcgccaccggcgtctgcctgttcgagatcctccgccagcgcaccccgctggagtga

SEQ ID NO: 339706 - DNA, 2718 bp, Pseudomonas aeruginosa
atggccgattggcaaaacctcgatcccgaggccgctcgcgaagcggaaaagtacgaaaaccccatccccagccgggaactgatcctggctcacctatccgagcgaggcgctccggcgactcgctcccagttgctcgacgagttcgggctcgccggcgaggagccggaagaggccttgcgtcgtcgcctgcgcgccatggagcgcgacgggcagcttatctatacgcgtcgtggcgcctacgcgccggtggacaagctggacctgatccgcggccgcatcagcgggcaccgcgatggcttcggcttcctgatccccgacgatggcagcgacgacctgttcctcagccccacccagatgcgcctggtgttcgacggcgaccgcgccctggcacgggtgtccggccatgaccggcgcggacgccgcgaaggccaactggtcgaggtgatcgagcgggcccacgagatcgtggtcggccgctacttcgaggaaagcggcatcggcgtggtggtcgcggacaacccgaagatccagcaggaagtcctgatcccgccgggcaaggccggcaaggccaggcacaaccagttcgtccaggtgcgcatcgagcaatggccgagcatccaccgccaggcccagggcgagatcgtcgaggtgctcggcgactacatggcgccggggatggagatcgaagtcgccctgcgcagctacgatatcccccacgtctggccggccgcggtggagaaggaagcggccaagctcaagccggaagtggcggagaaggacaaggaaaagcgtatcgacctgcgccaggtgcccttcgtcaccatcgacggcgaggatgcccgcgacttcgacgacgcggtgtacgccgaggccaagcgcggcggcggctggcgcctgttcgtggcgatcgccgatgtctcgcactacgtgaaggtcggttcggcgctggacgaagaggcggccaggcgcggcaactcggtgtatttccccgagcgggtgatcccgatgctgccggaggtgctgtccaatggtctctgctcgctgaatccgctggtcgaccggctggccatggtctgcgagatgaccctgtccaaggccggcaagctgaccggctatcagttctacgaagcggtgatccactcccatgcgcgcctgacctacaccaaggtcagccagttgctcgagcatcccgacagcgtcgaggccgagaacctgcgccagcagttgcccggcgtggtgccgcacctgcagcagctgtatgcgctgtataaagcgctgctggccggccgccatgtccgcggcgcgatcgatttcgagacccaggaaacccgcatcgtcttcggcgccgaccggaagatctcggaaatccgcccgacccagcgcaacgatgcgcaccgcctgatcgaagagtgcatgctctgcgccaacgtggcgaccgcacgcttcctgcagaagcacgccatcccggcgttgtaccgggtgcatgacggcccgccgcaggagaagctcaacaacctgcgccagttcctcggcgagctggggttgagcctcggccgcggcaaggccgcgccgaccccgggcgactaccaggagttgctggagaagatccacgaccgcgccgacttccgcctgatccagacggtcatgctgcgttcgctcagccaggcggtgtacagcccggacaacaatggccacttcggcctcaactacgacgcctacacccacttcacctcgccgatccggcgctacccggacctgctggtgcatcgtgcgatccgcagtgtgatccgctccaaggcggagactccgcacgtgcagcgggccggcgcggcgagcatgcccaaggcgcgcatctatccgtacgacgaattgcgcttggaccagttgggcgagcagtgctcgatgaccgagcggcgtgccgacgaggccacccgcgacgtgaccaactggctgaagtgcgaatacatgcgcgagcgggtcggcgagaccttccctggcgtaatcaccgcggtcaccggtttcggtctgttcgtcgagctgaccgacatcttcgtcgaaggcctggtccatgtgaccgcgctgcccggcgattactatcatttcgacgccgtgcaccatcgcctcagcggcgagcgcaccgggcgcagcttccgtctcggcgacaccacggaagtggtagtggcgcgggtcgacctggacgagcggaagatcgatttcgagctggccggaaacgtgctgagcgcgccgatcggacgcaagaagcgcaacggcgacaagtcggcgaacgccggcaaggcgccgaaggggcgcaagggcgcatccgtgcccgaggtcgacctggagccggcgctggccagtcccgacgccgcggtggtgccgcggcgcaaggccggcaaggtgcaggcgctgccgccggtcgcgccggagctgctggcgcaggccgcggagatgctcggcaacaccgacgtgcgcaagagtcgcgaggtgaagcaggcgccgctcgccgaggcgcgcgtcggcggcggcaaggacaagggcgggaagaagggcaaggtcgttcctgcgggcaagagcgcgaagggcaaggccaagggcggcaagcccgccgctgccgccaagccgggaaagccgaccaagcatcgcaaggggccttccaagccgaaggccgacaacgctccggccgccaccggggcgcgcaaacgtaaggccaagtcatga

SEQ ID NO: 339707 - DNA, 1293 bp, Pseudomonas aeruginosa
atgggtaagaatgtcgtagtcctgggcacccaatggggtgatgagggcaagggcaagatcgtcgacctgctcaccgagcaggcggctgccgtagttcgctaccagggtggtcacaacgctggccacaccctggtgatcgatggcgagaaaaccgtcctgcacctgattccatcgggcatcctgcgcgaaggcgtgcagtgcctgatcggcaatggcgtggtgctggcgccggatgcgctgctgcgcgaaatcaccaagctggaagagaagggcgtgccggtgcgcgagcgcctgcgcatcagtccttcctgtccgctgatcctgtcctatcacgtcgccctcgaccaggcgcgcgagaaggcccgcggcgaagccaagatcggcaccaccggtcgcggtatcggcccggcatacgaggacaaggtggcacgtcgcggcctgcgcgttggcgacctgttccaccgcgagcgcttcgccgccaagctgggcgagctgctggactaccataacttcgtcctgcagcactactacaaggagccggccatcgacttccagaagactctggacgaggcgatggagtatgccgagctgctcaagccgatgatggccgatgtcgctgcgaccctgcacgacctgcgcaagcacggcaaggacatcatgttcgaaggcgcccagggatcgctgctggacatcgaccatggcacctatccctacgtgaccagttccaacaccaccgctggcggtaccgccaccggttccggcttcggcccgctgtacctggactacgtactgggtatcaccaaggcctataccactcgcgtcggctccggtccgttcccgaccgagctgttcgacgacgtcggcgcctacctggccaagcgcggccacgagttcggtgccaccaccggtcgcgctcgtcgctgcggctggttcgatgccgtgatcctgcgccgcgccatcgagatcaacagcatctccggcctgtgcttgaccaagctcgacgtgctcgatggtctggacgtggtgcgcctgtgcgtcggctacaagaatgccgatggcgatgtgctggaagcgccgaccgatgccgacagctacatcggcctgcagccggtctacgaggaaatgcccggctggagcgagtcgaccgtgggtgcgaagaccctggaagagttgccggccaacgcccgcgcctacatcaagcgcgtggaagaactggtgggtgcgccgatcgatatcatctccaccggtccggaccgcaacgaaaccatcatcctgcgccatccattcgcctga

SEQ ID NO: 339708 - DNA, 1185 bp, Pseudomonas aeruginosa
atggcaacggtagaccgctggctgctgccagatgggatcgaagaggtgctgcccccggaggcggcgcgcatcgaagcagcccgccgtcaggtgctggatctgttccaccgctggggttacgagttcgtcgtgaccccgcatatcgaatacctggagtcgctgctcaccggtgcgggacaggatcttgacctgcgcaccttcaaggtgaccgacccggcgtccggccggctcatgggtttccgtgccgacattacgccgcaagtggcgcggatggatgcgcacagcctgcgccgcgagggaccgagccgcctgtgctatgccggcagcgtgctgcatgcgcagccgcgcgcgctgtccacttcgcgtagtccgatccagctgggcgccgagctgtacggcgatccgagccccgccagcgatgtcgaggtgatcagcctgatgctggaaatgctcgagatggcggaagtgccggacgtgcacatggacctcggccatgtcggcatctaccgcggcctggcgcgcgcggcagggctgtccggcgaagtcgagcagcagttgttcgatgccttgcagcgcaaggcggtggacgaggtcgaggcgctgactgccgacctgcctgccgagctgcgcggcatgttgcgtgcgctggccgagctatgcggcggccgcgatgcgctggagcagggccgtgcccgtctggcggcggcgccggccgatgtccaggtggcgctgaacgagctgatcgagatcgccgattcgctggctggacgtttccccggcttgccgctgtatttcgacctcggcgagctgcgtggctatcactatcacaccggcgtggtgtttgcggccttcgtgcccggcgttggccagtccatcgcccagggcggtcgctatgatgatatcggtgccgatttcgggcgcgcccgcccggccaccggtttctccaccgatctgaaaagcctggtcactctcggccaggcccggttggaccaggctgtatcgggtatctgggcgccggccgaaggggccgggctctggcaggcggtgcaacgactgcgccgcgacgggcagcgtgtcgtccaggctctgcccgggcaggatgcggcttctgcgcgcgaggcgggctgcgaccggcagctggcgctgcgcgatggcaattggcaggtggcgccgctggcgtcctga

SEQ ID NO: 339709 - DNA, 234 bp, Pseudomonas aeruginosa; identical to SEQ ID NO: 318149

SEQ ID NO: 339710 - DNA, 870 bp, Pseudomonas aeruginosa
atgggcaacaagtctttgatcgctctgatcgtcggtgtcgtcgccgccatcgtcctgtggaacagcgtctacgtagtccagcagaccgagcgcgcggtcatgttgcgcttcggccgggtggtcgagtccgacgtcaagccgggcctgcacttcaagatcccgtacgtcaaccaggtgcgcaagttcgacgctcgcctgctgaccctggatgccccgacccagcgcttcctgaccctggaaaagaaagcggtgatggtggatgcctatgccaagtggcgggtggcggatgccgagcgcttctataccgctacctcgggcctcaagcagatcgccgacgaacgcctgtcgcggcgtctcgaagcgggtctgcgcgaccagttcggcaagcgtaccctgcatgaagtggtatcgggcgagcgcgacgcgctgatgggcgacatcaccgcttcgctgaaccgcatggcgcagaaggagctgggtatcgaggtgatcgacgtgcgggtcaaggccatcgacctgccgaaggaagtcaatcgcagcgtcttcgagcggatgagcaccgagcgtgagcgcgaggcccgcgagcaccgcgccaagggtcgcgaactggccgaaggcattcgtgccgacgccgatcgccagcgccgggtaatcgttgccgaagcctaccgcgagtcggaagagacccgcggtgacggcgactccaaggctgccgcgatctatgccaaggcctacaaccaggatccggagttctattccttctaccgtagcctgaaggcgtatcgcgaaagctttgccgagaagcgcgacgtactggtgctcgatccgagcagcgagttcttccgctatctgaacaaggccaacaagtaa

SEQ ID NO: 339711 - DNA, 1203 bp, Pseudomonas aeruginosa
atggcttggaacgagccgggtgacaactcgaacaacaacgatcgagacccgtggggaggccgccgcggtggtggtggcggcggtggtgaccgcaaggggccgcccgacctggatgaggctttccgcaagcttcaggacagcctgaacgggctgttcggtggaaaaaaacgcagtggcaacggttccggctccggttccggcggcaagggcggtggcctgggcctgttcggtatcggcctggcgatcctcgccgtgctctggctgtacaacgccatctatgtggtggacgagcaggagcaggcggtcatcctgcgcttcggcaagtattacgagacggtcggtcccggcctgaacttctacttcccgccgatcgacaagcgcttccaggagaacgtcacccgcgagcgtgcgtacagcaagcaggggcagatgctcaccgaggacgagaacatcgtcgaagtgccgctgaccgtgcagtacaagatcagcaacctgcaggacttcgtgctcaacgtcgaccagcccgaggtcagcctgcagcaggcgaccgagagcgcgctgcggcatgtcgccggctccaccaccatggaccggatcctcaccgaaggccgcgagcagatggcgaccgaggtgcgcgagcgcctgcaacgcttcctggatacctacaggaccggtatcaccgtgacccaggtgaacatccagagcgcccaggccccgcgtgaggtgcaggaagcgttcgacgacgtgatccgggcccgcgaggacgagcagcgcgagaagaaccaggccgaagcctatgccaacggcgtggtgccggaggcgcgtggccaggcccagcgcatcatcgaagaagccaacggttaccgcgacgaggtgatttcgcgcgcccagggtgaggcggatcgcttctccaagctgctggtggaatatcgcaaggctccggaagtgacgcgcgagcgtctgtacctggacaccatgcaggaagtcttcagccagaccagcaaggtgctggtgaccggtcagcaggggcagaacaacctgctctacctgccgctggacaagatgatcgatggtcgtaacgccgcacccgctacgggtgccggtgcttccgccggtggtggcagcgccagcgcttccgacctggggtcgcggatcgtcaacgatctgcgccagcaagacgcgcgtacgagggagagccgctga

SEQ ID NO: 339712 - DNA, 1260 bp, Pseudomonas aeruginosa
gtgcatctggaagggcagaaccccgaggcgcgtgaagacccgcaggagttccaggagctggtgcgttcggccggcgcggaaacggtggcattcgtcagcgtctcccgccaccagccgagcgccaaatatcttatcggcagtggcaaggtcgaggagttgcacgacctggtcaaggccgaaaacgtcgagctggtgattttcaaccacaccttgacgcccagccaggagcgcaacctcgagcgagcgttcgagtgccgcgtactcgaccggaccgggctgatcctcgacatcttcgcccagcgcgcacgtacccacgaaggcaagttgcaggtggaactggcgcaactggagcacatgagcacgcggctggtacgcggctggacccacctcgaacggcagaaaggcggtatcggcctgcgcggtccgggtgagacccagctggaaaccgaccgacgcctgctgcgcgtgcgcatccgccagatcaagcagcgcctggagaaggtccgcagccagcgcgagcaggctcgacgcgggcgcaagcgcgcggatatcccggcggtctccctggtcggctataccaacgccggcaaatcgaccctgttcaatgcgctcaccgcctccgaggtgtatgccgccaaccagttgttcgccaccctcgaccccaccctgcgtcgcctgcaactggacgatctcgggccggtggtgctggccgacacggtgggcttcatccgtcacctgccgcacaagctggtggaggccttccgcgctacgctggaagaatcgagcaacgccgacctcctgctgcacgtgatcgacgcctacgagcccgaacgggatgcgcaggtcgagcaggtgctggcggtgctcggcgagatcggcgccaacgaattgccgatgctcgaggtctataacaaggtcgacctgttaccctcggtcgagccgcacatccagcgcgacgactccggcaagccggtgcgcgtctggctgtcggcgcagaccggcgaaggcctcgacctgttgcgccaggccatcgccgagctgctcggcgaggacctcttcgtcgggaccttgcgcctgccccagcggctcgggcgcctgcgcgcccagttgttcgaactgggcgcggtgcagtccgaggcgcacgatgaggaaggttgtaccctgctgcaggtgcgcctgccgcgggccgagttgaaccgcctggcgagccgcgctggctggcagccggcggagttcgttgcgcaacacactttgcaataa

SEQ ID NO: 339713 - DNA, 249 bp, Pseudomonas aeruginosa
atgtcaaaagggcattcgctacaagacccttacctcaataccctgcggaaagaacgcgtcccggtttccatctatctggtcaacggcatcaagctgcaaggccagatcgagtccttcgaccagtttgtcatcctgctgaagaacaccgtcagccagatggtttacaagcacgcgatctccaccgtggtaccgagccgtccggtgcgtctgccgagcggtgaccagccggccgagccgggcaacgcttga

SEQ ID NO: 339714 - DNA, 972 bp, Pseudomonas aeruginosa
atgtcttccctgcctcccgccatctttctcatggggccgaccgccgccggcaagaccgacctggcgatggcgctggccgatgtgctgccctgcgagctgatcagcgtcgactcggcgctgatctaccgcggcatggatatcggtacggccaagccttcccgggagctgctggcgcgctatccgcaccgcctgatcgatatccgcgacccggcggagagctattcggccgcggaattccgcgccgacgccctggcggcgatggccgaggccaccgcgcgcggcaggattcccctgctggtggggggcaccatgctctattacaaggcgttgctcgagggcctggccgacatgcccggcgccgatcccgaggtgcgcgcggcgatcgaggccgaggccctggccgaaggttgggaggcgctgcaccggcaactcgccgaggtcgacccggagtcggctgcgcgcatccaccccaacgacccgcagcgactgatgcgggcgctcgaggtgtatcgcctcggcggggtgtcgatgagcgacctgcgtcgccggcaaagcgctgaaaaggcggattttgacgcgtcaggcaggaatcaattgccgtatactgtcgctcagctggcgattgctcccgagcagcgccaggtgttgcacgcgcggattgcgcagcgttttcgccagatgctggaacagggtttcatcgccgaggtcgaagcactgcatgccagaagtgacttgcatgcaggattaccgtctattagagccgtgggttaccgtcaggtgtgggattacctggatggcaagctgtcctacgctgaaatgaccgaacgcggcatcatcgctacccgccagttggccaagcgccagttcacctggctgcgaagctggagccatctacactggatggacagcctagcaggtgacaatctgccgcgtgccttgaaatacctgaaaacggtctccatattggcctga

SEQ ID NO: 339715 - DNA, 1902 bp, Pseudomonas aeruginosa
atgagtgaagcaccgcgtatccagctgctgagtccgcggctggcgaaccagatcgccgccggtgaggtggtcgagcgtcccgcctcggtggccaaggaactcctggaaaacagccttgacgccggttcccggcgcatcgacgtggaggtcgagcagggcggcatcaagttgctgcgagtgcgcgacgacggtcgcggcatccccgccgacgacctgccgctggccctggctcgccacgccaccagcaagatccgcgagctggaagacctggagcgggtgatgagcctcggcttccgtggcgaggcgctggcctcgatcagctcggtagcgcgcctgaccatgacctcgcgtaccgccgacgcgggcgaagcctggcaggtggaaaccgagggccgcgacatgcagccgcgggtacagccggcggcgcacccggtggggaccagcgtcgaggttcgcgacctgttcttcaacaccccggcgcggcgcaagttcctgcgcgccgagaagaccgagttcgaccatctgcaggaggtcatcaagcgcctggcgctggcccgcttcgacgtggctttccacctgcgccacaacggcaagaccatcttcgccctgcacgaggcgcgagacgagctggcccgcgcgcgccgggtcggcgcggtgtgcggccaggcattcctcgagcaggcgctgccgatcgaggtcgagcgcaacggcctgcacctgtggggctgggtcggcttgccgaccttctcccgcagccagccggacctgcagtacttctatgtgaacgggcgcatggtgcgcgacaagctggtcgcccacgcggtgcgccaggcttatcgcgacgtgctgtacaacggccggcatccgaccttcgtgctgttcttcgaagtcgatccggcggtggtggacgtcaacgtgcacccgaccaagcacgaagttcgcttccgtgacagccggatggtccatgacttcctctatggcaccttgcatcgtgcgctgggcgaggtccgtcccgacgaccagctcgcgccgcccggggcgaccagcctgaccgagccgcgaccgaccggcgctgccgccggcgagttcggcccgcagggcgagatgcgcctggccgagagcgtgctggagagtccggcggcacgggtgggctggagtggcggctcgtcggcctccggcggctcctccggctattccgcctatacccggccggaggcgccgccttctctggccgaggccggtggcgcctacaaggcctacttcgcgccgttgcccgcgggcgaggcgccagccgcgttgcccgagggcgcccaggacatcccgccgctgggttacgccctggcgcagctcaagggcatctacatcctcgccgagaacgcccacggcctggtgctggtggacatgcacgcggcccacgaacggatcacctacgagcgcctcaaggtggcgatggccagcgaaggcttgcgtgggcagccgttgctggtgccggagtcgatcgcggtcagcgagcgcgaggcggattgcgcggaagagcattccagctggttccagcgcctgggcttcgagctgcagcgcctggggccggaaagcctggcgatccggcagatccctgcgctgctcaagcaggcggaggcgacccagttggtgcgcgatgtcatcgccgacctgctggagtacggcaccagcgaccgtatccaggcacacctgaacgagttgctcggcaccatggcctgccatggcgcggtgcgcgccaaccggcgcctgaccctgccggaaatgaacgccctgttgcgcgacatggaaatcaccgaacgcagcggccagtgcaaccatgggcgtccgacctggacccagttgggcctggacgagctggacaagctcttcctgcgcggacgctga

SEQ ID NO: 339716 - DNA, 1428 bp, Pseudomonas aeruginosa
atgggttggggcttgcgtctgcggacgttgttgactggggtgatgattctgctggcctgccaggtcggcgaggttctggccgccgcgcaaatcaagagcgtgcggatctggcgcgctccggacaacacccgtctggtcttcgatctctccggtccggtgcagcacagcctgttcaccctggccgcacccaaccgtatcgtcatcgacgtcagcggcgcccagctggcgacccagctcaacggtctcaagctcggcaacaccccgatcaccgcggtgcgctccgcccagcgcacgcccaacgacctgcgcatggtcctcgacctgtcggcgcaggtcaccccgaaaagcttcgtcctgccgcccaaccagcaatacggcaaccgcctggtggtcgatctctacgaccagggcgccgacctgaccccggacgtacccgcgacgccgaccccgagcgtgccggtcactccggtgacgccgaccctgccggtggccaagctgccgctgccgaccaagggcggtacccgcgatatcgtcatcgccatcgacgccggccacggcggtgaagaccctggcgcccttggcccgggcgggctgcacgagaagaacatcaccctgtcgatcgctcgcgagctgcaacgccagatcaaccaggtgcgcggttaccgggccgagctgacccgtaccggcgactacttcatcccactgcgcaagcgcaccgagatcgcccgcaagaagggcgccgacctgttcgtctcgatccatgccgacgccgcgccgagccgcagcgccttcggtgcctcggtgttcgccctgtccgaccgcggcgccacttcggaaaccgcgcgctggctggccgacagcgagaaccgttccgacctgatcggcggcgatggcagcgtcagcctcggcgacaaggaccagatgctcgccggcgtgctgctcgacctgtcgatgaccgccaccctctcgtcgagcctggacgtcggccacaaggtgctgaccaatgtcggccgcatcacttcgctgcacaagcgtcgtgtcgagcaggccgggttcatggtgctgaagtcgccggacatcccgtcgatcctggtggaaaccggcttcatctcgaacgtcaacgagtcgcgcaagctggccagcgccagccatcagcaggccttggcgcgttcgatcaccagcggcatccgccagtatttccagcagagcccgccgcccggcacctacatcgcctctttgcgcgcccagggcaagctctccatggggccgcgcgagcacgtggtgcggcccggagagaccctggcgatgatcgcccagcgctatgaagtgagcatggccgcgctgcgcagcagcaacagcctgtccagcgacaacctgaaagtcggccaggccctgtccatcccgagcaccgccctggcggcccagtga

SEQ ID NO: 339717 - DNA, 468 bp, Pseudomonas aeruginosa
gtgtctgaagtgatcctgtccgccgaaggggaagacgcgatgctcgaactgggcgggcgcatcgcccgggtcagcggggggcagggggtgatctacctgcatggcgacctcggcgccggcaagaccaccctctcgcgcggcatcctgcgcggcctcggccatgccggctcggtgaaaagcccgacctttaccctggtcgagccttacgaaatcggcgagctgcgcgcctaccatttcgacctgtaccggctcgccgatgcggaggaattggagttcttcggcatccgcgactatttcgacggcagcgcactctgtctgatcgagtggcccgagcgcggtgcgggcgttttgccaaccgccgatctggacattaccattactgcccaagcgggtggacggacactgcgcctggtaccgcacggtgcgcggggcgaagcctggtgtgccaccctgaccatgggagcatga

SEQ ID NO: 339718 - DNA, 1509 bp, Pseudomonas aeruginosa
atgaccatgaccttccagcacgacgacctgccactcgccctctattccgccgcccaggtgcgcgacctggatgcgcgcctgatcgctgccggcacgccgggcttcgaactcatgcagcgcgccgcccacgccgcctggcgtgccttgcgccgccgttggccggaggccgcggcgctgacggtgctcgccgggcacggcaacaatgccggcgacggctacctgatcgcggcgctggcgcaacgtgcgggttggcgagtgcgggtgctggcggtcgcggcgccgcagcggcttgccggcgacgcggcgcaggcgcatgccgccgcgctggcgaccggggtcgtggtggagccctggagcgagtgcgccgtgctcgagggcgtagtagtggatgcattgctcggcaccggcctggcaggtgccgtgcgcgagccctttgcgcaggccatccgcctggccaacgccgccgacctgccggtgctggcggtggatattccttccggcttgagcgccgacaccggcgcggtattgggggaagcgatcagggcggatctgacagtgactttcatcggcctgaagatcgggctgttcactggcgaggcgccggcacgggtcggcgagctggtgttcgacgaactcggtagcgacgccgtcgtgctgcaagcgctccagccccgggctcgccgcctggcgcgaaatgccctgccgaggctggcagcgcggccgcggaccgcacacaaggggctgttcggccacctgctggtggtcggcggcgacaccggcatgggcggggccgtgctactggccgcggaaagcgccctgcgctgcggcgccgggctggtctcggcggcgacccgcgtcgaacatgtgccggcgttgctgggccgttgtcccgaggtcatggcccatggcgtggcgtcggcgaaccaactgctggcccttgccgaacgcgccagcgtgctggtgctcggtcccgggcttggccagcgcgcctggggtcgcagcctgctgagcgctgtccggtcgcgaccgttgccgcaggtctgggatgccgacgcgttgaacctgctggccctggaaccggtcggagcagggccgcagacatggattctgacgccgcatcccggcgaggccgcgcgcctgttgggtcgctcgaccgccgaggtgcaggcggatcgtccggcggcggcgctggaactggcgcgtcgctaccaggcggtggtggtgctgaagggcgccggcagcctgatcgccgcgcccgacggacgactcgccgtctgttcccaggggcatccggcgatggccggcgccggcctgggtgacgtgctgtcgggcatcaccggtgccttgctggcccagcgcgtggaggcgttcgaggcggcctgcctggctgtctggctgcatgccgccgccggtgagcggctcggcgcccagggtcgcgggctggcggcgaccgatctcatacctaccgttcgtcagttgctcgaggagtgcagtccgtgtctgaagtga

SEQ ID NO: 339719 - DNA, 1086 bp, Pseudomonas aeruginosa
atgactccccaacctctggccgacaacctttccccgccggaccccgcccgcctcgcccagtccatcaaggactggggccgcgagctggggttccagcaggtcggtatcagcgacgtcgagctgggcgagcacgaagcgcacctgcagcgctggctggaggccggctaccacggcgagatggactacatggcggcgcacggcagcaagcgctcgcgacctgccgagctggttcccggcacgctgcgggtgatctccctgcgcatggattacctgcccggcgacacgcgcatggcgcaggtcctcgcgacaccggaaaaagcctacgtctcgcgctacgccctcggccgcgactaccacaagctgatccgcaagcgtctgcaacaactggccgagcgcatccaggccgaagtcggcccgttcggtttccgcgccttcgtcgacagcgcgccggtgctggaaaaggccatcgccgaacaggccggcctcggctggatcggcaagaacacgctggtgctcaaccgcaaggccggcagctacttcttcctcggcgagctgttcgtcgacatgccgctacccgtcgacccggcgatggacagcgagcattgcggacgctgctcggcctgcctggacatctgcccgaccgcggccttcgtcggcccctaccggctggacgcgcgacgctgcatctcctacctgaccatcgagtacaagggcgcgattccgctggagctgcggccactgatcggcaaccgggtattcggctgcgacgactgccagatcgtctgcccatggaatcgcttcgcccgccccaccgggcagggcgacttccagccgcgccacagcctggacaacgccgaactcgccgaactgttcctctggagcgaggaggagttcctcggccgcaccgagggttcgccgctgcgccgcgccggctacgaacgttggttgcgcaacctggcggtggggctgggcaacgcgccctcgaccatcccggtgctggaggcgctgaaggcgcgccgcgggttcccttcggagctggtccgcgagcacgtggaatgggccctgcggcgccacggggaaacctag

SEQ ID NO: 339720 - DNA, 543 bp, Pseudomonas aeruginosa
atgcagaacccgcagaaccttatctggatcgacctggagatgaccggcctcgatccggaccgggacgtcatcatcgagatggccaccatcgtcaccgacagtgacctcaacaccctggccgaaggaccggtgatcgccatccaccagccagaggaaatcctcgccggcatggacgagtggaatacccgccagcacggccaatccggcctgacccagagggtccgggaaagcaccgtgagcatggccgaggccgaggcgcagaccctggccttcctcgagcagtgggtgcccaagcgcagctcgccgatctgcggcaacagcatctgccaggaccgccgcttcctctatcggcacatgcccaggctggaaggctacttccactaccgcaacctcgacgtctccaccctcaaggagctggctgcgcgctgggcgccgcaggtccgcgagagcttcaagaagggcaacacccacctggcgctggacgatatccgcgagtcgatcgccgagctgcgccactatcgcgaccacttcatcaagctctga

SEQ ID NO: 339721 - DNA, 1020 bp, Pseudomonas aeruginosa
atggccaaacgccacttgacccgccggcagagctggcgcatcgaaaagatccaggaagaacgcgcggcccgagcggcccgtcgcgagtcgcgtgccgtggaagagctggagggcggcgacctgggaccggagcagaccggccaggtgatcgctcatttcggggttcaggtagaggtcgagtccgccgacggccaggtttcccgctgtcacctgcgcgccaacctgccggcactggtgaccggcgaccaggtggtctggcgtgccggcaaccagggcatcggcgtgatcgtcgcgcaattgccacgtcgctccgagctgtgccgcccggacatgcgcgggctgctcaagccggtagcggccaacgtcgaccgcatcgtcatcgtcttcgccccgcgtcccgaaccgcacgccaacctgatcgaccgctacctgatcgccgccgaacatgccggcatccagccgttgctgctgctgaacaaggccgacctggtcgacgagagcaatgccgaaggcatcgatgcgctgctgaatgtctaccgcaccctgggttacccgctgatcgaggtgtcggccttcaatggcctggcgatggacgaactgcgcggcgcgctggacgctcacgtgagcgtcttcgtcggacagtccggggtgggcaagtcgtcgctggtgaatgccttgttgccaggtgtcgacacccgtgtcggcgacctctccacggtgaccggcaagggcacccataccaccaccaccgcgcgactgttccattttcccggcggcggcgacctgatcgactcgcccggcatccgtgagttcggcctggggcacgtgtcgcgagacgacgtcgaggccggtttcatcgagttccgcgacctgctcgggcattgccgcttccgcgactgcaagcacgaccgcgaaccaggttgcgccctgctccaggccctggaggacgggcgcatcatgccgcaacgcatggccagctaccggcacattctggcaagcatgccggaaacggactactga

SEQ ID NO: 339722 - DNA, 1044 bp, Pseudomonas aeruginosa
atggacaataaccagccgatcatcgtcaagcgcgtcaagcgctatgccgccggccaccacggcggctcgtggaagatcgccttcgccgacttcgcgacggcgatgatggcgttcttcctggtgctctggctgctgtcttcggccaccccggagcagaagaaggcgatttccggatacttccaggaccccatcggtttcagcgaaagcgccagcccctacgtcatcgacctcggcggcacgccgacgccggcgccggacaagaccctcaatccgcaggtccaggcccagccggactccaacgaaagccggatcagccccgagcaggaccatcaggtcaacgccgaccaggccgagaacctcgccgagcaggttgagcgagagcgcctggcgctgctgctgcaggagttgcagaacaaggtcgacgaaaatccgatgctcaaggacttcaaggaccagatccacttcgagatcacccgcgacggcctgcgcatccagatcgtcgacgccgccaaccggccgatgttcgacctcggcagcgcgcgcctgcagccgtatttcgaggacatcctgctggccatggccgagaccatccgccaggtgccgaacaagatcagcatcagcggccacaccgacgccaagccctatgccggcaacggcgacttcggcaactgggagctatcggccaatcgcgccaacgccgcgcgccgtgcgctggtcgccggcggctatccggaagggcagatcgcccaggttgtcggctatgcctcggcacgcctgttcgacgacaaggacccgctgaacccggtgaaccggcggatcgacatcgtggtcctgacccgcaaggcgcagaaggccatcgaaggcgagaccggcgctcccgaagccagcgcccccgcggctgccccgggcgagcagccgaagccggctgccgaggcaccggcggcgggcgcgcaaccttcgctaccggcggacgaggtgcagaagaagctcaacctgttcgacgacggcggcagcctgaagctggagcagatcaagggcgactga

SEQ ID NO: 339723 - DNA, 852 bp, Pseudomonas aeruginosa
atgtcaaaaatcatcggcatcatcgtcgttttcgccagtgtcctcgggggcttcctgctctccggcggcaagatcggcgccatcatccagcccttcgaggtcctgatcatcggcggtgcggcactgggggcgttcctccaggccaacccgggcagcacgttcatggtggtgctgaagaaagcgccgaagatgttcagcaaccgctttacccagacctactacctcgaggtgctgggcatgctctacgagatcctcaacaagagccggcgcgaagggatgatggcgatcgaggcggacatcgaggaccccgcggccagtcccatcttcagcaagtaccccggcgtgctgaaggatgagcggatgaccgcctatgtctgcgactacctgcgcatcatgtcctccggcaacatggcgccgcacgagctggaaggcctgttcgacatggagctgtccagtctcaaggaggacctggagcatccgtcccacgcggtgaccaaggttgccgacgccctgccgggcttcggtatcgtcgccgcggtactcggcatcgtcatcaccatggcgttgcttggcgaaggcagccaggcggagatcggccaccacgtcgccgccgccctggtgggtaccttcctcgggattctcgccgcctacggcttcgtcggcccgctggccgtcgcgctggagcacgatgccaaggaagagttgaacatgttcgaggcgatcaaggcctgcctggtcgcttccgcttccggcatgccgccttcgctggccgtcgagttcggccgcaaggtgctgctgcccgcccatcggccgaccttcgccgagctcgagcaggccgtgcgtggccgctga

SEQ ID NO: 339724 - DNA, 1512 bp, Pseudomonas aeruginosa
atgacagaccgcctcgccgcctggctcgaagagctcgaccggcaacccctgccgatccccgccagccactatgccggcctgcacgccgcgctgagcgacagccgccgctcgctgcgcgagatcgccgaccagttgcagggcagcccgacgctggcgttgtccatcctgcgcgaggccaatcgcgccgagagcgcccgcgacaaccccgcggaaagcctggaggtggccctcagccgcctcggcctggcgcgcgcgagccaacttctgaagaccctgccgagcatccaggatgcggagatgcccagggtcctcgggcagatgctgctgatcagccagcacgccatgcagcaggccagcggcctgttcggcgcgcgcctggccaggctctggcaggaaattcactggggcagcctgctgaccatggctccggtctgggcgctggccaacgcccgcccgcagttgctggagcaatggcagcaacgcgtgctggtacagggcgaaccgaccctgcgagtggagcgcgaactgctcggcatgcgcctgctaccgatctgcctggcgctggccgaacgctggcggctaccgcagtgggtcatccagggctatcgcctgctcgcctgcgaccgtcgcctgctggttcgagccctgcgtatcgcccgcgaccatcagtcgcccctgctccagcaacagcaactcgatgcccagcccgatctcgcccgctggctgacccagccggccaactgcactctcctcgccaatggcctggccatcgccgcgcaccagagctgggacgggccgcacatgctgcgctggcagcgcctgaccggcctgtacctgggccagccgctgaccgaagtccagcagcaggtgcacatgctcgccgcgcaaagcgcgcgcctgcacgcccggccgccgctgtggcatccggcggtggccttgatctggccctggcaggccagccgctggcgtgccgaagcggcgcccccgccgccgccctcggcggaagccctggccgagtggcggcagcattgcgccgagttgctccgcgagcccagcccgttcagcaacgtcgtgcagctcaccgcctgtgcccgcgatgcgctgcgcgcctgcggcctgcaaaggatgctgctgctggtggccgatcgcacccaggtacacgtgctggcgcagcagagcgccggactcgaaccgggccaggagaaattgcaactggagattgccggcagcccgctgctgaagaaactgttccagcagcctgccctgctgcgcatcggcccgaacaaccaggaccagttgctgccggccctcggcgaacccttgcgccaactgttccccgggcctcacctgctgctgcgctcgctgggcaacggctcgcgggtggtgatgctggtcctggccgacctcggcggccagccgttcagcgacctgcatgcccaggccttcgccaagaccgcccagtgcaccgagcgcgcgatccagcagttcggccgccagcgccgcacggaatga

SEQ ID NO: 339725 - DNA, 816 bp, Pseudomonas aeruginosa
atgtccgtcttctccgacctgccattggtgatcgagcccagcgatctcgcgccgcgcctgggcgcgcccgagctgatcctggtcgacctgaccagtgccgcccgctacgccgaagggcatatccccggcgcgcgtttcgtcgaccccaaacgcacccagtggggacaacccccggcacccggcctgctaccggccaaggccgacctggaagccctgttcggcgagctgggccaccgcccggaggcgacctacgtggtctacgacgacgaaggcggcggctgggcgggccgcttcatctggctgctggacgtgatcggccaccaccgctaccactatctcaacggcggcctgccggcctggatcgccgacgcccaggcgctcgaccgcgaggtcccggcgcctgtcggcggcccgctgccgctgacgttgcacgacgagcccagcgcgacccgcgaatacctgcaaagccgcctcggcgccgccgacctggcggtatgggatgcgcgcaaccccagcgaatacgccggtaccaaggtgctcgccgcgaaggccgggcatgtgcccggcgcgatcaatttcgaatggaccgccggcatggacccggctcgcgccctgcgcatccgcgcggatatcgccgaagtcctggaggccctcggcatcacgccggacaaggaagtgatcacccactgccagacccaccatcgctccggcttcacctacctggtggccaaggcgctgggctacccgcgggtcaaaggctacgccggctcctggtcggaatggggcaaccaccccgatacccctgtagaggtttga

SEQ ID NO: 339726 - DNA, 870 bp, Pseudomonas aeruginosa
atgtcgttcaaagatcgtctgttcatctgcagccagtacctgctgccgcaccacctgctgtcccggctgatcggcttcgccgccgactgccgggcgacctggttcaaggaccgcctgatcgcctggttcgcccggcgctaccaggtcgacatgcgcgaagcacaggtcgaggacctgcaggcctatgaacatttcaatgccttcttcacccgcgccctcaaggatggcgcccgcccgctggcccaggagcccggcgcggtgctctgcccggccgatggcgcgatcagccagctcggcccgatcgagcacgggcggatcttccaggccaaaggccacagctacagcctggccgaactgctcggcggcgacgccgaactggccgcgcccttcatgggcggcgacttcgccaccgtctacctgtccccccgggactaccaccgcgtgcacatgccgctggccggcaccctgcgcgagatggtctacgttcccggccggctgttctcggtgaaccagaccaccgcggaaaacgttcccgagctgttcgcccgcaacgaacgggtggtctgcctgttcgacaccgagcgcggtccgatggccgtggtgctggtgggcgcgatgatcgtggcctccatcgaaaccgtctgggccggcctggttacgccgccgaagcgcgaactgaagaccttccgctacgacgaagccgcccgtgcgccgatccgcctggaaaaaggcgccgagctgggtcgcttcaagctgggctccaccgccatcgtcctgttcggcccgcagcaggtcgcgttcaacgacggcctcggggcagcgagcccggtgcgcatgggcgaatgcctggccctgccgaaacaggcctga

SEQ ID NO: 339727 - DNA, 1824 bp, Pseudomonas aeruginosa
atggaaaaccagagcccccacctctcgttgcgcgtccccactccgacgcagcagaacctgagcttctgcgacgccaccccgaaggatatcaagtactggctggcgcacctgcccaaggccaacctcggggaaaccgcgcgccagctctaccagggcctgatcgaactcaaccagttggtgctgcccgtcgaggcccgcctgcaactgctcgaactgttccgtccagaggtgcatttcgtctgcgcccacctggaacggcacttcctcaaccaggccatcgtcctcgacgaacggccgcgcaagatcgccaacctctgccaggccctgcagaaccacctggccatcggctacaagctgatcgtggtccaggaagcgccgcgcaacagccgcgaccgcgcgcagttgctcgcggtcggtatccagcgggcgatccgcagcctgtgcggcccgctgatccgtgccagccagttgtactgcccggtccccgaggggctttggctggaactccaccagctgtaccagttggccagccagcgcggtgtgcatcgtctcgcggtgcgcgacgaactggccaagcacacccccggcctgagcgtcgagcaggcctacctgataccgctgctgctcggctgcgcgcgctgcaaccagatgcgccagaacaacattgcacggctcgccgaggtgctcgaaccctggagccaattgctgtcgatacagagcgcggcgctgcccggctcgctgttcatcgccgtgccgcagatcgacggcccgccgcgctaccgctcgctgtacccggagacccaactggccaatgccctgggcatcgacacccagccgctggtcgaactgatccgcgaatacctgctacagcccgaggccgagcgcgcgaaggcgcgcctgccgctgatcgaaggggtgaccctggacctgctgcaacatctctcctcggcctggggtgacatcgccgaacgtaccttccagcgcacccagggccagggccagttgaccctgtgcatcggcatgagcgccctgcactacttcctcgccgggcgccgcccgttcaacgaggtcctgcagatccaggaagcgcccgaggcgcctcgcttcaaggccgacgtccaggacgcctgggccggcgccttcgatgcgcagaaggtcaccgactggcagcccggcatgccgctggaggaaatcgagtaccggccgcaccagtcgccccgcggtgggcagcccgatcacccgcaggcccacgcacagactgacgccaccgaggactatccgacctacgccctgcccatcgtcaaccacagccccggcggttattgcctgagctggccaaaggaggtgcccgcccaactgcaggcgggcgaactggtcggcctgcaggaccttcccggccaggcgtggagcatcgcggtggtgcgctggatccgccaggtgcgcaatggcggcacgcagatgggcatcgagatgatcgccccggcggcgcagccctgcggcctgcaactgctgcgcaagaccgagcagagcagccactacctgcgcgccctgctgctgccggaaatcgccgcgatctcgcggccggcgacggtgatcaccccgcgcctgccgttccaggagggcagccgggtgcagatcaacctgcacggcgaggagcggcgcgcggtgctgaatcgccggcaggcctcgaccggcagcttcagccagttcgaataccgctcggcggaaccggtgaacaccccgagcgataagccggtcacagcgccagtggcccggccgcctgcgggggaggaagattttgactcgctctggaagtctctgtag

SEQ ID NO: 339728 - DNA, 2076 bp, Pseudomonas aeruginosa
atggccatcgaaaagaaaaccatccgcctgctgattctggaagactcgcagaacgaagccgaacgcctggtcagtctgttccgcaatgccggccacgcgacccgcgtacatcgactgacctctcccgaggacctcgccgagaccctccagcaaagctgggacctgctgatcgccgcgccgaccagcgagtgtctcgagcccggcgaggcgctcgccaccttgcgccgccagtcgcgcgacatcccgttcatccagctggtggccgacaacagctccgacgccatcaccgacgccttgatgctcggcgcccaggacgccctgccgcaaggcgaggacgagcgcctggtgctggtcgccaaccgcgagctggccggcctcgccgaacgccgcgcgcgccgcgccgccgaactggccctgcgcgaggcggaaaaacgctgccagttgctgctcgacagctcggtcgacgccatcacctacgtccacgacggcatgcacatctacgccaaccgctcctacatggcgctgttcggctacgaggacgccgaggaactggaaggcctgccggtcatcgacctgatcgcctcctgcgaccagggcgccttcaaggatttcctcaagggctaccagaacgaccagcgccagaccgaactggtttgcaccggggtcaagctcgacggccaggaattcaaggcgcgcatcagcctctccgccgccacctacgacggcgaaccctgcatccaggtggtgatccgcggcgaggtcgacaacgccgaactggaagaaaagctccgcgaagtcagcagccaggacccggtcaccggactctacaaccgcagccacttcctcgacctgatggatgccgccgtgcagcaggcggtgaccgcccgcaagccgtcgaccctggcctatatccatctcaacggctacccctcgctccaggccgaccacgggctttccgggatcgacctgctgctcggccagttggccggactgatgcgcgaacagttcggcgaggaagccgacctggcgcgtttcggcgattcgatcttcgccgccctgttcaagggcaagactcccgagcaggcgcaagcggcactgcaacgactgctgaagaaagtcgagaaccaccttttcgagctgaacggccgcagcgcccaggccaccctcagcatcggcgtcgccggtctcgacgagaagaccgccaaggcccaggacgtgatgaaccgtgcgcatcgctgcgccgatgacgcggcacgcaagggcgggtcgcagatcaagcagtacaacccggcggaagagcttgccgccgccgcccagcgcggcgacgtcatcgcgatcctccagcaggcgctggagaccaacagcttccgcctgctgttccagccagtcatcagcctgcgcggcgacagccacgagaactacgaggtgctcctgcgcctgctcaatccgcagggccaggaagtgccgccggcggagttcctgcatgccgccaaggaagccgggctggcggagaagatcgaccgctgggtgatcctcaactcgatcaagctgctcgccgagcatcgcgccaaggggcaccagaccaagctgttcgtccacctgtccagcgccagtctgcaagaccccggcctgctgccctggctcggggtggcgctgaaggccgcgcgcctgccgccggagtcgctggtgttccagatcagcgaagccgacgccaccagctatctgaagcaggccaagcaactgacccagggcctggccaccctgcattgccaggcggcgatcagccagttcggctgctcgctgaacccgttcaacgcgctgaagcacctgaccgtacaattcatcaagatcgatggttccttcgtccaggacctcaaccaggtggaaaaccaggagatcctcaagggcctgatcgccgaactgcacgaacagcagaagctcagcatcgtccccttcgtcgagagcgccagcgtcctcgccaccctgtggcaagccggcgccacctacatccagggctactacctgcaggggccgagccaggcgatggactacgacttctcctcgggagacgaatga

SEQ ID NO: 339729 - DNA, 1215 bp, Pseudomonas aeruginosa
ttgcgcgaaattgtcctgatcaacatcaccggggaagaccgccccggtctcaccgcggccatcaccggcgtactggcccagggcggggtgaacatcctcgacatcggccaggcggtgatccacgacaccctgtcgttcggcatcctggtggaaatcccggataccgaggccggttcctcggtcctcaaggacgtgctgttcaccgcctacaagctggaccagcaggtgcgcttcaccccggtctcggaagaggactaccggcaatgggtcgacggccagggcaaggcgcggcacatcgtgaccctgctcacccgccgggtgactgccgagcaactgcagagggtcagctcgatcaccgccaagtacgcgctgaacatcgaccacatcgaccgtctctccgggcgcatgccgctggacatgcccgccgaccagggcaagggctgcatcgagttctcggtacgcggcgaaccggccgatccggcggcgctgcgtgcggaattcctcagcgtcgcccaggaattgaacgtcgacatcgctttccagcaggacagcgtgttccgccgcaatcgccggctggcggtgttcgacatggattcgacgctgatcgaggcggaagtcatcgacgaactggccaaggccgccggcgtcggcgagaaggtcgccgcgatcaccgaacgggcgatgcgcggtgaactggacttccgcgccagcttcaaggagcgcctggcgctgctgcagggactgtcggaagacgtactggaggagatcggcgcctcgctgcgtctgaccgagggtgcggaaaccctgttcgccgaactcaagcgcctgggttacaagaccgccatcctgtccggcggcttcacctatttcgcccgtcaattgcaggcgaagctggggatcgactacgtgttcgccaacgagttgcagatcgtcgacggcaaggtcaccggggtggcggtcgagccgatcgtcgatgcccagcgcaaggccgacctgctgcgcgaactggcggcgaaggaaggcctgagcctggagcagaccattgccgtcggcgacggcgccaacgacctgccgatgctcggcctggccggcctgggcgtggcgttccgcgccaagccgctggtcaagcagtcggccaagcaggcgatctcgaccctgggcctggacggcatcctctacctgctcggctaccgcgaccgcgaagggcgagcctga

SEQ ID NO: 339730 - DNA, 1539 bp, Pseudomonas aeruginosa
gtgacccggcccacgtccgtcaagcccgacaatttcttcctcctgctgtttcgtgccttgcgccagcgccgcgtcccgatcgctctgcggctcgccagccatagcctgatcctggtggccctggccctgctgatctacgcctgggtcatgggcatgcagtttcgccaggccatgcagcagcaggccgatgccctgggccagagcctgatcacccagaccgccgcgtccgccaccgagttgctggtgtccaacgacatccttagcctcaacgtgctgctgaacaacctggtgaagaacccgctggtggcccatgcggcgatctacagcgtcgaccagcgcatcctcgccgaggccggcagccgtccgaagcagagcctgctcggcgccaccgaaggcctgtactcgacgccgatcaccttccaggaagtgatcgccgggcacctgcgcatcagcctggacatgcagcagttccagcagccgatgatgatcagcctgcagagcatgggcctgatcagcctgatcctgctaatcctcgccctgtatttcagcctgcgcctggggcggcagatttccacacccttgttgcaattgcgtgtctggttgcgcgatccggacaatccggcccccggcgccgaactgcagaacgagctgggcgacctggcgcgcgacctggaagagcgcctggtgccggagaagccgccggcgccggagccggaagaagcaccgctgccgcagaacttcgacgacatcctgctggaggacgacgaagccgacctgcgcagccgcaaggtcgaggcctcggccttcgaggaagacgacattccgctgggcgacgccctgctggacgagaccaagccggtggaattcacctccatcgacgaagacccgctggaccaggacgccttcgacgagaacggagccgaagccggggaccagcccgcggcgcccgccgctgcgcgcgaaccgcaacacagtgcggtgctggcgatccagctcggcgcccaggaacagttgcgccggttgccacgcagccgtctggtggacctcctgcaacgctatcgcgactgcctggaacaggccgcccgccagtacaagggcagcctgcacacgctcagcgacggcggcagcctgattctcttccacagccgcgacaaccgcgccgactacctgaccaacgcgctctgctgcggtgaactgatgcgcgcgctcggccatgccctgcagatcgaggttgccgacagcggcatcaccttgcagttgcaactgggcctgagcctcggcgaagacctcagcgaacagacccaggccgacctgctgctcaacgaaaccgtgcagaacgccctcgccctcaaccagcacagccgcaacctgctgctggtcgaacgcagcatcgccgacgacgcggtggtccgcgagcgcgcccgtatccgcgccattgccagtccggaaggagcctgctgcgtcgagcgtctgctggagccgtatccgtcgatgctcgagcgccaactggcgcgcatgcacgaccgcgcccgcccgtga

SEQ ID NO: 339731 - DNA, 537 bp, Pseudomonas aeruginosa
gtgaccaccctgatcacccacccgctgccggtcctggcggtgggattggcccttggcagccgggtgatcccgccacgcctgctgctggcaggcatgctcgccgcctgcctgccggacttcgacgtgatcgccttcaagctcggcatcgcctatcacgatgccttcggccatcgcggcttcagccattcgctattgttcgccgcgatcctcggtgcgctcgccgccctcgcctgccggccgctgcatagcggaccgctgaaagccgggctgtgggtggcgctggccaccgcctcgcacagcctgctggacgcgatgaccaacggcgggctgggcgtcgcctggttctggccctggagcgacgcccgctacttcatgcccttccatccgatcgccgtgtcgccgatcggtctgtcgcgcttcctcagcgaacgcggattgctggtgctgcagtcggaggcgcgctgggtctggctaccctgcctgctgctggcgctcgccggcatggccctgcgcttcctgttgcgccgctcacgctga

SEQ ID NO: 339732 - DNA, 711 bp, Pseudomonas aeruginosa
atgagcgcgtggcgcgtcttcgcatgtctttccctcgtcagcctgctcgggctgacgggttgtgcggtccatccgccggcccagctctaccagttggacgtcggtgccgccgcagtaccgaaaaaggatggcggtgcggccgtcctgctcggcccggtacaactggccgactatctcaagcgcgatgtgatggtgcagcggcaggccgacggtattctcagcctgtccaccgacgcacgctgggccggcaacctggagaccaatgtcagccagcaactgctgcggcagatgtccagcgagctgggcagcagccgcctggcgctgttcccggaaaaacctggtttcaccccccaggtccaggtgatgctgaccatcagtcgcctcgactccggccccaagcagccggcggtgatcgaggcgcgctggcgcctgctggaccagaagggcgacctgaaggatagccgggtgttccacgaggaagaacggcaccagggcagcatcggcgaccagatccgtgcccagagcgacctgctcaagcgcctggcggcgcagttggccaaggacgtcaagccgatcgccgtggcggccgaggcgccgccgccggcgaccgcgcgcaagccggtggccaagccgaaggccaaggaagaggaaggtccgaaaatgccgctggtggtgccgattcgcaccgatgccgaggtctatcggttctga

SEQ ID NO: 339733 - DNA, 2265 bp, Pseudomonas aeruginosa
atgagcgaatccctcgatctgagcctggaaggggtcgaacgccggtcgttggccgagttcaccgagcaggcctatctgaattattccatgtacgtgatcatggaccgcgccctgccgcatatcggcgacggcctgaaaccggtgcagcgacgcatcgtctacgccatgagcgaactggggctggatgccgattccaagcacaagaagtcggcgcgcaccgtcggcgacgtgctcggcaagttccacccgcacggcgacttggcctgctacgaggccatggtgctgatggcgcagccgttctcctatcgctatccgctggtggacggccagggcaactggggggcgccggacgatcccaagtccttcgccgccatgcgttataccgaggcgcgcctgtcgcgctattccgaggtgctgctcagcgaactgggccagggtaccgtggactgggtaccgaacttcgacggcaccctcgacgagccggccgtgctgccggcccgcctgcccaacctgctgctcaacggcaccaccggcatcgcggtgggcatggccaccgacgtgccgccgcacaacctgcgggaagtcgcgtcggcctgcgtgcgcctgctcgaccagccgggcgcgacggtcgccgaattgtgcgaacacgtgccgggcccggacttccccaccgaagccgagatcatcaccccgcgcgccgacctgcagaaggtctacgagaccggccgcggttcggtgcgcatgcgcgcggtgtaccgcgtcgaggacggcgacatcgtcatccacgccctgccgcaccaggtgtccggttccaaggtgctggaacagatcgccgggcagatgcaggccaagaagctgccgatggtggccgacctgcgcgacgagtcggaccacgagaacccgacccgcatcgtcatcatcccgcgttcgaaccgggtcgatgtcgaagagctgatgacccatctgttcgccaccaccgacctggaaaccagctaccgggtcaacctgaacatcatcggcctcgacggcaagccgcaggtcaaggacctgcgccagttgctctcggagtggctgcagttccgcatcggcactgtgcgtcgacgcctgcagttccgcctggacaaggtcgagcgccgcctgcatctgctggatggcttgctgatcgccttcctcaacctcgacgaggtgatccacatcatccgcaccgaggatcagcccaaggcggtgctgatggagcgcttcgaactcagcgaggtgcaggccgactacatcctcgacacccgcctgcgccagttggcacgcctggaagagatgaagatccgcggcgagcaggaagagttgctgaaggagcagaagcgcctgcagaccctgctcggcagcgaggccaagctgaagaagctggtgcgcgaggagctgatcaaggacgccgagacctacggcgacgaccgccgttcgccgatcgtcgcccgcgccgaggcccgcgcgctgtcggaaaccgagctgatgcccaccgaaccggtgaccgtggtgctctcggaaaaaggctgggtgcgttgcgccaagggccacgacatcgacgccgccggcctctcctacaaggccggcgacggcttcaaggccgccgcgccgggacgctcgaaccagtatgcggtgttcatcgactccaccgggcgcagctactcgctgccggcccacagcctgccgtccgcgcgaggccagggcgagccactcagcggccggctgacgcctccgccgggggccagcttcgaatgcgtgctgctgccggacgacgatgcgctgttcgtgatcgcttccgacgccggctatggtttcgtggtcaagggcgaggacctgcaagccaagaacaaggccggcaaggccctgctcagcctgcccaacggctccgccgtggtggcgccgcgcccggtgcgcgatgtggagcaggattggctggcggccgtgacgaccgagggccgtctgctattgttcaaggtctccgacctgccgcagctcggcaagggcaagggcaacaagatcatcggcatccccggcgaacgcgtggccagccgcgaggagtacctcaccgacctggctgttctgccagccggggcgacgttggtcctgcaggctggaaagcgtaccctgtcgctcaagggcgacgacctggaacactacaagggggagcggggccggcgaggcaacaagctgccgcgcggtttccagcgcgtcgacagcctgctggtggatattccgacacaggattga

SEQ ID NO: 339734 - DNA, 486 bp, Pseudomonas aeruginosa
atgttggtgctggcctgggtcgccgggctggcgctggcgacgcgctatttcggcgtctgggaagatcgacagcgcaacccgaaccaggcgccgcaatcgatccatggcgacggctacgtcgagttgcgcctggccagcagccgccagggccattacctgctgaacgggcagatcaacggccagggcgtgaccttcctgctcgataccggggcgacccaggtggcggtgccggaagccctggcggcaagactcgcgctggagcgcggcgcgccgatcaccctgagcacggccaacggccgcgccacgggctggcgcacgcggctggaccagctgcaactcggcgatatccgcctgtccggggtcgcggcgctgattgcgccgggcatggacggcgatgaggtgctactcggcatgagcgccctgaaacaactcgaattcacccagcgcgacggcaccctggtgctgcgccaaaacacttctccgtga

SEQ ID NO: 339735 - DNA, 1014 bp, Pseudomonas aeruginosa
atgcgccgcctgctggccatcctcggcctgttcgggggcctggtccaggcggccgaggcgccgccagagccaccggttccggcagccttgagcttcatctccgaacatgcggtggagggcatgcgcggcggcaacctttccgggctggcctggtgtggcggcgcgctgtggacggtttccgaccgcgacgacgaccgcctgtatcgcctgcaaccctcggccgaaggctccgaccagccctggcaggccgaggccgagagtttcatcgctccgaccccgccggacagcgggttgccctggggcatgagcacgcgggtctggctcagtggcctggtgcgcggcggcaacctcgacttcgaaggcatcgcctgcgatgccgccggcaatcgctacctggtcagcgaggcgcacgcggcggtcctgcaactgccggtgagcggcgcgccgaactggctgcgcctgccgcccggcctgctgccgcaagcgcgggccagcggcatgctgatgaatttcaacgcgttgttcgaagggatcgccgtcgaccccgagggcaagcgcctctggctggctgccgagcgcgagcgccgcggcctgctggtggcccaccgcgacaacagtgcctggcgctgcgagggcagctgcgtactgctcgccgagggcggcaagatcgagccgccgccggaactgggcagcgcgcgcaagctgccgaaggatttctccgacctcgccttctaccgcggcaagctgttcaccctggagcgcctggcgcatcagatctgccgccgcgacctggcccaggccaaggtcgaacgctgctggtcgttcgcctcggcggtcctggcgccggagcgtcgctacgagctgccttatggcgtcgcggaagccctgtcgctggacgacaagggcgcctggctgggcatcgacaatggcgaccatgcgcgcgccgatggcgacgtgcggcccttcgtcctgcgcttcgccgcgcccgccggcggctggttgggggacaagtga

SEQ ID NO: 339736 - DNA, 1890 bp, Pseudomonas aeruginosa
atggctacttacaacgcagacgccatcgaagtcctttccggcctcgacccggtgcgcaagcgcccggggatgtacaccgacaccacccgccccaaccacctggcccaggaagtcatcgacaacagcgtcgacgaagccctggccggccacgcgaagagcgtgcaggtgatcctgcaccaggacaactcgctggaagtcatcgacgacggccgcggcatgccggtggacatccacccggaagagggcgtgccgggcgtcgagctgatccttaccaagctgcatgccggcggcaagttctcgaacaagaactaccagttctccggcggcttgcacggggtcggcatctcggtggtgaacgcgctctcgacccgggtcgaggtacgcgtcaagcgcgacgccaacgagtaccggatgaccttcgccgacggcttcaaggacagcgacctggaagtcatcggcacggtcggcaagcgcaataccggtaccagcgtgcatttctggccggatccgaagtatttcgattcggcgaagttctcggtcagccgcctcaagcatgtgctcaaggccaaggcggtgctgtgcccgggcctgagcgtggtgttcgaggacaagaacaccggcgagcgcgtcgagtggcacttcgaggacggcctgcgctcctacctgaccgacgcggtcgccgagctgccgcgcctgcccgacgaacccttctgcggcaacctcgaaggttccaaggaagcggtgagctgggccctgctgtggctgcccgagggcggtgagtcggtgcaggaaagctacgtcaacctgattcccacggcccagggcggcacccatgtgaacggcctgcgccagggcctgctcgacgccatgcgcgagttctgcgagttccgcaacctgttgccgcgcggcgtcaagctggcgcccgaggacgtctgggagcggatcgccttcgtcctctcgatgaagatgcaggagccgcagttctccgggcagaccaaggagcgcctgtcgtcccgcgaggcggcggcgttcgtctcgggcgtggtgaaggacgccttcagcctgtggctcaacgagcacgccgagatcggcctgcagttggcggaactggcgatcagcaatgccgggcgtcgcctcaaggcgggcaagaaggtcgagcgcaagaagatcacccaggggccggcgctgcccggcaaactggccgactgcgccggacaggaaccgatgcgcgcggaactgttcctggtcgagggcgactccgccggcggctcggcgaagcaggcgcgggacaaggaattccaggcgatcatgccgctgcgcggaaagatcctgaacacctgggaagtggacggcggcgaggtgctcgccagccaggaggtccacgacatcgcggtagccatcggcgtcgatccgggcgccagcgacctggctcagctgcgctacggcaagatctgtatcctcgcggatgccgactccgacggtctgcacatcgccacgctgctctgcgcgctgttcgtccgtcatttccgcccgctggtggaggccggccacgtctacgtggcgatgccgccgctgtaccgcatcgacctcggcaaggaaatctactacgccctcgacgaagccgagcgcgacggcatcctcgagcgcctggccgccgagaagaagcgcggcaagccgcaggtcacccgcttcaagggccttggcgaaatgaatccgctgcaactgcgcgagaccaccatggatccgaatacccggcggctggtccagctcaccctggaggacgccaccggtaccctggagatcatggacatgctgctggccaagaagcgcgccggtgaccgcaagtcctggctggagagcaagggcaacctggccgaggtgctggtctga

SEQ ID NO: 339737 - DNA, 687 bp, Pseudomonas aeruginosa
atgaagcctggaagctggtaccgttcggctttccctaccgagttgaagcccattagcccgttcccgatgaccgcgaccagcccatccctgctgtatatccacggcttcaacagttcgcccgaatcgcacaaggcgcgtcagttgcaggcggccttcggccacttgggcctggccgaaggcctgcgcgtcccggccctgcaccatcacccacggcaggctatcgcccagttggagcgggccatcgccgagctcgggcgaccggtgctggtcggcagctccctgggtggctactatgcgacccatttggcggagcgccatggcctggcggcgatcctggtcaatccggcggtcgccccgcatcgctccttcgacggctacctgggcgcgcagaccaaccactacagcggcgagacctgggaactcaccgaggaccacgtggcggcgctggccgaactggaagtcacgcgcctgcaacgtcccgagcgctaccaggtatggctgcagaccgccgacgaaaccctcgactatcgcgccgcgcagtccttctaccgagcctgcgcgctacgcatccaggccggcggcgaccacggcttccagggcttcgcccggcacctgccggcgctgctggcgttcgccggctacccgtcggcgctgtggcgcgacaccgatttttcgacttttgactga

SEQ ID NO: 339738 - DNA, 819 bp, Pseudomonas aeruginosa
ttgtcacgccattcgaacactcccgccaccgacgcctccgtactgctggtgcagctttcggacagccacctgttcgccgaggacggcgcgcgcctgctcggcatggacaccgcccatagcctggaaaaggtggtcgagcgggtcgcccgggagcaaccgcggatcgacctgatcctcgccaccggcgacgtctctcaggacggcagcctggattcctacacacgcttccgcaggttgagcgcgccgctggccgcgccgttgcgctggttcgccggtaaccacgacgaacgcgagccgatgcagcgggcgaccgaaggcagcgacctgctggagcaggtcgtcgacgtcggcaactggcgcgtggtgttgctcgactcgagcattcccggcgcggtgccgggctatctcgaggacgaccagctcgacctgctgcggcgcgccatcgacagcgccggcgaacgcttcctgctggtttccttccatcatcacccggtgccgatcggcagcgactggatggaccccatcggcctgcgcaacccgcaggcgctgttcgacctgctggcgccctatccgcaggtgcgctgcctgctgtgggggcacattcaccaggagttcgaccgccagcgcggcccgctgcgcctgctggcctcgccgtccacctgcgtgcagttcgcccccggcagcagcgacttcaccctcgaccgcctggcgccgggctaccgctggttgcgcctgcacgacgacgggcgcctggaaacggggatctcgcgggtcgacgacgtcgtcttcgaagtggactacgacaccgccggatactga

SEQ ID NO: 339739 - DNA, 459 bp, Pseudomonas aeruginosa
atgggcctgaacctgctgcgcgagcgctaccgggtcgacctggccagcctgcaggcgacctgtgaagcgaactacgcgcggctcatgcgcctgctcccggacatgcgcgaggcacaggcctcgcgccgggtcgcgctgagcgaaggggagcggctgctcggcgtcctggcgctggaagtgaccgaggcctgcccgtacaccaccaccctgcaggtgcgccaggaactgggcctgccctggttgccggcgccgcggctggaagtgcgggtctaccacgatgcacggatggccgaggtgatcggcgccgaacaggcgcggcggctgatggcgatctatccctacccgaaccaggcgatgcaccagcccgacgagaagaaccagctcaacctgttcctcggcgagtggctcgcccactgtctggcctgcggccacgagatggtgccggtggcccagcgctga

SEQ ID NO: 339740 - DNA, 618 bp, Pseudomonas aeruginosa
atgtccgaaaccttcaaacccgcccccggtgacgtcgagctcgtgcagcgcgaggaatgcttccgcggcttctatcgtctcgatcgcctgcgcctgcggcatcgccagttcgacggcagcatgggccgggaaatcagtcgggaactgttcgtccgccatgacgcggtctgcgtgctgccctacgacccgcagcgcgattgcgtggtgctcatcgagcaattccgcgtcggggcgatgcagaagctcgccaacccctggctgctggagctggtcgccggcctgatcgacaaggacgagcaaccggaggaagtggcccatcgcgaggcgatggaggaggccgggctgaccctcggtgcgctctggccgataacccagtacctgccgtcgccgggcggcaccgacgaggtggtgcacctgttcgtcggccgttgcgacagcgaaggcgtcggcggcgtgcatggcttgccggaggagggcgaggacatccgcgtccatgtctggccgttggaagatgcgctgcaggccgtgcgcgacgggcggatcaacaacgcggcgagcatcatcgccctgcagtggctggccctgaaccgggccgaggtgcgtgggctatgggcctga

SEQ ID NO: 339741 - DNA, 747 bp, Pseudomonas aeruginosa
atgcgccttctgaaattcgccgccctcggcagcctggtcgttctgctgagcgcctgccagagcttcttcaagcccggcctcgacgacccgctgcccaccgagcgcctcgccagcgagcacctgaagcccggctgccagggcgaacagtgccccttggtaaacatcgacaccctgaagttccccgacgaaccgcagctggacccgatcgtcgagcgcgccctgctggaaatgacccgggaaaacaacgaaacgcccctgccggcatcgctggcggcctacgaacggcagttcctggacagcgccgaaccgggctggagcagctacctgcaagccaaggtgcgcgaacaacatgacggtctggtgatcatcgagctttccagctacctgttcaccggcggcgcccacggcatgcccggtcgcggcttcatcaactacgaccgcaggcagcacaaggtgctgagcctgcaggacatgctggttcccggccaggaagaagccttctggaaacaggccgagctggcgcacaaggcctggctgctggccaacaagctcgaccaggacgccgatttccagaagacctggccgttccagcgcaccccgcacgtggcattgaccttcggcgcggtaacgctgaagtacgacgcctactccatcgcgccgtattcctatgcccaccccgaactgaagatcccgtatccgcgcctgaacggcatcgtcaagccgaacctgttccccggccgcggctga

SEQ ID NO: 339742 - DNA, 1884 bp, Pseudomonas aeruginosa
atgagcgcaacgcagaagaacaacatcacccgccttgagcagctcgaccgccagtcgacgcagcctttcccgaactcgcgcaaggtctacctgaccggctcgcgcccggacatccgcgtcccggtgcgggaaatctccctcgccgacacccccaccgccttcggcggcgaaaagaacccgccggtgttcgtctacgacacctccggcccgtataccgaccccgaggtccgcatcgatctgcgcaagggcctgcctgacgtgcgttcgcgttggatcgacgagcgcggcgacaccgagatcctccccggcctgacctccgagttcggccaggcccgcctggccgacgccagcctcgacgccctgcgcttcgcccacgtgcgcacgccgcgccgggccaagccgggcgccaacgtctcgcagatgcactacgcgaagaagggcatcatcaccccggagatggaatacatcgccatccgcgagaacatgaagctgcaggaagcccgggccgccggcctgctcgaccagcagcacccggggcacagcttcggtgccaacaccccgaaggaaatcacccccgagttcgtccgcgaggaagtcgcccgcggccgcgcgatcattccggcgaacatcaaccacaccgagcttgagccgatgatcatcggccgcaatttcctggtgaagatcaacggcaacatcggcaacagcgcgctgggctcgtcgatcgaggaagaagtggagaagctcacctggggtatccgctggggcgccgacacggtgatggacctgtccaccggcaagcacatccatgaaacccgcgagtggatcctgcgcaacagcccggtaccgatcggcaccgtaccgatctaccaggcgctggagaaggtcaacggcgtcgccgaggacctgacctgggaaatcttccgcgacaccctgatcgaacaggccgagcagggcgtcgactacttcaccatccacgccggcgtgctgctgcgctatgtgccgctgaccgccaagcgggtcaccggtatcgtttcccgcggcggctcgatcatggccaagtggtgcctggcgcaccaccaggagaacttcctctacacgcatttcgaagagatctgcgaaatcatgaaggcctacgacgtcagcttctcgctgggcgatggcctgcgtccgggctcggtggccgacgccaacgacgccgcccagttcggcgagctggaaaccctcggcgagctgaccaagatcgcctggaagcacgacgtgcaggtgatgatcgaaggccccggccacgtgccgatgcaattgatcaaggaaaacatggacaagcagctggagtgctgcgacgaggcgccgttctataccctcggcccgctgaccaccgacatcgcccccggctacgaccacatcacctccggcatcggcgcggcgatgatcggctggttcggctgcgccatgctctgctacgtcacgcccaaggagcacctgggtctgccgaacaaggatgacgtgaagaccgggatcatcacctacaagatcgccgcccatgccgccgacctcgccaagggccacccgggcgcgcagatccgcgacaacgcgctgtccaaggcgcgcttcgagttccgttgggaggaccagttcaaccttggcctggacccggacaccgcgcgggcgttccatgacgagaccctgccgaaggactcggccaaggtcgcgcacttctgctccatgtgcggaccgaagttctgctcgatgaagatcacccaggaagtccgcgactacgccaaggagaacggcctgtccgacgagagcaaggccatcgaggccggcttccaggagcaggcggcgcgcttcaaggacgaaggatcggtgatctacaggcaggtgtag

SEQ ID NO: 339743 - DNA, 1449 bp, Pseudomonas aeruginosa
atgctgcgcagactctccctggcggccgccgtggccgctgctaccggtgtcgcctgggccgcccagccgaccccgctgccgaccaagaccgacctgatcagcgtctacaaggaagccgtcgacaacaacgccgacctcgccgccgcccaggccgactacctggcgcgcaaggaagtggtgccccaggcccgcgccggcctgctgccgcaactcggcgccggcgcccgcgtcggagacacccggatcgccttcgacgagcgtccggcgaccgtcaagcgcaacagccaggtcgtccaggccaccctcagccagccattgttccgcgccgaccgctggttccagtggcaggccgccaaggaaaccagcgaccaggcccggctggaattctccgcgacccagcaggacctgatcctgcgcagcgccgagacctacttcacggtgctccgcgcccaggacaacctggccaccagcaaggccgaggaagccgccttcaagcgccagctggaccaggcaaacgagcgcttcgacgtgggcctttccgacaagaccgacgtgctcgaggcccaggccagctacgacaccgcccgcgccaaccggctgatcgccgaacaacgcgtggacgatgccttccaggccctggtgaccctgaccaaccgcgactacagcgccatcgagggcatgcgccacaccctgccggtggtgccgccggcgccgaacgacgccaaggcctgggtcgacaccgcggtgcagcagaacctgcgcctgctggccagcaactacgcggtcaacgccgccgaggaaaccctccgccagcgcaaggccgggcacctgccgaccctcgatgccgtggcccagtaccagaagggcgacaacgacgccctcggcttcgccaacagcgccgccaatccgctggtgcactatggcaagtatgtcgacgagcgcagcattggcctggaactgaacatcccgatctacagcggcggcctgacctcctcccaggtccgcgagtcctaccagcgcctcaaccagagcgagcagtcccgcgaaggccaacgccgccaggtggtgcaggacacccgcaacctgcaccgcgcggtgaataccgacgtcgagcaggtccaggcgcggcgccaggcgatcatctccaaccagagttcgctggaagccaccgagatcggctaccaggtcggcacccgcaacatcgtcgacgtgctcaacgcccagcgccagctgtacgccgccgtgcgcgactacaacaacagccgctacgactacatcctcgataccctgcgcctgaagcaggcggccggcaccctcagcccggccgacctggaggcgctcagcgcctacctgaagcaggactacgatccggacaaggacttcctcccgccggacctggccaaggccgccgccgagcagttacagagcaagccgcgccagcagtactag

SEQ ID NO: 339744 - DNA, 705 bp, Pseudomonas aeruginosa
atgaacgtactgatcgtccacgcccacaacgaaccgcaatccttcacccgcgcgctctgtgaccaggcatgcgagaccctggcaggccagggccacgcggtgcaggtctcggatctctacgcgatgaactggagtccggtggccagtgccgccgacttcgccgagcgcgccgatcccgactatctggtctacgccctggagcagcgcgagagcgtcaagcgccagagcctggccgccgacatccaggccgagctggacaagctgctgtgggccgacctgctgatcctcaactttccgatctactggttctcggtgccggcgatcctcaaggggtggttcgaccgggtactggtgtccggggtctgctatggcggcaagcgcttctacgaccagggtggcctggccggcaagaaggcgctggtcagcctgaccctgggcgggcgccagcacatgttcggcgagggtgccatccacggaccgctggaggacatgctgcggccgatcctgcgcggcaccctggcctatgttggcatgcaagtgctggagcccttcgtcgcctggcacgtgccatacatcagcgaggaagcgcgcggcaacttcctgcgcgcctaccaggcgcggctggaaaatctcgagcaggatgaacccctgcggttcccgcggctggagcagttcgacgcgctgctccagccgctggcgcgctga

SEQ ID NO: 339745 - DNA, 1182 bp, Pseudomonas aeruginosa
atgcgctattccgatttcacccaacgtatcgccggcgacggcgccgctgcctgggacatccactatcgcgcgctggcacgggtcgagcagggcgaggaaatcctcctgctgtcggtcggcgaccccgacttcgacaccccggcgcccatcgtccaggcggccatcgacagcctgctggccggcaacacccactacgccgacgtgcgcggcaagcgcgccctgcgccagcgcatcgccgaacgccaccggcggcgcagcggccaggcggtggacgcggagcaggtggtggtgctggccggcgcccagtgcgcgctgtacgcggtggtgcagtgcctgctgaatccgggcgacgaggtgatagtcgccgagccgatgtacgtcacctacgaagcggtgttcggcgcctgtggcgcgcgggtggtgccggtgccggtgcgctccgagaatggcttccgcgtgcaggccgaggaggtcgccgcactgatcaccccgcgcactcgcgcgatggcgctgaacagcccgcacaacccgtccggcgccagcctgccgcgggccacctgggaagccctggccgagctgtgcacggcccatgacctgtggatgatctccgacgaggtctacagcgaactgctgttcgacggcgagcacgtcagcccggccagcctgccggggatggccgaacgtaccgcgaccctcaacagcctgtcgaaatcccacgccatgaccggctggcgggtcggctgggtggtcggtcccgcagcactctgcgcgcacctggagaacctcgccctgtgcatgctctatggctcaccggaattcatccaggatgccgcctgcaccgcgctggaagcgccactgccggagttggaggcgatgcgcgaggcctaccgctgccgccgcgacctggtaatcgagtgcctggccgacagccccggcctgcgtccactgcgcccggacggcggcatgttcgtgatggtcgacatccgccccaccggactttccgcccaggccttcgccgaccgcctgctggaccgccatggcgtatcggtgctcgccggcgaagccttcggcccgagcgccgccggtcacatccgcctcggcctggtgttgggcgccgaaccgctgcgcgaagcctgtcggcgcatcgcgctgtgcgccgccgagttgctcggccaggcctga

SEQ ID NO: 339746 - DNA, 1611 bp, Pseudomonas aeruginosa
atgcaaccacagaagaccctcaccgccggccaggccctggtccgcttgctggccaactacggcgtggataccgttttcggtatccccggcgtgcacaccctcgagctgtaccgcggacttccgggcagcggcatccgccacgtgctgacccgccacgagcagggcgccggcttcatggccgacggttatgcgcgggtcagcggcaagccgggagtgtgcttcgtcatcaccgggccgggcgtgaccaacgtcgccaccgccatcggccaggcctacgccgactcggtaccgctgctggtgatttccagcgtcaaccacagcgccagcctgggcaagggctggggctgcctgcacgagacccaggaccagcgtgccatgaccgcgccgatcactgccttctccgccttggccttgagcccggaacagctgcccgaactgatcgcccgggcctacgcggtgttcgacagcgagcgtccgcgcccggtgcatatctcgatcccgctcgacgtgctcgccgcgccggtggcccatgactggagcgctgccgtggcgcgccgccctggtcgtggtgtgccgtgcagcgaggcattgcgggcggcggcggagcgcctggctgcggcccggcgaccaatgctcatcgccggcggcggcgcgctggcggccggcgaggcgcttgccgcgctgagcgagcgcctggccgcgccgctgttcaccagcgtcgccggcaagggcctgctgccgccggacgcgccgctcaacgccggggccagcctgtgcgtagcgccgggctgggagatgatcgccgaggccgacctggtgctggcggtgggcaccgagatggccgacaccgacttctggcgcgaacgcctgccgctgtccggcgaactgatccgcgtcgatgtcgacccgcgcaagttcaacgacttctatccctctgccgtggcgctcaggggcgatgcccggcagaccctggaggcgctgctggcgcgcctgccgcaggagacccgcgacgccacaccggccgccgcgagggtggcgcgcctgcgcgcggagatccgcgcggcacacgcgccgctgcaggcgctgcaccaggcgatcctcgaccggatcgccgctgcgctgccggccgatgctttcgtcagcaccgacatgacccaactggcctataccggcaactacgcgttcgccagccgagcaccgcgcagctggctgcatcccaccggctacggcaccctcggctacggcctgccggccggcatcggcgccaagctcggcgccccgcagcgcccaggcctggtgctggtcggcgatggcggcttcctctacaccgcgcaggaactggccaccgccagcgaggaattggacagtccgctggtggtgctactgtggaacaacgacgcgctcggccagatccgcgacgacatgctcggcctggacatcgagccgatcggcgtgctgccgcgcaaccccgacttcgccctgctgggccgcgcctacggttgcgcggtgcgccagccgcaggacctggacgaactggagcgcgacctgcgcgccggcttcgggcagcccggcgtgaccctgatcgaactgcggcacgcctgcgcgcgctga

SEQ ID NO: 339747 - DNA, 2091 bp, Pseudomonas aeruginosa
atgaatcgtgaaaacctcaagcgcctgctggcacccaggcatctcgccttcattggcggccgtggcatggcgcgtgccctgaaacgctgtgccgaaggcggtttcgccggccagttgtggctggtcaatccgcagcacgccgaactcgaaggcgtaccctgcgtggccagcgtcgccgacctgccgtgcggcccggacgcggcgttcgtcgccaccaaccgcgaactgaccctcgacgcggtcgccgcgctcgccgccaaaggcgccggcggggcgatctgctatgcctccggcttcgccgaaaccggcgaacagggcctggccttgcaacgccggctgctggccgccgccggcgaaatggcgctgctcggcccgaactgctacggcttgctcgactacctgcacggcgccgcgctatggccggtggcacatggcggtcggcaggtggagcggggcgtcgcggtgctgacgcagagcggcaacttcgcctacaacctgtcgatgagcgaccgttcgctgccggtggcctatatggcatcggtgggcaaccaggcgcagctgggcatcgccgagctgatggacgtgctgctcgacgagccgcgggtgactgccatcggcctgcatctggaaggtctgaagaacgtcccggggttcgcccgtgcggcctataaggcgttgcagaaaggcgtgccggtgatcgccctgaagaccggggtgtcggagatcggcgcggccctcgcgctcagccacaccagttccctggccggttccgacgcgctctacgacagcctgttcgagcgcctcggggtgatccgcgtgagcggcccggtgagcttcgtcgaaaccctcaaggccgccgcctgcggccacctgcctggcgggccgagcctggtcgcgctggcctgttccggcggcgacgccgggttgatcgctgactacgccgagcgcaacggcctggggttgccgtctttcgacgccggacagcgcgacgaactggccggggtactgcccgactacgccaacatcgccaacccgctggacttcaccaccgccatctggggcgatgccgcggccctggaggaaatgctcgacagcgctttgcgcagccctgccgacgccgccctgctggtgctcgactatccgggcgaggaaaccggcgagcggccgcagtgcgacctgcttctgcaacgctactgcgccgcgctgaagcgccacggcaaagtcggcttcatcgcctcggcgttcccggaactgctgccggcccgggcccgcgagctgttgcacggcgagggcgtcgccgcgctgcaaggcgtcgaggatggtctcgccgcctggggacggatcgcccgctaccgccagcgccgcgcggcgctgctggagcgcggcgaggcggcgttggtgccgatctgcccagggccgctggcgggcgacggctacctgctcgacgagtggcaatccaagcaggcgctgaaatccttcggcctgccactgcccccgggggtgctgagcacccccgggcaggcccgcgaagcggccctcgacctcggcttcccgctggtgctcaaggcggtcagcgccgcgctgccgcacaagaccgaggccggcggcgtggcgctcggcctgcgcaacgaggcggcgctggaggcggcattgttcgacatgcgcgaaagcctggcccggcacgcgccgcaactggtcttcgagcgtgtgttgctggagcgcatggcaggcgcgccgctggccgagctgatcgtcggggtcaagcgcgaggagggcttcggcctggcattggtgatcggtgccggcgggatactcgtggagctgctgcgcgacagtcgcagcctgctcctgccgaccaccgacgcggcgatccgcgatgccctgctgagcctgcgcagcgcgccgttgctcagcggcttccgcggtcgcccggcggtatccatggaggccctggtggcggcgatccgcgcggtcgccgaattcgcctgcgaacatgccgagcgcttgctggagctggacgtcaacccattgctggcggatgccgagggagcgctggcggtggatgcgttgatccggctggccaatggctga

SEQ ID NO: 339748 - DNA, 1161 bp, Pseudomonas aeruginosa
atggatttcaggctgacccaggaacaggacatgctggtcgaggcggtgcgcagcttcgtcgagaaggaactgctgccccacgaggacgatgtcgaccgcgccgacgcggtgtcgccggagctggccgcacagattcgcggcaaggccctcgccgccggtttctacgccttcaacatgcccgaggaagtgggcggcggcggcctcgactacctgtcccaggcgctggttgaacgcgagctgtcgaaggtctcctgggccctccatgtattcgtcgcgcggccctcgaagatcctcatggcctgcaccggagaacagctcggcgactacctgttgccctgcgtgcagggcgaaaagaccgactgcttcgccctcaccgagccgggcgccggctccgacgccaattcgatcaagacccgcgcggtgcgcgacggcgacgccttcgtgatcaacggcagcaagcacttcatcagccacgccgggcacgccgacttcgccatcgtcttcgccgtcaccgacagctacgagcacaacggccgcaagcgcaacgcggtgaccgccttcctggtggacaagggcacgcccgggatgaccgtgcgccgcggaccgaaatgcgtgagcaaccgtggctaccacacctacgagatcttcttcgacgattgccgggtgccggcctccaaggtactcggcgaggtcggcaagggctgggaagtggccaacgcctggctcaccgccggacgggtgatggtcgccgccaactgcgtcggccaggcccagcgcgccctcgacctgtcgctgcgctgggcggccgatcgcaagcagttcggccagccgatcggcagctaccagggcgtttccttcaagctcgccgacatggccacgcagatccgcgccgccgagctgatgaccctgcacaccgcctggaagatggaccagggcaccatgaccgacggcgaggccggcatggccaagctgttcgccagcgagaccctcggcaaggtcgccgacgaagcggtgcagatcttcggcggcatgggcctgatggatgaaggaccggtcgagcgcatctggcgcaacgcgcggatcgaacggatctgggagggcacttcggaaatccagcggcacatcgtttcccgcgaactgctgcggccgttgctgcgttga

SEQ ID NO: 339749 - DNA, 792 bp, Pseudomonas aeruginosa
atgactgacctttccccattgcagacgcgggtcgaagccgggatcgcctggctcgtcctgaatcgtccgcaacagcgcaatgcactggatatccccaccctggaggccctgcacgtccgactcgatgcctgcgagcgcgacccggcagtgcgcgctgtggtgctcggcggcagcggacgcagcttctgcgccggggccgatctcgccgaatgggcggcggctgaagcccgtggcgagctggaacgctatggctggaccgaggccgcccacgccctgatggggcgcctgcacgccctcgacaaacccacagtcgccgccgtcaacggcagcgccgtgggcgctggcatggacctggcgctgtgctgcgatttccgcatcgccgccgcctcggcgcgcttcaaggccggctacaccggcatggcctactgcccggacgccggcgccagttggcatctgccacggctgctcggcagcgaggcggccaagcgcctgctgttcctcgacgaagcctggagcgcggagcgcgctctgggcgccggactggtcggcgaggtggtcgccgacgagcgcctggttgagacggtcggcgccttcgccgcgcgtctcgccagcggcccgaccttcgccttcgcccagaccaagcgcctgctgcgcgacggcgccgggcgctcgctggccgagcagttgcgggccgagcaggccgccgggctgctctgcgggcgcagcgaggatgccgccgaggcgctgcgcgccgtggccgagaaacgttcccctcaattcagcgggcgctag

SEQ ID NO: 339750 - DNA, 1413 bp, Pseudomonas aeruginosa
atggctgacggcaaggaaaggctgcaactcacccgggccctggcgagccgccacatcttcatgctgtccctcggcggggtgatcggcaccgggctgttcatgggctccggcgtgaccatcaaccagggcggcccggccggcgcggtgctggcctacctggtggccggggtgctgatgtacctggtgatggtctgcctcggcgagctgtcggtgcagatgccggtctccggttcgttccaggcccacgcgacgcgtttcatcggcccggcgactggcttcatgatcggctgggtctactggatgagctgggcctccacggtaggcctggaattcaccgcggccgggatgctcatgacccgctggttcccggaggtgcccgtgtggctatggtcgggtttcttcgtggtcgtgctgttctccctcaatgccctggtgacccgtgccttcggcgaggccgagtactggttcgccgggatcaaggtggcggcgatcctggtgttcatcgtggtcggggggctggtgatcttcggcggtatcgaactgaagagcggtgcgccggcgccgatgttctccaacctggtcggcgagcggctgttccccaacggcctgtcggcggtgttcgcggtgatgatgacggtggtctatgccttccagggttgcgagatcatgggcgtcgccgccggcgagaccgagcgaccggagaagagcatcccgcgggcggtgcgcaacgtggtgttccgcgtactgatcttctacgtgctggccatcgtcgtgctttccgccatcattccctggcaacaggccgggctgatggaaagcccgttcgtgcaggtgttcgacatggtcgggattccctacgcggcggacctgatgaacttcgtcatcctcaccgccatcctctcggtaggcaactcgggcctgtacgcctcgacgcggatcctctgggcgatgtccaggaccggcatggccccgcgcggcctgtcgaagctcagcgcgcgcggcgtgccgctctacgcgttgctgatcaccctgtgcttcgccctgctctcgttgctgaccagcgtggtcgcagccgacaccctgttcatggtgctgatggcggtgagcgggatgtccggcaccgtcacctggatcgtcatcgcctacgcccaataccgcttccgccgcgagcacatggccagcggcggcacggtcgccgagctgaaatatgccgcgccgctgttcccgctggtgccgctggcctgcatcgccgtgtgctgctcgctgttcgtcttcctcgccctcgatcccacccagcggccgtccttgtactggggcttcggcttcatcgccgcctgctacctggcctattacgtggttcgtcgccggcagccgcagggactgggcgaccccgccctgggacgggccggctga

SEQ ID NO: 339751 - DNA, 2253 bp, Pseudomonas aeruginosa
gtgagcggccgcggcggagtgttggcgcggcgcctgctgtggcgggtgctgctgttcagcctgtgtttcactgtcctcgccggcgccgtgcagctgttcttcgaataccgccgcgaaatgcgtgagatcgaggcgcgcctggaactgatccgcagcggctacctggccagcttcgagcgcagcctgtgggatctcaaccaggagcagttgaacgtgcagttgcgcggcctcggggatttccccgacatcgcccgtgtcagtctgcaaagcgccgacttcaacctgctgcagggcgaccagcgtccacgcggcctgctgcgggtcgagcgctttcccttgagctaccagccgccggggggcgagcgtcggcatctgggcgagctggagatcgccatcgacctggcggcggtctatcgccggctggtttccggcggcctggccagcctcttgtggatgggcagtttcctttgtggcctggcggtggccctcagttggctgttccacagcctggtcactcgccatctgtggcgcatgtccgagttcgccgggcatatcgccgaaggcgacctgcaacagccgctgcgactggacaaggtggaccgcgagcgcgatgagatcgacgccgtcgccgccgccctggaggacatgcgccaggccctgcgcaccgatcgccgccggcgcgacgccgaccgcgacgagttgcgtcggcaggtcgagcggcgcaccgccagcctgcgccgggcgaaggaccaggcggaagccgccgaccgcgccaagagccgttttctcgcgaccatgagccatgagatccgtaccccgctgaacggcatcctgggcatggccgagctgctgcgcgaggcatcgctcggcgagcgtgaccgccagcgcctgcgggcactggcgacagcgggggagggactgctggcgatcctcaacgaggtcctccacttcgcccggctggaggaagcggcggatgtgccggaagcggtggacttttccttgcggagcctgctcgaggacgtcctcaccctgctcgaaccacgggcgcgggagaacgccacgcggctggacctgtggctggacccacaggttcatgacggccatcgcggcgccgagcagttcctgcgccaggtgttgaccaacctgctgggcaacgcggtgaagttcaccgaggccggcgaggtgcgcgttcgcgtcgagcggctggcgcgcagcgcaggaagcgagcgcctgcggctgagcgtcgcggacgatggaatcggcattcccgaggaaatgcgcgaacgcatcttcgaacgcttcacccagggcggcgacgccgtgacccgccgttacggcggaaccggcctgggcctggcgatcagcaagcggctggtggaagcgctgggcgggcggatcggcgtggaaagccgggtcggccagggcagtacgttctggttcgagatcgagctggcgctggcgagcttgtccggcgcgacgccgccggcggcatcggtgtctgcgctggaggtgctgctggtggaggacgtggcgctcaaccgcgaggtagcccagggcctgctcgagcgggacggccaccgggtgatgctggccgaggacgcggggccggccctggcgctgtgccggcagcggcgcttcgacctgatcctgctggacatgcacctgccggggatggctggcctcgagctttgcgccgggattcgccggcagctcgacggcctgaaccgcgccacgccgatcttcgccttcaccgccagcatccagccggacatggtgcgtcggtacttcgccgcgggcatgcagggcgtgctcggcaagcccctgcggatggacgagctgcgtcgcgcgctgggcgaggtcggcaccagcgtgcctgcgcttgcggcggacgccgcgctggaccggcagatgctcgagacccaccgccgcctgctggggcggcacaagctcgccggactgctgggcaacctgctgggaagcctggacgagcagttgccgctgctggccgaagccctggaccaggcggacctggccgaggcggcgaacatcgcccatcgcctgtccggaagctgccactccatgggcctggtggcgctcggcgccggcctgggcgagctggagcgcgaggccctgggcgcggccggggtcgacccgcggccctggggcgcacgcctgggtagcctgcgccgcgacggcgccgaagccctgcgccgcgccggcttcctcggcgaagccgacgcagcggccggttga

SEQ ID NO: 339752 - DNA, 777 bp, Pseudomonas aeruginosa
atgcaggcccgctggctggcgctctgcggatggctgctgggcggcctggcacaggctgcggagaccatccgctattgcgactatccggtatacccgccgatctcctggagcgatggccagcaggtccgggggctggcgccggagctggtgaagcggctgttcggcgcgctgggctaccgggtcgaggtggtggtgctgggcaactggcggcgctgcctgctggacgccgccgccggacgggtcgacctggtactggcctaccgcacgcccgcgcgcgatcgcgacctggcgttttccgccgagccggtgctgcgcgaggacgtggcgatcttctacaaccgccagcggccggtgcgcatccgatccctcggcgacctcgccggctatcgcggcggattgttgttcggcgaaagctacggggcggacttcgaccgcttcgtcggccgctacggcaacgtcgaatgggtttccgacagccgacagaacttcggcaagctggtgcgccagcgcatcgactacatcgcccacgaacgccgcaccggcacgctgttcgccgagcgcctggccggcggcgagaacatccgtgcgctgcccgaaccgctgacggtggactacctgcgggtggcggtctcgcggcactcgccgctggcggcgaagatggacgagatcgaccgggccctgcgtggctatcgcgacgacggcagcatccagcgttggctggacgacagcgtgcgcgactatcggcgcctcgccggcaaccgcgcggacgcctggtga

SEQ ID NO: 339753 - DNA, 735 bp, Pseudomonas aeruginosa
atggcgatggttccgcgcgtattggtggtcgacgacgacccggtgattcgtgagcttctccaggcctatctcggcgaggagggctatgacgtcctctgcgccggcaacgccgagcaggcggaagcctgccttgccgagtgcgcccatctcggccagccggtcgagctggtgctgctggacatccgcctgcccggcaaggacggcctgaccctgacccgcgagctgcgggtgcgctccgaggtggggatcatcctgatcaccgggcgcaacgacgagatcgatcgcatcgtcggcctggagtgcggcgccgacgactacgtgatcaagccgctgaacccgcgcgaactggtgtcgcgggcgaagaacctgatccgccgggtgcgccatgcccaggccagcgccggtcccgcccggcaggccctcaggcagttcggcgactggctgctggacgccgaccggcgccgcctgatcgaccacgcgggcaacgaaaccctgctcacccatggcgaattccaattgctcggcgccttcctgcgcaacagcgggcataccctgagccgcgaccagttgatggaccagatccgcaaccgcgagtggctgcccagcgatcgctccatcgacgtgctggtcggccgcctgcgtcgcaagctgcgcgacgacccggccgaaccgcaactgatcatcaccatccacggcgccggctacctgttcaccgccgcggccagcgacgcctga

SEQ ID NO: 339754 - DNA, 648 bp, Pseudomonas aeruginosa
atgaaccaggaagtgcgcttttcccgtctggaaccagagcagcgcaaggcgctgctgatcgaggcgaccctggcctgcctgaagcggcatggcttccagggcgcctcggtgcgcaagatctgcgccgaggccggggtatcggtgggcctgatcaatcaccactacgatggcaaggacgcgctggtggccgaggcctacctggcggtcaccggacgcgtcatgcgcctgctccgcggtgccatcgacaccgcgccgggcggcgcccgcccgcggctctcggcgttcttcgaggcatccttctccgccgagctgctcgatccgcaattgctcgacgcctggctggcgttctggggtgcggtgggcagcatcgaagcgatcgggcgggtccacgaccattcctatggcgagtaccgggcgctgctggtcggcgtgctgcggcaactggcggaggagggcggctgggcggacttcgacgcggaactggcggccatcagcctcagcgccctgctcgacgggctgtggctggagtctgggctgaatcccgcgaccttcacgccgcggcagggcgtgcagatctgcgaggcctgggtggatggcctggaggcgggcgcccatcgccgcttccggcgtgcgacggaagcttgttga

SEQ ID NO: 339755 - DNA, 1092 bp, Pseudomonas aeruginosa
atgaaccgttcctttccattgcgccgcgcggccagcgcccgtccgcatccggtttttccttgccgcgtccttctcggcgccgtcctgctggcgttcggcggcctcgcgccagtccaggccgatgatggcctggtggtggtcggctacggcggcgccggacagaaggcccaggaggtggcgttcttccagccgttcacgcagcagaccgggattcccgtagtgcagagcgagtacaacggcgagatggcccggatcaaggtgatggccgacaccggtcacgccgactgggatctggtccaggtcgaggggccggatctggcgcgcggttgcgacgacggcctgttcgagcgtctggactggcaggccatcggcggcaagcagcagttgatcgccaatgccgcccaggaatgcggttccgccgcgctggtctggggcgtggcgatcggctacgacgccgaccggctgcaacagccgccggcgtcctgggccgacttctgggacgtccagcgcttccccggcaagcgcggcctgcgcaagcgggcgatctacaacctggagttcgccctgctcgccgatggcgtgccacgcgagcaggtctatccgctgctggcgacccgcgccggcgccgaccgtgccttcgccaagctgggccagctcaagccctacatccagtggtgggaggcgggagcgcagccggcgcagtggctggccgccggcgacgtggtgatgacgtccacctacaccgggcgcatcgccgacgcccaccgcgcggggcgcaacctggccctggtatggccgggcagcctgtacggcatggactactgggcggtggtcaagggttcgaagcgcggcgccgaggcgcgtcgcttcatcgccttcgccaatgccccggatgcccaggtgcgctacgtcgagaacattccctacgggccgaccaaccgccaggccgcccagcgcctgcccgcgcaactggcgagctgggtgccgaccgcgccggcgaacctggagcagggcctggcgatggacgacgaattctgggtcgagcatggcgaggagctggaggagcgcttcaacgcctgggccagccagtga

SEQ ID NO: 339756 - DNA, 1947 bp, Pseudomonas aeruginosa
gtgaatttcccgcacctgttcagccccctggaaatccggggcaaacgcctgaaaaaccgcatcatgtcgagcggccacgacacgtcgatgcccaccgacaacctggtcaacgagccactcgtcgcctatcaccgcgcccgggcccgcggcggcgccggactgatcgtcatgcaggtggcgggggtccacgacagcgcgcgctacacctcgcacgtgctgatggccaccgacgatgcctgcatccccggctaccggcgggtcgccgaggcctgccacgccgaaggctgcgtggtgctgtcgcagatcttccatcccgggcgcgagatcatggagtccgccgacggcctgctggcggtggcctattccgcctcggcctcgcccaacgaacggttccgagtgatgccgcgcgaactcgaccagccgctgatcgacgagatcgtcgccggctacgccgccgccgcgcgccgcctgcaccaggcaggactggacggggtggaggtggtcgccagccatggctacctgccggcgcaattcctcaacccgcgggtgaaccgccgcacggatggctacaacggcgacctcgatgcccgcctgcgtttcctccgcgaagtgctggcggcggtgcgcgcggccacctccgaggacttcatcgtcggcctgcgcctgtccgccgacgagcgcgaccccgagggtctcagcgaaagcgagtcgctgcaggcggccgaggcggtccagggcgagctggactacctgcacatcgtcgccggcacttcggcctccctcggcggcgccatccatatcgtcccgccgatggccatcgagccggcctacctggcccgcgaagccggtaccttcaaggcgcgcctggcgatcccgctgttcgtcaccgggcgcatcaaccagccccaggaggccgaggccatcctcgcccgaggccaggccgacgtctgcggcatgacccgcgcgctgatctgcgacccgcagatgccgaacaaggccgaggccgggcgcagcgacgacgtgcgcgcctgcatcgcctgcaaccaggcctgcatcggacatttccaccgaggctatccgatctcctgcatccagcacccggaaaccggccgcgagctgacctacgcaacgcccaatccggcctcgcggcgcaagcgcgtgctggtcgccggcggcggcccggcggggatgaaggcggcggcggtggcggcacagcgcggccatgaggtagtgctctgcgaggccggcgcccagctcggcggccaggtcaacctggcgcaactgctgccgcgccgcgccgaattcggcggcgcctccaccaacctgcaacgggagatgcaactggccggcgtcgaggtacgccgcaacacgccggtcgaccgcgcgctggtggagcgcgagcggccggacctggtgatcgtcgccaccggcgccgaaccctattggccgcctttcgagcgcggcggcgagctgcaggtcgtggatgcctggcaggtgctgcgcggcgaggtgcgggtcggtcgctcggtgctggtcaccgactggcggggcgactggatcggccccggtatcgcggaaaagcttgtgcgcgagggccaccaggtgcgcctggcggtgaacggcacccactgcggcgagagcctgccgctgtacgtgcgcgaccagttggccggcgaactgcaccgcctgggtatcccggtcacgccctacgcccgcctgtacggctgcgacgataccacggtgtacatgcagcacagcgccagcggcgaggcgatgctgttcgaggaggtcgataccctggtgctatgccagggccaccagccggtggaccgactggccgacagcctgcacggcctggcggaggtgctgcggatcggcgactgcctggccccccgcaccgccgaggaggcgatctacgaagggctcaaggccgcctggagcatctga

SEQ ID NO: 339757 - DNA, 600 bp, Pseudomonas aeruginosa
atgccccgcccgtcaccgccggacgccaccgacacgccacgcagcgaaacgcacttcctcggcacccgcatccgcggcctgcgcaaacgccgcggcctgaccctggccgagctggccgcacagagcgaactcaccgccggctacatcagccaactggaacgcaacctggcgtatccgtcgattccggcgctgttcaacatcgcccgcagcctcggcgtgaccatccagtggttcttcgccagcgaggccgcggtggacccggcggacgccggctacgtggtgcggcgcaacacgcgcatgagcgtgcattacgaagacggcatcatcgacgaactgctcaccccgcagcccagccgccagttggagatcctccactcgcgtttcccgccgggcacctacagccagcagagctacagccatgagggcgaggaagccggctacatcctcagcggaatcttcgaactctgggtcggcgaccgccatttccagctccgcgagggcgacagcttcagctactccagccaggaaccgcatcgctacggcaacccaggcgacagcgataccctggtgctctgggtgatcaccccgccgacgttctga

SEQ ID NO: 339758 - DNA, 1278 bp, Pseudomonas aeruginosa
atgaaccgtaccctctataccctgctgttccacctcggcttgccgctggtggcgttgcgcctgtggtggcgcgcgcgccaggcgccggcctatgccaagcgcatcggcgagcgtttttccctgtccttgcccgaggtgccgcccggcggcatctgggtgcacgccgtctcggtgggcgagagcatcgccgccgcgccgatggtgcgggcgctgctggagcgccatccgcagctgccggtcaccgtcacctgcatgaccccgaccggctcggagcgcatccgcgcattgttcggcgagcaggtccggcactgctatctgccctacgacctgccctgggcggcggcgcgcttcctcgaccgggtgcggccgcgcctggcggtgatcatggaaaccgagctgtggcccaaccatatccatgcctgcgccgtgcgcgggatcccggtggcgctggccaatgcgcgcctgtccgagcgctcggcgcgtggctacgcgcgcttcgccgggctgacccggccgatgctcgccgagctgtcctggatcgccgtgcagaccgaggccgaggccgagcgcttccgtcgtctcggcgcgcgtcctgagtgcgtcagcgtgaccggctcgatcaagttcgacctgcgcatcgacccgcagctgccgctggctgctgccgccctgcgcgaggaatgggacgcgacggcgcgaccgctgtggatcgccgccagcacccatgccggcgaggacgagatcgtcctggcagcccaccggcgcctgctggaaacgcgtcccgacgcgttgctgatcctggtgccgcgccatccggaacgcttcgccggcgtccacgagctatgccgccgcgaaggcttcgccacggtccggcgctccggcggcgagccggtggcacgcgcgacccaggtgctgctcggcgataccatgggcgagctgctgttcctctatgccctggccgacatcgctttcgtcggcggcagcctggtgcccaacggcgggcacaacctgctggagccggcggccctgggcaagccggtgttcgccggtccgcacctgttcaacttcctcgacatcgccgcgcaattgcgcgatgccggggcactgctcgaggtgacggatgccggcgagctgtgcgacggcctcgcgcgcctgtgggcgcagccgcaggtcgcgacggccatggccactgccggagagaaggtgctgcgcaacaaccagggcgccctggagcggctgctggcggggttggcgcggttgctcgggcgcggcgggtag

SEQ ID NO: 339759 - DNA, 885 bp, Pseudomonas aeruginosa
atgcagtggaacctggagcagatccgcctgttcgtcagcgtcgccgagcgccagtcgttctctgccgccgcccgcgaactgaagcgggtgcaatcggcggtgagcaacggcatcgcgctgctggaggcggacctcggcgtcaccctgttcgaacgcagcagcggacgtcagccgcgcctgaccgacgagggccgggtgctgctggcggaggcgcgcgaggtgctgcgccagtgcgagcgcctgcaggggcgcgcgctgggcctggcgcgcggcgaggagccgcggctgcgcctggcccaggacgaggcgatgccttaccagccggtgctggacagcctggaagcgctggcgcagcgctttcccagtctggaggtgcaggtgtccagcggcggccagggcgacgtgacccgtcgtttgctcgaggagcaggctgacctcggcctgctgttccaccatgagcgcatgcctgagtcgctggagcggcggcgcctcggcagcgtcgagatggtcacggtgtgcggcgccggccacccgctggccgggctgcaacgggtcagtcgccgcgagctggcacagcaccggcaacttttgatcgtgccccagcagagcggctatccgggcggcgagcagatcagcccgcaggtgtggcggctggacagcttctattccatggccgagttgctgatgcgcaacctcggctgggcctggctgccgcggcacgtggtgcagtaccccacctacgatcggctgatggtggagctgaccagcgactggacaccgccgtcgctggtggtcgaactggtctggcggcgcaacgaggtgctcggcccggcggcggcctggctcggcgaaaccttcacccgccacctgcgcgccatcggctga

SEQ ID NO: 339760 - DNA, 333 bp, Pseudomonas aeruginosa
atgaccaactatctctacctcgccatcgccatcgccgccgaagtggtcgccaccacctcgctgaaagccgtcgccggattcagcaagccactgccgctgctgctggtggtgggcggctacgtgctcgccttcagcatgctcgtgctggtcatgcgcaccctgccggtcggcgtggtctacgccatctggtccggactgggcatcgtcctggtcagcctggtggcgatgttcgtctacggccagcgcctggaccccgcggccctcctcggtatcggcctgatcatcgccggcgtgctggtgatccagttgttctcccgcgcttcggggcactga

SEQ ID NO: 339761 - DNA, 1176 bp, Pseudomonas aeruginosa
atgccccaagccctttccaccgacatcctcatcgttggcggcggtatcgccggcctctggctgaacgcccgcttgcgccgggccggctacgccaccgtgctggtggaaagcgccagcctcggcggcggacagagcgtgaagtcgcaggggatcatccacggcggcgccaagtacgccctgcatggcgccctgaccggcgcctccgaagccatcgccgacatgccgcggcgctggcgcgcctgtctcggcagcgacggcgaactcgacctgcggggcgtacgcctgctttccgaggcgcactacctgtggtcgccgggcggcctggccggcagccttaccagcttcttcgccagcaaggcggtgcgcagccgggtcgagcaggccaagggcgaggatttgcctccggcgctgcgcgacaaggggttcaagggcaaggcctaccgcctcacggaaatcgtcttcgacgtccccgacctgattcgccgcctggcggaactggccggtgacagcctgctcgccggcgagcgcatcgaaccgctgcgcgaaggccgggaactggccggcctgtgcgtcgacggccgggagatccgtgcccagcgcgtggtgctcagcgccggtgccggcaacgaggcgctgctccgcgaactgggcctggaacaaccggccatgcagcggcggccgctgcacatggtgatggtcaaggcggcgaccctgaaaccgctgtacgcccactgcctgggggccgggccgaagccacggatcaccgtgaccacccatccgacccgcgacggccagtcggtctggtacctcggcggcgacatcgccgaagccgatggcgtggcccgcgacgaagccgcgcagatcgccgaagcacgtcgcgaactggcaaagctgctgccctggatcgacctcggccaggcgcagtgggccaccttgcgggtggatcgcgccgagccggcacagtccaacctgttgcgcccggacaacgccttcctcgccgaacagggacgcctgctggtcggctggccgaccaagctggcgctggcccctgacttcgccgaccgggtctgcgcccgcctggaagaagacggcatccgccccagcgaacatgccgcgctgccgcaactgccgcgtccgccgctcgccgaaccggcctgggaggtagccttcgcatga

SEQ ID NO: 339762 - DNA, 813 bp, Pseudomonas aeruginosa
atgatcagggataccctccacgacctgcaccgcccgctgggcgacaccggcctggccgtttcgccgctgggcctgggcaccgtcaagttcggccgcgaccagggagtgaagtacccttccggcttcaccatccccgacgaccgcgaagccgccgacctgctggccctggcccgcgacctcggcatcaacctgatcgacaccgccccggcctacggccgcagcgaggaacgcctcggcccgctgctgcgcggccagcgcgagcattgggtgatcgtcagcaaggtcggcgaagagttcgtcgacggccagtcagtcttcgacttctccgccacgcatacccggcgctccgtcgaacgcagcctgaagcgcctggagaccgagcggatcgagctggtgctggtgcattccgatggcaacgacctggatatcctcgagaacagcgaggtctacccgactctcgccgcgctcaagcgcgagggcctgatcggcgcctacggactctccggcaagaccgtcgaaggtggcctgcgcgccctgcgcgagggcgattgcgcgatggtcacctacaacctgaacgagcgcgccgagcgcccggtcatcgagtacgccgcggcccatgccaagggcatcctggtgaagaaggcgctggccagcgggcatgcctgcctgggcgccggacaggacccggtgcgcgccagcttcgaactggtcttcgaccagccgggcgtcgccgccgccatcgtcggcaccatcaatccgctgcacctggcccataatgtcgcgatggccgcgcaagccctgaaaaaggcctga

SEQ ID NO: 339763 - DNA, 921 bp, Pseudomonas aeruginosa
atgccccgtatgctcgcccgcaaggatccgtccgccttcaagaccctgccgctgctggtggaggcctccccggacgggctggtctaccaggccctcggcctgccgctgaacttccagcagatgctcgtacgccgccgccgcatggaggtagccgacccgcagcgcttcgtcgccgagctggccaacctgggggtctcggtgcgcttgaccctgaactggcagggccgcgactactgggtgctggtccgtcagcgccggctggaccgcggcgataccgtgctcaagctgatctccggctacgtaccggcccacgaactgaacctgccgctgctcacggcgatccaggaagtcgccgaggaatgcctggtggagaccgccggcggctggctcggcgggcgcttcggcgacacctggctgccgacgccctaccagggttcgctgcgctaccgggagaacagccacttcgtcctcaccccgctgtccggcgccgcccgtccggtgcaagccggcagcctgcgcttgctggagcgcccacgcgcctacgtacacctgcccacggcctcgctgcaactggtctacgacatgcgcctggagctgccgcgcgatgcgcgcgagccgagcctctaccatgtcgacgagcggctcgagagcggtccgctggtggcgcgcctggaccgtcggcgccccgatctctacctgctgccgctggaccaggggcgccccaccggcgacctgttcaccctgcgcaagggccagttgcgccctgcggccacccgcggcctgtggttggccgagagctttgccgtacaggacggctggctggtgcatgaggaacgcatccgtttccgcgactggctggcactgtggccatccagcaacggcgaccaggccggcggtgggcgcgaccgcgccagcgcctga

SEQ ID NO: 339764 - DNA, 1209 bp, Pseudomonas aeruginosa
atgtacctggaaaccccgaagaaattccgcagcctggctaaccaggcgcatcaggtcgcggaaaactatttccggccgatctcgcgcaagtacgacaaggccgaacacgcctatccgaaggagctggacctgctcgcggccttgctggacggcatgaacagcggctcgcccgaggctgtcggcgcgacctcggcgagcaagcgcgccggcaagcaggtagaggagggcatcaagaacggcggcaacctgtcggcattgctcggcgtgatggaactgtgctggggcgacgtcggcctgctcctggccatgccgcgccaggggctgggcaacgcggcgatcgccgcggtggccaacgaggagcagttgcagcggttcggcggcacctgggcggcgatggcgatcaccgagccgggctgcggctcggactcggcggcgattcgcaccaccgcgacccaggatggcgaccactatgtactgaacggcgagaagattttcgtcacttccggcgagcgggccgatgccgtggtggtctgggccaccctgaaccgcaacctggggcgggcggcgatcaagtccttcgtggtcgagaagggcacgccggggatgaccgtgacgcgcctggagaagaagctcgggatcaaggcttcggataccgcttcgatcagtttcaatgattgccgggtgccggccgcgaacctgctgggcaacgccgaggtcgacgtgcagaagggtttcgccggggtcatggagaccttcgacaatacccgcccgctggtggccggcatggccgtcggggtggccaaggcggcgctggaccggacccgcgaattgctgaagaaggctggctgcaagttcgactacaggaaaccgctgctcaccgtcagccacgccgaggccactctctatcgcctggaggcggagtgggaggcagcgcgcctgttgaccttgaaggcggcatggatggccgacaacaagctgcccaactcgaaggaagcgtccatcgccaaggccaaggctggacgggtggccaacgagatcaccctgaagtgcgtggagctggctggcgccctcggctacgccgaggatgagctgttggagaagtgggcgcgggactcgaagatcctcgacatcttcgagggcacccagcagatccagctgctcatcgtcgctcgccgcctgctcggcaagtcttccagccagttgaagtag

SEQ ID NO: 339765 - DNA, 1284 bp, Pseudomonas aeruginosa
atgagcaccgatgtacagggccgtgccctggctgtactgaaccgtgtcgcccaggccgactggccggatcgcttcaatcttcgcaaacccttcgagaagctgctctacagcggcagccgtaccggcttccgcctggccagcgagcgttcggcgaagcaagcgaagggaccgcgcaaggccgatccggacgggttgttcgacctgtcgttctccgacgaccagcagatgctggtggacatgctcgaaggcttcgccctggaggtgttgcgtccgcgggctcatgacgcggatgccgaggccagcctggcggcggaactgctcaaccaggcgctggagctgggcctgacccactatggggtcggcgaggtgcacggcggcatggccggtgagcgcaccacggtgaccactgcccttatcgccgaggccctggccaagggcgatctgtcgctggcggcggccctgctggtgccgttgtcggcggccaactgcatccgccgctggggcagcccctcgcagcaggcgcagtggctgccggcgttcgtcagcgaagagggggcgccgctcaccgccatcgcggtcaacgagccgagtctgctgttcgacccgcagaaactggcgacccgcgcccggcgcaagggcagtcactacctgctttccggagagaaatgcctggtcctgcgcggcctggaggccagccgcctgatcgtcgcggcgaagaccgacgaggggcctgcgttgttcctggtggaagcctccgccaagggcgtcgagcgacgtgccgagccggcgatgggactgaaggccggcggcaccgcccggttgcgcctgaagagcgtcaaggtgccggcggacaaccgcctggccgccgagcatttcgactaccgggccttcctcgatcacgcggccctggcctggtgtgccctggcgctgggcaccgggcaggcggcgctggactacgtgatcgcctactgcaacgagcgcgaggccttcggcgagccgatcagccatcgccagggggtcgccttcatggtcgccgacatcgccatcgaactggacgccatgcgcctgatggtctggcgcgcctgcgccctggccgagcgcggccagccgttccagcgcgaggcttacctggcgcgtctgctgtgcgccgagaaggcgatgaagatcggcaccgacgccgtgcaactgctcggcggccacggcttcaccaaggagcatccggccgagcgctggtaccgcgacctgcgcgcggtagcgctgatggccggcggcctgcacctgtga

SEQ ID NO: 339766 - DNA, 1425 bp, Pseudomonas aeruginosa
atgaagttgtccatgccccgtttcgaccaggccccggtgttggtggtcggtgatgtgatgcttgaccgctactggcatggcgcgacttcgcgcatttcgccggaggccccggtgccggtggtccgcgtcgaacagcacgaggaccgccccggcggcgccgccaacgtcgcgctgaacatcgccgcgctgggcgcacaggccttgctggtcggcgtcaccggccgcgacgaggccgccgacagcctggccaacagcctcaaggccgctggagtggacgcgcgcttccagcgcatcgatagccagccgaccatcgtcaagctgcgggtcatgagtcgtcaccagcaactgctgcgtgtcgacttcgaggaaccgttccgcaccgacgcggcggccctggccgtggacgtcgagtcgctgctggccaaggtcaaggtgctggtgctgtccgactacggcaagggcgcgctacagaaccaccaggtgctgatccaggcggcacgggcgcgcaacattccggtactggccgatcccaagggcaaggacttcgccatctatcgcggcgccagcctgatcaccccgaacctgtccgaattcgagaccatcgtcggccgttgcgccgacgaagccgaactggtcgccaagggccaggcgctgatgagcgaactcgacctcggcgccttgctggtgacccgcggcgagcatggcatgaccctgctccgccatggccagccggccctgcacctgccggcgcgggcgcgggaagtgttcgacgtcaccggtgccggcgatacggtcatctccaccctggccgcggcgcttgccgccggcgaggagctgccgtccgcggtgggcctggccaacctggccgccggcatcgtggtcggcaagctgggtaccgcggcgatcagcgcgcccgaactgcgtcgcgcggtgcagcgcgagcagggttccgagcgtggcgtgctgggcctggagcaactgctgctggcaatcgaagacgcccgcgcccacggcgagaagatcgtcttcaccaatggctgcttcgacatccttcacgccggccacgtgacctacctcgaacaggcgcgcgcccagggcgaccgcctgatcgtcggggtcaacgacgacgcctcggtcactcgcctgaagggcgttggccggccgatcaactcggtggaccggcgcatggcggtactcgccgggctcggcgcggtggactgggtggtgagcttcgccgaagacactcccgagcgcctgctcgagcaggtgcgtccggacgtgctggtcaagggcggcgattacggcgtcgagcaggtggtcggcgcgcagatcgtcaaggcttacggcggcgaggtacgggtgctcggcctggtggagaacagctccaccaccgccatcgtcgagaagatccgccagaaaggctga

SEQ ID NO: 339767 - DNA, 1812 bp, Pseudomonas aeruginosa
atgagcgatagtcctcagaatcccggaccttccagtctcaagatctatttccgcctgttgggctacgtgaagccctacatcggaatgttcctactcagcatcgtcggtttcctgatcttcgcgtcgacccagccgatgctggcgggcatcctcaagtatttcgtcgacggcctctccaatcctgacgcggcattgtttccgaatgtgcagtggccctggttgcgcgacctgcacctggtctacgcggtgccgttgctgatcatcctgatcgctgcctggcaggggctgggctcgttcctcggcaacttcttcctggccaaggtttccctggggctggtgcatgacctgcgggtcgccctgttcaacaagctgctggtgctgccgaaccgctatttcgacacgcacagctccggccacctgatctcgcgcatcaccttcaacgtgaccatggttaccggagcggccacggatgccatcaaggtggtgatccgtgaaggcctgaccgtggtcttcctgttcctctacctgctgtggatgaactggaagctgaccctggtgatgctggcgatcctgccggtcatcgcggtgatggtgactactgccagccgcaagttccgcaagcagagcaagaagatccaggtggccatgggcgacgtcacccacgtcgcctcggaaactatccagggctaccgggtggtgcgcagcttcggcggcgaagcctatgaagagaagcgcttccacgacgccagccagagcaataccgacaagcagttgcggatgaccaagaccggcgcggtctacacgccgatgctgcaattggtgatctacgtcgccatggcgatactgatgttcctcgtgctgtggctgcgcggggacgcctcggccggcgacctggtggcctatatcaccgcggcgggccttttgcccaaaccgatccgccagctttccgaggtcagttccacggtccagcgcggcgtcgccggcgccgagagcatcttcgagcagctcgacgaagcggcggaggaagaccaggggagcgtcgagaaggagcgggtcagcgggcgcctggaagtacgcaacctgagcttccgttatcccggaaccgacaagcaggtgctggatgacatcagtttcgtcgccgaacccgggcagatgatcgccctggtcggccgttccggtagcggcaagtcgaccctggccaacctggttccgcgcttttatcagcacaatgacggcaagatcatgcttgatggcgttgaggtcgaggattatcgcctgcgtaacctgcgccgccacatcgccctggtgacccagcaggtcacgctgttcaacgacagcgtggccaacaacatcgcctacggcgacctggctggcgcgccgcgcgaggaaatcgagcgggcggcgaaggctgccaacgccaaggaattcatcgacaacctgccgcaaggcttcgacaccgaggtcggcgagaatggcgtgctgctttccggcggccagcgccagcgtctggcgatcgcccgggcgctgctcaaggacgcgcccctgctgatcctcgacgaggcgacctcggcgctggacaccgagtcggagcggcatatccaggcggcgctggacgaagtgatgaaagggcgcaccaccctggtgatcgcccaccgcctgtcgaccatcgagaaggccgacctgatcctggtgatggaccaggggcagatcgtcgagcgcggcagccacgccgagctgctggcgcagaacggccactatgcgcggctgcacgcgatgggactggatgagcaggcgccggcgcctgtcggctga

SEQ ID NO: 339768 - DNA, 651 bp, Pseudomonas aeruginosa
atgcgagtcatagactacccctcctacttgcagttgcgtgacaacgcagaagtgctggaagccgatggtcatggggacaaggtactgcgtctgcgcgacgggtccttcctcaagctgtttcgccgcaagcgcctgatttcctccgcagccctgttcccctatgcggagcgcttcgcccgcaatgccagcgaactggcgcggcgcggcatcgtctgcccgaaggtgctggacgtactgcggatcccacatatccagcgcgacgcggtgcactacgagccgctaccggggcagaccctccgccaactcgaccgcaacgacccggagtgcggcgatacagtccggacgcaactgggcgagctgatcgccgcgctgcacgccaagggggtgtacttccgctcgctgcacctgggcaacgtggtgcgcacgccggaaggccggatgggcctgatcgacatcgccgacctgcgggtccagcgctcggcgctcagcgccgcccaacgcattcgcaacttcaagcacctgctgcgctacgaacaggatcgaacctggttcctcgacgacagcgagcacctggtgctcaaggcctatctccgcagcagccaggtccactggacactcgagcagctcctcaagcaactgcaactggattga

SEQ ID NO: 339769 - DNA, 1200 bp, Pseudomonas aeruginosa
atgttcgcagctacccgactgacccgtcttcgccacgataccagccacatcctcagccactggatcctgccgctgggctggctggccctgctcaccggaatgttctgggtcggcgaccgctccgactatcaccggcttttctacatcctgcttgcagccccgacgctgcttttcgtgattatccagccgcaactgttacgtccactgacccgctcgccgctgctcatcgccattctggccttcagcgcttacatgatgctcagcctgctctggtcaacgccggaaaactcggcgggttcgctgttcaaacggccgctgtacatcgttctactgctcttctgtgtggggatactggcgctacaggcacccgaacgcctacgcaacattacttggctggcggcactgggagcagttttcgccgccgcggtcacggtggtccactaccacctccagacacatcctgcatggatgcgcttgtccggatacggggctctctacaacccactgctgagtgcccatgtatatggcgcattcactgtggtctggctggtttactggatgcaatcacgccatcttcttgcgccactgccgctgctgtccttggcgatactatgctgcctgttgctgtcgaccggctcacgcaccccattgatcgcaatcaccgcctgcctgggctggctgttgatcgccggcaatcagaaaaagaccctgatcgtcatagggttggcagcgctgggcatgatcgtggcttatatcttcaatccagagctgctcacccagcgtggcgtctccttccgcccggaaatctggagcgaatccctgcgccagatcggcgagcacccctggcttggccatggctacgatcacccgatgcggatcaagctggccaacggcatgctgctggccgatccgcacaacatcgagttgggcgtgctgttcgccggcgggatcgtcggcctgctgctatggtctgcgatctacgccctggccttcatcttcgcctggaagaaccgtcgcgaccccatggtgctgctggcgtctacctggctggtcttcggactggcttccggcctcacggaaggcaacgcgttcatgtcccgccccaaggagcactggttcctgatctggattccattggccctgctgtacgccctgtgggtgcagaaaagcgcccgcgacaaaaacgaaaccgcctcctga

SEQ ID NO: 339770 - DNA, 885 bp, Pseudomonas aeruginosa
atggcgctcgtcgatgatggttcgcagccattggtttccgtgatcatcgcttcctataaccacgaaaagtatatagaagcgagcatcgccagcgtggctgcgcagacataccgcaacgtggaactgctggtggtggacgatggttccagcgatggcagcgtcgagcttttgcgcgggctccaggcgaagtacggcttcgacctcagggtccagcagaaccagggactgtcgaaaacgctcaacgaggcgatcgccagggcccggggaaatctcatcgtgcctttcggttcggacgacatcatgttgccgcaacgcctggagaaacaggtggcacacatgtgggacaagcccgaggtaggtatctgcgcgggcaatatcgagatcatcgactccaatggccgggtcatgccgggtaaggagcagcgcaaacgcgacctgcctttccgccgcctcgacttcgatgacctgttcctggaccgcaagccgggcccgatggcgcccaccctgatgttccgccgggaagccctggagaaggtcggcggtttcgatccggacatacgcctggaagatgtctatatcgaactggcggtgaccaaggctggctacgtcatcgacattcttggcgaggtcctcgcccagtaccgcaagcatcccaccaatacgtacaagaacgcccgtttcatggtggacaacgtattcaagacgtacagccagttcagcgatcaccccgattacgagcaggtgatcatgcgcttccgcaattcgatgttcctcaagtgctcgaaccgggacaaggtgctggcccgggagctgctctccggcttgccgctgaagtactggaacgagaagaccttccgcggcattgcgcggctgtttttctcctag

SEQ ID NO: 339771 - DNA, 957 bp, Pseudomonas aeruginosa
atgaaagttctgtttctggtccagaaagagcagcgcgcgatcctggatcgcctgtacgacggcatcgccgcccactgcgagtgcgatactcgctggctgagcagcgaggagcaggccgacctgcgcggctacttccgcaagcacgtggatgtctcgcgctacgaccgcatcctgttcttcctccgcttcaagaaggaaatgcgccaggtccgtttcatccgcagcgtgcccaacctggtgatcctcgagcacgatgcctaccagaactacattccctgcaagtacaccggcaagttcagcgcccattaccggcgcctgccctgggcacgggtgatcagttcgggccatacggtcagcgaacgcctgcgccaggagggattcgacgcggtattcgtgcccaagggctacgaccagaccctgttgcatgacctcggcctggcgcgcgatatcgagctgggcttcgtcggcagtaccggcagcgtggcctacagtggacgcaaggcgctgctcgacgagttgggcggagtggagaacctgctggtgaccaagaccaagtccggcgaggagtacctgcgtacgctcaaccgcatccgtttcttcgtcagcgcggatgtcggcatgggcgaatacatgatcaagaatttcgaggcgatggcctgcggttgcgtactgctggcctacgaccagggcgagcgggaaaacgaggccttgggtttccgggacatggagaatatcgtgctgtatcgctcggtggcggacatccaggaaaagctcgcgatcctgcgcctcgatacggccctcgccgagcggatcgcgcgaagcggccaggcgctggccatcgaacgattcagcttcgccgctgtcggtcagagtatcgtcgaggccatgcggcccgcgttgcgcgagccggagcgtcccggatggctggagaagacctggcgacgtatttttacctga

SEQ ID NO: 339772 - DNA, 1419 bp, Pseudomonas aeruginosa
atgagcgcacgcaagcagcagttgctcaagcgtcatcgacgcaacaagcggatcggcctactggttgcgctgctggcattgctggccgtcggtctgctggtcagcccctggttgttgccgatcctcctcgtggccctgtgggtcgcccacgaagcctggttcgccgatcacctgttctattcgccgggcgaggactaccgctaccgtttcgcggaaggggtcgagtcgctgccggtacgcctggcggatggccgtctgcgagtcgacggcgagctgcgcgaaggcgatacgctggtgcttggcatcggcgtgcgcgctggctggctggggcgtttcctcgaaccctcggtactgctggaaggtggcgcggaggccgatgcccaggctttcgaacgtggggtgaacggcttgcgctacctgaacctgacgggactggccgggccgctgggcgagggccggattcgcctgcgcggccggcattgccggttggtcggcgaaccgaccctgtggcgtgcgcgccatcccgactaccgtgaccggcgggtgatggtcatcgctccgcatgccgacgacgccgagctggccgccttcggcctctacagccaggcacgcgaggcctggatcgtgaccctgaccgccggcgagatcgaaaccgagcattaccgccgcatgggcctcgacggaatagctgcggcgcgcctgaagggccgcctgcgcgcctgggatagccaggccgtgccggcgtggggtggggtgccggccgagcgctgcgtgcaactgggttatttctgcctgcaattgcctgccatgcaggcgaacccgggcgaggtggtgccgtcccgtgaggccgatctcgccgatatccgtccgttccgccagttcaaccgcctgcgcctggccagcgatgccgacggcctgtcgacctggaacaatctgctggccgatctccgcgagctgatcctgctggcacgtcccgaggtcatcgtcctgcctcatccgcatttcgatccgcacccggaccatgtccgcgcccaggaggccgtgcgcgaggcgctccagggtctggactggcagccgcaggcattgttgcactatgccaatcacctgcacgacaacgatcgctggccgatgggcgatgcgcacatgggggtcagcctgccgccgctgaccgaagaatgctcgccgttgctgccatggacgctggcgctggagcgcacgcgccaagtggacaaggccatggccttgggcatgatgcacgacctgcaacccaggccgccgttcaagcgccgtctgcgccgccgtctgcagggctggctcgccggtcgtcgctggccggcatacggcgaggacgagttcatgcgcaaggcggtgcgtcggcacgagttgttctgggtggagtcgctggatggggaggcgtga

SEQ ID NO: 339773 - DNA, 897 bp, Pseudomonas aeruginosa
atgctgaacaggttgcgcgccttccgcgaacgcggttggcgcgaagtggatgcgctgacctacgcccaggcctggcagcgtttcggcggcagcgtcgcgacccacccgctggtggtcgagcagctcgccgaaatggctggaatcccggtgcgttacctgggttgggagagcgctggcgaactggttgcggcgatcccgacctggggccgccacctggcgttgtccaaggacgtgctcaagcggcgcggcaagaagggcctgtacgacctgggcaacgccgaactgatcctgccggtggctggcgatgcccgcatcgccctccgccatgggggacgctacctgtcggtgctgcatgagcggaacatcgtcacgctgcgcccgcaggccgagcaactggctttcgctcgcgcccccgaggatttctccaagaagttccgctacaaccagcggcgcgaagtgcgcctggtggaggaggccggtggccaggtgcgccaggcagacagcttcgccccggccgagttcgccgccatctatctcgaactgttccagcgtcgctggggtttcccggccaccggcgcggagcgcatggccgaggtcttcgagcggctgcgcgaattgctgcgcggctcggtcctgctgctcaacgaccagcccatcgcggtccaggtactgtatcgcgccgaagcgccgggctggctcagcgtcgagtacatcaacggcggcgtcgatccgcagacccgcgagttcagccctggcagcgtgctcagttacctgaacacccaggccgcctgggaggatgcgcgagcgctgggcaaacccctgcgctattcgttcggtcgcgccgaccgcgaatacaaggatcgctggtgccatccttctccggtcttccaggtctga

SEQ ID NO: 339774 - DNA, 1137 bp, Pseudomonas aeruginosa
atgactcggtcggctgaacctcgcgtcctgcagttctgtcacggctacgacgggcctttcctcgactgtgcccgtcagtacgccagcctgttcgccggaaccccgtacaaggtcaccacggtgttcctcaccgggcgttccgatcctgaggtggcggcgcgttgcgcctccgacgaggtactgttcctcgagtacggctccagggacatccgtggcctcaagctgaaggcgatccgcgacttgcgcgagatcgcccgttcgcgcgacttccgcttctgcatcgcgcaccgcttcaagccgatctggatcgccagcctggccactcgtctgccgatcgttggcgtgcaccacgccttcggcgattaccagcggttgtcgcgcaaggtcttcgccggcctgatgagcaagcgcctgagcctgctggcggtgtccgacgcggtgcgcgacgatatccgccgttgcctgccgaagtggccggcggagcgggtcgagacgctctacaaccgcatcgacgtcgctgcgctgcaggccgagcaggtcgagcgcctgagtgcgcgccggcaactgcgcctgcccgacgaggcctgggtggtcggcaacgttggccgcctgcatccggacaaggaccaggctactctgctgcgcggcttcgccgccgcgctgccgcgcctgccacagaacagcctgctggcgatcctcggcagcggccgcctggaagagcagctcaaggacctggcctgcgaactgggcatcggcgagcgcgtgctgttcctcggccaggtcgaagaggcacggcgctacttcaaggcgttcgacgccttcgccctgagttccgaccacgagccgttcggcatggtcctgctggaggccatggtcgccggcgtaccgctgatcgccaccgcctgtggcggcgcccgcgaagtggtggagggggtcggcatcctcttcccgctgggcgacgagacggccctggccgagggtctgacccacctggcagcgctcgaccgccgccagcgcgaggcctgtgcgcggctcatgctcgagcgcctggagacacgcttctccgacgccgcggtgcgccgcgaattctggcgcctgccgacgattgccggcttcgcttcggagtctgcatgctga

SEQ ID NO: 339775 - DNA, 1758 bp, Pseudomonas aeruginosa
gtggcattgaccgtcctaggcctgtctggcgccgtaagccatgacccgtccgccgccctgtacatcgacggcaagctggtcgcggccgtcgaggaagagcgcttcgtgcgcgacaagcacgcgaagaaccgcatgccctacgaatcggcgaagttctgcctggagcaggcagggatcgagccggccgatgtcgacgtggtggcgattcccttcgctcccatcagcatcatggaaaaggcccgctggcactacgccaagcgctacgcctacgcgccggatcgcgcgctggatgcgatcctgctcggcaaccgccgctacaagcgttactacaagcgcatcgagtggtgcctgcaacaactcggcttcgacctgaagaaaatcaagatccagccggtcgagcaccaccttgcccacgcctccagcgcctaccattgctcggggttcaaggaaaagaccgcgatcctcggcatcgacggcaagggcgagtacgccaccactttcttcggctggggcgagaacggtcggatccacaagatcaaggagttctacgatccggattcgctgggcggcctgtacggcgcgatcaccgagtacctcggcttcgacatgctcgacggcgagttcaaggtcatgggcatggcgccctacggtgacgccagcaagtacgatttctcccgtctcgccaagttcgagaacggcgaactggtgatcaacaccgactatgccaacgtcatcggcttccgccgctacaaggagaaaggcaagggctactacttctcgcccaagctgatcgagtggctggggcccaagcgcgaaggcgatatcgccgacgatccctacatccattacgccgcgagcatccaggcgctgttcgagaagctcgcgctggagatgatggactactacctcggcgatatcatccgcgagaccggcaaggtcgctttcgccggcggctgcgcgctgaacgtcaagctcaaccagaagatcatctcccgccccgaagtgaaggagttgttcgtccagccggcggccagcgacgccggcaccgcggtcggcgcggcggcctacgtgtcgcaccagcgcggcgtgccggtggagaagatggagcacgtctacctcggcccggagtattccaacgaggacgtcatcgccgcctgcgcccgtcacgaggccaggccgcagtggcagaagatcgacaaccgcagccggcgtatcggcaggatccttgccgacggcaacccggtggcctggttccagggacgcatggagttcggtccgcgtgccctcggtggccgctccattctcggctgcccgagcgtgccgggcgtggccgaccggatcaatgcgcagatcaagttccgcgagcgctggcgacccttctgcccgtcgatgctggataccgtcggcccgcagatgttcaagatcgaccacccggccccgttcatgaccttcaccttcgaagtcaacgaagagtggaaggagcgagtgccggaagtggtgcacgaggacggcacctcccgcgcccaggtgctgaagcgcgagtacaacccgcgctactacgacctgatgaaggaactggagaacctcaccggcaacggcgtggccctgaacacttcgctcaatcgtcgtggcgaaccgatgatctgctcgccgaccgacgctctgaacatgttcttcggctccgatctgcagtacctgatcatggaggacatcctggtcgtgaaggagggcgtggactggtatgactcggtcggctga

SEQ ID NO: 339776 - DNA, 1479 bp, Pseudomonas aeruginosa
atgagactggccgaactgcaagccgccgggcgccacccgcaactgccattgcgggtgaccctggcggatggcgctggcgctgccgaattgcgcctggacagtctgctgcgggtgctgcccgggcagcgctacgtcggtgccggcgaatggcgtgggcgcaaggtgctggccaagctgctggtgggcggcaaggccgcacggcatttccagcgcgaactggaaggggcgcgtctgctcgcggcccaggggctgaccaccccggcgctgctggccgacgggctgcaggagggcgagggcggctggttgctgttcgactacctcgacgcggcgcagagcctcggtgacgcctggcgtgcggtggaggcacaggcgccgctgggcgatgcccagcaagcggtgctcggcgaagccctggcagccattggcgagctgcatgcaaagggcctctggcaggacgacctgcacctgggcaacctgttgcgccacgccggccgcctgtatctcatcgacggtggcggcgtgcgtgcggaaactcccggccagccgctgtcgcgacagaaagtgctggaaaacctcggggtgttcttcgcccagttgccggcgctcctcgatcctttcctggaggagttgctggtgcattacctgctggccaacggcgagcatgcgctgccgctcgaagccttgcagaaggaaatcgccaaggttcgccgctggcgggtgcgcgacctgctgaggaaggtcggtcgcgactgtagcctgttcagcgtcgtgcgcggtccgttccgcctgttcgccgcccgccgcagcgaggccgagacgatggcgcccctgctggcggacgcggaccgcctgatcgccgccggccacgtctacaaggacggcggcgcggccaccgtcgcccgggtcgaagcgaacggccgcacgctgatcatcaagcgctacaacatcaagggctgggtccattggctgaagcgcttctggcggccgagccgggcctgggcctcctggcgcgaaggcaaccgcctggaattcctcggcatcgccaccgcccgtccgctggcgatgctggagcggcgctggtgctggctgcgcgggcgcgcctacctgattaccgattatctcggcggtcaggatataatcgctcgttttaagccttgcctggacatgcccgatggcgccgtttcgccaccggaagccgagttggcggcactggatcggctgttttcgacgctgatccgcgaacgcatcagccacggcgacctgaagggacacaacctgttctggcaggcccatgaacaaggcggcgaatgggcgctgatcgacctggacgcgatgcgcaagcatcacagccaggtgtcctttgcccgcgcctacgcccgcgaccgcgcgcgcttcctgcgcaactggccgcaggacagcggcctctaccggctgctggagcaacggattccccgcctcggcgacgccgccggggcttga

SEQ ID NO: 339777 - DNA, 759 bp, Pseudomonas aeruginosa
atgagcgttttcatcgccgcgcaggaccacgacctgctccagcgcaaccgtctggacagcttcgacgccctgtgggccttgcagctggacgccgtggacgaaccgaataccgagcggggtggctggagcagcgtctaccgcctcgacctgggcgactccgcctactacctgaagcgccagagcaaccacctgacccgcagcctgcgccatccgctgggcgagccgaccttcgcccgcgagttccgcaacatcgagcgctaccgggcgctgggcattcccgccctgcaggcggcgttcttcgcccagcaggcggtcggcggagagcgccaggcgatcctcctgacccgtgccctggacggttggcaggacctggacacctggctggcgtcctggcacgacctggccgaagagcggcgccgggcgattctccgggcggttggcaggctggcgcgccagctgcacgcggccggacagatgcatggttgcttctatcccaagcatgtattcctccgcgagggggccgatggtgtcttcgaggcctgcctgatcgacctggagaagacccgcccgatctggttcggccgccgcgaccaggtcaaggacctggagccgatgctgcgccgcgccccggactggagcgaagcggacgtgcacgaattcatctccgcctatgtcgacgaacccctcgactcggccgaggtcgagcagtggtatcgccttctcgaccagcgccgtcggcgcaaggagtcgcgccgatga

SEQ ID NO: 339778 - DNA, 735 bp, Pseudomonas aeruginosa
atggcggggtggaccctcgaacccgattaccgtcacctggccgccgacttcggtagcctcgatagcgtgttcgccctggagggcgagcgcctgacccgcgacccgttgtccgaggtcatccgcatcgagcgcgacggcgtgcgttactacgtcaagcgctaccgcagcgccggcaagggcctgcgccgctacctggcgcgaccgcggatcaaggccgagtggcagaacctcaagcgcttcgagaagtggggcattcccaccgccgaagtggtcgcctgggggctggagcgcaaggccggcgccttccagcgcggcgccatgatcacccgcgagctgccgggcaccgaggacttgtcggtgctcgcctgcaaccgggatccgcgcctgaaggacccgcgctgggtggacggcgtcagccggcagatcgccaaggctacgcgcctgatgcacgaccagcatttcacccacaacgacctgaagtggcgcaacctgctggtggacgaccagccgctggtgtatttcatcgactgcccgaacggcgcgttctggtggagcttcatgctgcgctaccggatcaccaaggacctggcctgcctggacaaggtggccaagtaccacctgtcgcgcacccagcgcctgcgcttctacctgcaatatcgccgtcgccggcacctgaacgaatccgacaagaagcgtattcgccaggtggtggctttcttcgaggggcgcgaatga

SEQ ID NO: 339779 - DNA, 807 bp, Pseudomonas aeruginosa
atgaggctggtgctggaagagccgttcaagcgcctgtggagcgggcgcgatccgttcgaggcggtggaggcgctgcaaggcaaggtctaccgcgaactggaggggcgccgcaccctgcgcaccgaggtcgacgggcgcggctacttcgtcaagatccaccgtggcatcggctggggcgagatcgccaagaacctgctcaccgccaagctcccggtgctcggcgcgcgccaggagtggcaggccatccggcgcctgcacgaggccggcgtagcgaccatgaccgcggtcgcctacggcgagcgcggcagcgatccggcgcggcagcattccttcatcgtcaccgaggaactggcgccgaccgtggacctcgaggtgttctcccaggactggcgcgaacgtcctccaccgccgcggctcaagcgcgcgctggtcgaggcggtggcgcggatggtcggcgacatgcaccgtgccggagtcaaccatcgcgactgctacatctgtcatttcctgttgcacaccgacaagccggtgagcgcggacgatttccgcctctcggtgatcgacctgcaccgtgcccagacccgcgacgccacgccgaaacgctggcgtaacaaggatctggcggcattgtatttctctgcgctggacatcggactgacgcgtcgcgacaagctacgcttcctgcgcacctatttccgccggccgttgcgcgagatactgcgcgacgaggccggcctgctggcctggatggaacgcaaggcggaaaaactctacgaacgcaagcagcgttacggagacctgctctga

SEQ ID NO: 339780 - DNA, 1122 bp, Pseudomonas aeruginosa
atgaccctggcgttcatcctctacaaatacttccccttcggcggcctgcagcgtgacttcatgcgcatcgccctggaatgccagcggcgcgggcacgacatccgcgtctatacgctgatctgggagggcgacgtgccggacggcttcgaagtgctggtggccccggtgcgctcgatcttcaaccaccggcgcaacgagaagttcaccgcgtgggtccgcgccgacctggccaggcgcccggtgcagcgggtgatcggcttcaacaagatgcccggactggatgtctactacgccgccgacgcctgtttcgaggaaaaggcccagaccttgcgcaacccgctgtaccgccagtggggccgctaccgccacttcgccggctacgaacgggcagtgttcgacccggcctcgaagaccgagatcctgatgatctccgaggtgcagcagccgctcttcgtcaagcactacggcacccaggccgagcgtttccatctgctgccgccggggatcagccaggatcgccgggcgccggccaacgccgcggacgtgcgtgcggaattccgccgcgagttcggcctggaggaggacgacctgctgctggtgcagatcggttccggcttcaagaccaagggcctggatcgcagcctgaaggcgctggccgcgctgcccaaggcgttgcgcaggcgtacccggctgatcgccatcggccaggacgatcccaagccgttcctgctacagatcgccgccctcggtctcaacgaccaggtacagatcctcaaggggcgcagcgatatcccgcgcttcctgctcggcgccgacctgctgatccacccagcctacaacgagaacaccggtacggtgctgctggaggcgctggtctccggcctgccggtgttggtgaccgatgtctgtggctatgcccactacatcgccgaggccgacgccgggcgggtgctgccgagtccgttcgagcaggacagtctcaaccgcctgctcgcggaaatgctggagaacgctccggcgcgcgccgcctggtcgcgcaatggcctggcctacgccgatcacgccgacctctacagcatgccgcagcgcgccgccgacctgatcctcgaggaggcctcatga

SEQ ID NO: 339781 - DNA, 1068 bp, Pseudomonas aeruginosa
atgagggtactgctggtcaagacctcgtccctcggcgacgtgatccacaccctgccggcgcttaccgacgccgcccgggcgattcccggcatccagttcgactgggtggtggaggaaggtttcgccgagattcccgcctggcatccggcggtggcgcgggtgatcccggtggcgatccggcgctggcgcaagaacctctggcagaccctgcgcaacggcgaatggcggcgcttcaagcagcgcctgaaggaagtcgactatgacctggtgatcgacgcccaggggctgctgaagagtgcctggctgacccgctacgtgggcaagacgccggtcgccggtctcgatcgcgattcggcgcgcgagccgctcgccagccgcttctatcgccgtgcctatccggtcgcctggggacagcatgcggtggagcgcacgcgccagttgttcgcccaggcgctggactacccgttgcccgagtcggtcggtgactatggcctggaccgcgagcagttggccgacgccgaccctggagcgccgtacctggtgttcctgcacggtactacctgggtcaccaagcattggccggaagcctactggcgcgaactggccgagcgcatgtgcgagcgcggctggtcggtgcgcctgccctggggcagcgccgccgagcgggagcgggccgggcgcctggcggcggggttggaaaatgccgcggtactccccagattatccctggccggcatggccaaggtgcttgccggcgcgcgcgcctgcgtggcggtggataccggcctcggtcacctggcggcggcgctggacgtgccgacgctgtcgctgttcggcccgaccaatcctggcttcaccggcgcctacgggcgctcccaggtccacctgggcagcgacttcccctgtgcgccgtgcctgaagaagacctgtacctaccagccgaccgaagaggatcgcaaactgttcgatctcaagcgtgagcagccgctgtgcttcacccggctgaatccccagcgcgtggccacccagctggaggccatgctgctggccccggagaccctccgatga

SEQ ID NO: 339782 - DNA, 1038 bp, Pseudomonas aeruginosa
atgagaattctgatcgtaggtccctcctgggtgggggacatggtgatggcgcagaccctgttccagtgtctgcgccagcggcatcccgagtgcgtgatcgacgtgctggcgcccgaatggagccgaccgatcctcgagcgcatgcccgaggtgcgccaggccctgagcttcccgctcggccacggggtgatggacgtcgccacccggcgccggatcggacgcggcctgcgcggtcagtacgagcaggcgatcctgctgcccaactcgctgaagtcggcgctggtgccctggttcgccggaataccgaagcgcaccggctggcgcggcgagatgcgctacgggctgctcaatgacatccgcaagctcgacaagcagcgctatccgctgatgatcgaacgcttcatggccctggccttcgagccgggcgtggagttgccgaagccctatccgcagccgcgcctgcggatcgacgacggcagccgccaggcggcgctcgacaagttcgccctgagcctggaccgcccggtgctggcgctctgtcccggcgccgagttcggcgaggccaagcgctggccggcggaacactacgccgcggtcgccgaggcgaagatccgtgccggctggcaggtctggctgttcggctcgaagaacgaccatcccggtggagaggagattcgccagcgcctgattccggggttgcgcgaggagtccttcaatcttgccggggagacttcgctggccgaggccatcgacctgatgtcctgcgctggcgcggtggtgtccaacgattccggcctgatgcacgtggcggccgcgctggatcgcccgctggtgggcgtctatggctccacctcgccgcagttcaccccgccgctggcggaccgggtggagatcgtccgcctcggtctcgagtgcagcccgtgcttcgagcgcacctgtcgcttcggccactacaattgcctccgcgagctgccgcctggcctggtattgcaagccctggagcggctggtcggcgaccctgccgaggtcgccggatga

SEQ ID NO: 339783 - DNA, 924 bp, Pseudomonas aeruginosa
atgtcgatggccgatcgtgatggcgtgatctggtatgacggtgaactggtgcagtggcgcgacgcgaccacgcacgtgctgacccataccctgcactatggaatgggcgtgttcgagggcgtgcgcgcctacgacaccccgcagggcacggcgatcttccgcctgcaggcgcacactgaccggctgttcgactccgcgcacatcatgaacatgcagatcccgtacagccgcgacgagatcaacgaggcgacccgcgccgccgtgcgcgagaacaacctggaaagcgcctatatccgcccgatggtgttctacggaagcgaaggcatgggcctgcgcgccagcggcctgaaggtccatgtgatcatcgccgcctggagctggggcgcctacatgggcgaggaagccctgcagcaaggcatcaaggtgcgcaccagttccttcacccgccaccacgtcaacatctcgatgacccgcgccaagtccaacggtgcctacatcaactcgatgctggccctccaggaggcgatctccggcggcgccgacgaggccatgatgctcgatccggaaggctatgtggccgaaggctctggcgagaacatcttcatcatcaaggatggcgtgatctacaccccggaagtcaccgcctgcctgaacggcatcactcgtaacactatcctggccctggccgccgaacacggttttaaactggtcgagaagcgcatcacccgcgacgaggtgtacatcgccgacgaggccttcttcaccggcaccgccgcggaagtcacgccgatccgcgaagtggacgggcgcaagatcggcgccggccgccgtggcccggtcaccgaaaagctgcagaaagcctatttcgacctggtcagcggcaagaccgaggcccacgccgagtggcgtaccctggtcaagtaa

SEQ ID NO: 339784 - DNA, 2949 bp, Pseudomonas aeruginosa
atgagcctgccttcgctggcgaatctgccggccaccctgctgcccgccgccgaacgcgccgggactgccctccgctccgctgtcgccgccctcgatgccgccgccctggcccgcctggaggcctggcccgaggagcgcctggaggatttccgacgggtcgctgcggccagcgatttcgtcgccgagcaggcagtgcgcgacccggcgatgctgctggatctggccgaacgcggcgagctggagaacccccacgcgcccggcgaattgcgcagccagttgcaggcgcggctggaggattgcgccgacgaggacgaactcggtcggcgcctgcgacgtttccgcacacgccagcaactgcgcatcatctggcgcgacctgacccgccgcgccgcgctggcggaaacctgtcgcgacctgtcggccctggccgacgcctgcatcgacctggcttgcgagtggctccatcggcgccagtgcgagcagttcggcacgccgatcggccggcgctccggcgaaccgcagcggatggtggtcctcggcatgggcaagctgggcgcggtggagctcaacctgtcgtcggacatcgacctgatcttcggttacccggagggcggcgagaccgagggggcgaagcgttcgctggacaaccaggaattcttcacccgcctggggcagaagctgatcaaggcgctggatgcgatcaccgtcgacggcttcgtcttccgcgtcgacatgcgcctgcgtccctacggctccagcggaccgctggtctacagcttcgccgcgctggagcagtactaccaggaccaggggcgcgactgggagcgctacgcgatgatcaaggcgcgggtggtcggcggcgaccagcaggcaggcgagcaactgctcggcatgctgcggccgttcgtctatcggcgctacctggacttctccgccatcgaggcgctgcgcaccatgaagcagctgatccagcaggaggtccggcgcaaggggatgtcggaaaacatcaagctgggcgaaggcggtatccgcgaggtggagttcatcgcccaggccttccagttgatccatggcgggcgcgacctgagcttgcagcaacgaccgctgctgaaggtgctggcgaccctggaggggcagggctacctgccgccggcggtggtcgaggagctgcgcggcggctacgagttcctgcgctacgccgagcatgccatccaggcgctggccgaccggcagacgcaaatgctgcccagcgacgaatacgaccgcatccgcgtggccttcatcatgggcttcgccagttgggccgcattccacgagcgcctgagccactggcgggcgcgcatcgactggcacttccgccaggtgatcgccgacccggacgaggacgaaagcggcgaggcggcctgcggcagcgtcggcgccgagtggatcccgctgtgggaggaggcgctggacgaggagtcggccagccggcaactggccgacgccggcttcgtcgatgccgaggcggcctggaagcgtctcagcgatctgcgccacggcccccaggtgcgagcgatgcagcgtctcggccgggagcgcctggatgccttcgttccgcgcctgctggcgatgaccgtggaaaacccccagccggacctggtgctggagcgggtcctgccgctggtggaagcggtggcgcggcgttccgcctacctggtgttgctgaccgagaaccctggcgcgctggagcgcctgctgaccctctgcgcggccagcccgatggttgccgagcagatcgcgcggttcccgatcctgctcgacgaactgctcaacgaggggcgcctgttccgtcctccacaggccgccgagctggccgccgagctgcgcgaacggctgatgcggattcccgaggacgacctcgagcagcagatggagacccttcgtcacttcaagctggcccacgggctgcgggtggcggcctcggagatcgccggcacgctgccgttgatgaaggtcagcgactacctgacctggctggccgaggcgatcctcgtcgaggtcctcgaactggcctggcggcagttggtgcagcgtcacggccggccgttgcgcgccgacggcacgccgtgcgatccggacttcgtcatcgtcggctacggcaaggtcggcgggctggagttcggtcatggctcggacctcgacctggtgttcatccatgacggcgacccccactgcgagaccgatggcggcaaatccatcgatggcgcgcagttctttacccgcctggggcagaagatcatccatttcctcaccgcgcagacgccatccggcaccctctacgaggtcgacatgcgcctgcgtccgagcggcgcggccggcctgctggtgagttcgctgggcgccttccagcgctaccaggagcaggaggcctggacctgggagcaccaggcgttggtccgcgcccgggtgctggccggttgccggcgggtgcaggcgagcttcgaggcggtacgtgccgaggtgctggcgaggccgcgcgatctcgacgcgttgcgcaccgaagtcagcgaaatgcgcgccaagatgcgcgacaacctgggaacccgcgcgaccgccgccggcaccgcctcgaatgccttcgaggccacggcagccttcgatctcaagcacgatgccggtggtatcgtcgatatcgaatttatggtgcaatatgcggttctagcttggtccggagaacacccggcgctgctcgaattcaccgataacatccgcattctggaaggactggaacgggctggcctgatcgccagcgaggacgtccgtctcctgcaggaggcctacaaggcctatcgcgcagccgcacaccgcctggcactacagaaggaggccggggtcgtgagcggcgagcacttccagacggagcggcgagaagtgatcaggatctggcgcgagctgcggctcggctga

SEQ ID NO: 339785 - DNA, 2649 bp, Pseudomonas aeruginosa
atgcaagacctcgatcccgtcgaaacccaggaatggctggacgccctggagtccgtactcgaccgcgaaggtgaagaccgcgctcattacctgatgacccgcatgggcgagctggccagccgtagcggcacccaactgccctacgcgatcaccacgccctatcgcaacaccattccggtaacccacgaagcacgcatgcccggcgacctgttcatggagcgccggatccgctccctggtgcgctggaacgccctggcgatggtgatgcgggcgaacaagcacgacccggacctgggcggccacatctccaccttcgcctcctcggcgaccctctacgacatcggcttcaactatttcttccaggctcccaccgacgaacatggcggcgacctggtgttcttccagggccacgcgtcccccggcgtctacgcccgcgccttcctcgaaggccgcatcagcgaggaacaactggagaacttccgccaggaagtggacggcaacggcctgtcctcctatccgcacccctggctgatgccagacttctggcagttccccaccgtatccatgggccttggcccgatccaggcgatctaccaggcacgcttcatgaagtacctggaaagccgcggcttcatccccgccggcaagcagaaggtctggtgcttcatgggcgacggcgagtgcgacgagccggaatccctcggcgcgatctccctggccggccgcgagaaactcgacaacctgatcttcgtcatcaactgcaacctgcagcgcctcgacggcccggtccgcggcaacgccaagatcatccaggaactggaaggcgtgttccgcggcgccgagtggaacgtcaacaaggtcatctggggtcgcttctgggacccgctgttcgccaaggacaccgccggcctgctgcagcagcgcatggacgaggtcatcgacggcgaataccagaactacaaggcgaaagacggcgcctacgtgcgcgagcacttcttcggcgcgcgtccggaactcctggaaatggtcaaggacctttccgacgaggaaatctggaagctcaaccgcggcggccacgacccctacaaggtctatgcggcctaccaccaggcggtcaaccacaagggccagccgaccgtcatcctggccaagaccatcaagggctacggcaccggcagcggcgaagcgaagaacatcgcgcacaacgtgaagaaggtcgacgtcgacagcctgcgcgcgttccgcgacaagttcgacatcccggtcaaggacgccgacctggagaagctgccgttctacaagcctgaagaaggcagcgccgaggccaagtacctggccgagcgccgcgccgcgctgggcggcttcatgccggtgcgccggcagaagagcatgagcgtgccggttccgccgctggaaaccctgaaggccatgctcgacggctccggcgatcgcgagatctccaccaccatggccttcgtgcggatcatctcgcagctggtcaaggacaaggaactcggcccgcgcatcgtcccgatcgtcccggacgaggcccgtaccttcggcatggaaggcatgttccgccagctcggcatctactcctcggtcggccagctctacgagccggtggacaaggaccaggtgatgttctaccgcgaggacaagaagggccagatcctcgaggaaggcatcaacgaggccggcgccatgtccagctggattgccgccggtacctcctacagcacccacaaccagccgatgctgccgttctacatcttctattcgatgttcggcttccagcgcatcggcgacctggcctgggccgccggcgacagccgcgcgcacggcttcctgatcggcggcaccgccggtcgcaccacgctgaacggcgaaggcctgcagcacgaggacggccacagccacctgctggcctcgaccatcccgaactgccgcacctacgatccgacctacgcctacgaactggcggtgatcatccgcgaaggctcgcggcaaatgatcgaagagcagcaggacatcttctactacatcaccgtgatgaacgagaactacgtccagccggccatgccgaagggcgcagaggaaggcatcatcaagggcatgtacctcctcgaggaggacaagaaggaagccgctcaccacgtgcaactgctgggctccggcaccatcctgcgcgaagtcgaggaagcggccaagctgctgcgcaacgacttcggcatcggcgccgacgtctggagcgtgccgagcttcaacgagctgcgtcgcgacggccttgccgtcgagcgctggaaccgcctgcatccgggccagaagccgaagcagagctacgtcgaggagtgcctgggcggccgtcgcggcccggtgatcgcctccaccgactacatgaagctctacgccgagcagatccgccagtgggttccctccaaggagtacaaggtgctcggcaccgacggcttcggccgcagcgacagccgcaagaagctgcgcaacttcttcgaagtggatcgtcactgggtggtgctggccgcgctcgaagcgctggccgatcgcggcgatatcgagccgaaagtggtggccgaggccatcgccaagtacggtatcgatccggagaagcgcaacccgctggattgctaa

SEQ ID NO: 339786 - DNA, 1644 bp, Pseudomonas aeruginosa
gtgagcgaactcattcgcgtacccgacatcggcaacggtgagggtgaagtcatcgagctgctggtcaagcccggcgacaaggtcgaggccgatcagagcctgctgaccctggaatccgacaaggccagcatggaaatccccagtcccaaggccggggtagtgaaaagcatcaaggcgaaggtcggcgacaccttgaaagaaggtgacgaaatcctcgagctggaagtggaaggcggcgaacagcctgccgaagccaaggccgaggcagcgcccgcccaaccggaagcgccgaaagccgaagcgcctgctcccgccccgagcgagagcaagccggccgcccccgccgcagccagcgtccaggacatcaaggtcccggacatcggctcggccggcaaggccaacgtcatcgaagtgatggtcaaggccggcgacacggtcgaggccgaccagtcgctgatcaccctggaatccgacaaggccagcatggagatcccctcgccggcctccggcgtggtggaaagcgtctcgatcaaggtcggtgacgaagtcggcaccggcgacctgatcctcaagctgaaggtggaaggcgccgctccggcagccgaagagcagccggtagccgctccggcccaggccgcggcgcccgccgccgagcagaagcccgccgcggcggcccctgcgccagccaaggccgataccccggctccggtcggcgcacccagccgcgacggcgccaaggtccacgccggcccggcggtgcgcatgctggcgcgcgagttcggcgtcgagctgagcgaagtgaaagccagcggtcccaagggccgcatcctcaaggaagacgtccaggtcttcgtcaaggagcaactgcagcgcgccaagtccggcggtgccggcgccaccggcggagccggcatcccgccgatcccggaagtcgacttcagcaagttcggcgaagtggaagaagtggcgatgacccgcctgatgcaggtcggcgccgccaacctgcatcgcagctggctgaacgtgccgcacgtgacccagttcgaccagtcggacatcaccgacatggaagccttccgcgttgcccagaaggccgcggcggagaaggccggggtcaagctgaccgtactgccgatcctgctcaaggcctgcgcccacctgctcaaggaactgccggacttcaacagttcgctggcccccagcggcaaggcgctgattcgcaagaagtacgtacacatcggcttcgccgtggacactccggacggcctgctggtcccggtgatccgcgatgtcgaccggaagagcctcctgcaactggccgccgaggccgccgagctggccgacaaggcccgcaacaagaagctctcggccgatgccatgcagggcgcctgcttcaccatctccagtctcggccacatcggcggcaccggcttcacgccgatcgtcaacgcgccggaagtggcgatcctcggtgtgtccaaggcgaccatgcagccggtatgggacggcaaggccttccagccgcgcctgatgctgccgctgtcgctgtcctacgaccatcgcgtgatcaacggcgccgccgcggcgcgcttcaccaagcgcctgggcgagctgctggcggacatccgcaccctgctcctgtaa

SEQ ID NO: 339787 - DNA, 2700 bp, Pseudomonas aeruginosa
atgaaaagtcatcccgatgccgccagccgttcggcggccgaggttgtcacgcagctacccgtgccgtcgcggctcgggctgctgcgtttcgagcggctgaacgagccgagctgggcactgctgttcctcgatcctgcctgcgagcgccagctcgggctgccggcgactaccctctgcgcactgctcgatgcgccttacgccagcctgatggaacccgaggcccgccaccgcctgcacgagcagatccagcagcaactggtgaagcgcccgcactaccaggtgagctacaagctgcacacacccaacggcgtgctgaccatgctggagttcggcgaagccttccagcagcatggccgccagttgctgcacggctacctgatggtcgaggagcgacaggagagcgccgagcgcagcgaacagttgctcgacctggaatcgcagaacctgcgcctgaaggcgtccctggacctctaccagcgctcccaggacgaccacctgcaacacctgctgcgctcgcgcacccagcagaacctgatcgtccgcctggcccgccatcgctacctgtccagcgacccgctgctggaagccgcgcaactgatcacccaggccgcctgcgaagcctacggcaccgcgcgcgccggcatctggcgcctgctcgacgaccagcgcctggaagcggtgaccgtctaccgccgcgacctcgaccagtacgagaagccccagagcatcgacgccagccgctaccccgcctacctcgaggcggtacacagcgggcgcgccatcgacgcccacaacgcccagcgcgccccacgcacccaggaactctacaaggactacctgaagccgctgggcgtcaacgccctgctcgacgccaccatccgcatcggcggcgaggtggtcggcgtgctgtgcctggaacacgccggcgagaaccgcatgtggcagagcgacgagatcgccttcgccggggaactcgccgaccagtacgcgcaggtcctgatgaaccacgagcgacgcaatgtctccagcgccctgcacctgttccagcgcgcggtggaacagagcgccatcgccttcctgctgatcgaccgcgacggcgtggtggaatacgtcaatccgagcttcacctcgatcacccagtacagcgccgacgaagtgcgtaaccgacgcctgtccgagcttccggcgctggagaacctcagcgagctgctgttcgacgcgcgttccgcgctgacccagcagaacagctggcagggcgagttccgcagccgccgcaagaaccacgagccttactggggccagttgtcgctgtcgaaggtctacgacgatctcggcgagctgacccactacatcggcatctacgaagacatcacgcagaacaagctggcccagcagcacatcgagaaactcgcctaccgcgacaacctcaccggcctggccaaccggcactatttcatcggcgccctcgaggaacgcctggaaagcagcggcgaccgcccgctcagcctgctgctggtggacatcgacaacttcaagcggatcaatgacagcctcggccaccagaccggcgacaagctgctggtcagcctggcccggcgcttgcgcagttgcctcggcgacggcgccaccctggcgcgcttcgccagcaacgagttcgccgtgctgctcgacgacaccgcggtggaaaagggcgaaagcattgccgcgcaggtcctgcacatgctcgacaagccgctgttcgtcgacaaccagttgatcaacatcaccggctccatcggcctggccagcgccccgcagcacggctgcgacccgcagaccctgatgaagtacgccggcctggcgctgcacaaggccaaggccaacggcaagcaccaggtccaggtgttcaccgaggcgctgaccgccgaggccagctacaagctgttcgtcgagagcaacctgcgccgcgccctggcgcagaacgaactggcggtgcactaccagcccaagctgtgcctgcgcagcggccagttgctcggcctggaagccctgctgcgctggcagcatccggaaaaaggcatgatccgcccggaccgcttcatcagcgtggccgaggaaaccgggctgatcgtgccgatcggcaagtgggtgatccgcgaagcctgtcgccaggcccgcgagctggccgaggccgggctgggcgagctgcagatcgccatcaacctgtcgcccaagcagttcaccgacccggacctggtcggctcgatcgcggcgatcctccacgaagagaacatcccggccagccagctggaactggagctcaccgaaagcctgctgctggacgccaccgacgatacccgccagcaactcgaacgcctgaagagcctcggcctgaccctggcgatggacgacttcggcaccggctactcgtcactgagctacctgaagaaattccccatcgacgtgatcaagatcgaccgcagcttcatcaaggacatcccggacagccaggacgacatggaaatcacctcggcggtgatcgccatggcccacaacctcaagctcaaggtagtcgccgaaggcgtggagagcgccgagcaactggccttcctccggcgcaaccgctgcgacatcggccagggctacctgttcgaccggccgatccccagcgacctgctcaataccagcctgctgcgctatccctgccgcaccctgcactga

SEQ ID NO: 339788 - DNA, 648 bp, Pseudomonas aeruginosa
atggttctgcgttctgaaatcctcaccaagaaaagcgagctgcccacgccggaccaggccctgccgggtcgcgaaagcgccatgccggtgcccgaagcgcacttcgtcaacggccgcccgctgaccgcgccattccccgccggcctgcaacaggtgctgttcggcatgggctgcttctggggcgccgagcgtcgcctctggcagcaaccgggcgtctgggtgaccgcggtgggttatgccggcggctacacgccgaacccgacctacgacgaagtctgctccggcctgaccggccacagcgaggtcgtgctggtggtctacaacccgcaggagaccagcttcgaacagctgctcaaggtattctgggaagcccacgacccgacccagggcatgcgccagggcggcgacatcggcacccagtaccgctcggtgatctacaccttcgacgcggcccagaaggccgcggccatggccagccgggagagcttccaggccgaactggcgaaagccggctacgaccgcatcaccaccgagatcgccgacgtcccgcccttctactacgccgaggcctaccaccagcagtacctggcgaagaaccccaacggctactgcggcctgggcggcaccggggtgtgcctgccggcctga

SEQ ID NO: 339789 - DNA, 837 bp, Pseudomonas aeruginosa
atgaactatcgtcacgcttaccacgccggcaaccatgccgatgtcttcaagcacctggtgctggcgcggatcttcgccctgctggggcgcaaggacacgccgtacgcctacctggacagccattccggggtcggcctctacgacttgcagggtgacgaggccagccgcaccggcgagtgggagcagggcatcgcccgcctgtgggagcgcgaaggcctgcctgagcaactggacgattacctggacgtgatccgtcacctgaacccggacggctccctgcgctattacccgggctcgccggaactggcgcggcgcctgacccgcgcccaggaccgcgtgctgctcaacgaactgcatcccgaggacggccgcctgctcaaggccaacatggctggcgaacggcgggtcgccgtgcaccagggcgacggttggctgctgccgcgggcgttcctgccggcgccggaaaagcgcgcggtgctgctgatcgatccgccgttcgagcaggccgacgaattgcagcgttgtgtcgctgcgctcgacgaggcgatcgggcggatgcgccagacggtggtggtgatctggtatccgatcaaggacgagcgccagctcaagcgtttctaccaggccctggaacgtagcgtcgcgccgaagctgctgcgtgccgagctgcacgtgcatccgatcgacgacgccgagcgtttcaacggctccgggctggccatcgtcaatccgccgtggccgctggaggacgaactgcgcgacctgctgccctggctggccgaggtcatggcccagagccagggcggctggcgtctcgactggctggtggcggaatag

SEQ ID NO: 339790 - DNA, 1803 bp, Pseudomonas aeruginosa
atgtccgaaaccctgctcagttcccgcaacctggcgttcgagctgtacgaagtcctcgatgccgaagccctgacccagcgcccgcgcttcgccgaacatagccgcgaaaccttcgatgccgccctcggcaccgcgcggagcctggcggaaaagctgttcgccccgcacaaccgcaagggcgacgaacacgagccgctctatgagaatggctcagccacgctgattccggaagtgaagccggcagtggatgccttcctcgacgccggcttcctcaacgccacccgcagcttcgagcagggcggcatgcagttgccgaccctgctgtcgcaggcctgcttcgcccacttccaggcggccaacgtcggtagctcggcctatccgttcctgaccatgggtgccgccaacctgatcgagagcttcggcagcgaggagcagaagcagcgcttcctgcaaccgatgatcgagggccgcttcttcggcaccatggccctcaccgagccgcacgccggctcctccctctccgacatccgcacccgcgccgaaccggctgccgacggcagctatcggatcaagggcaacaagatcttcatctccggcggcgaccacccgctctccgagaacatcgtgcatatggtcctggccaagctgccggatgcaccgccgggggtgaaaggcatctcgctgttcatcgtgccgaagttcctggtcaacgccgacggcagcctagggccgcgcaacgacgtgatcctcgccggcctgttccacaagatgggttatcgcggcaccacctccaccgcgctgaacttcggcgacaacggcgcctgcgtcggctacctagtgggcaagccgcaccacggcctggcctacatgttccagatgatgaacgaggcgcgcatcggcgtcggcatgggcgcggtgatgcttggctatgccggttacctctattcgctggagtacgcccgcgaacgcccgcagggccgcctgccggacggcaaagacccgagcgcgccacaggtggcgatcatccgccacgccgacgtgcggcgcatgctgctgacccagaaggcctatgtcgaaggcgctttcgacctgggcctgtacgccgcgcgcctgttcgacgacagccagaccctggaggacgacgaacagcgccgccaggcccacgaactgctcgacctgctgaccccgatcgtcaagtcctggccctcggagttctgcctgaaggccaacgagctggcgatccagatcctcggcggccacggctacacccgcgaatacccggtggaacagtactaccgcgacaatcgcctgaacccgatccacgaaggcacccacggcatccagtccctcgacctgctgggacgcaaggtcgggcagaacaacggcgccggcctgcgccagctgacccgcctgatccaggacgcctgccggcgcgccgaagcccatccatccctggccgccctgcgccagccgctggaacggctggtggcgcggctgtccgaggtgaccctggcactgctcggcgacctgatgcagggccaggtcaaccagggcctggccaactcggcgctgtacctgaaggtgttcggccatgcggtgatcggctggcgctggctggagcaggcgatccgcgccgaggaagggctggctcgcggcgactgcgccgacgccgacttctatcgcggcaagttgcaggccgctcgctacttcctgacctgggaagtgcctggctgccaccacgaactggcgctgctggaggcccgcgacgacgtgtgttcgagcatgcaggaagaatggttctga

SEQ ID NO: 339791 - DNA, 1743 bp, Pseudomonas aeruginosa
ttggacgccgtcaccgtcaataatttcttcctgatcggggcggtgctggtcggcatgagcatcctcgtcagctcgctgtcctcccgcctgggcatcccgatcctggtgatcttcctcgccgtcggcatgatcgccggcaacgatggggtcggcggcatcgtcttcgacaactatccggtggcctacctggtgggcaacctggcgctcgccgtgatcctcctcgacggcggcctgcgcacccgcgtctccagcttccgcgtggcgctctggccggcattgtcgctggccaccctgggcgtgttggtgaccaccggcctgaccggcatcgcggcggcctggctgttcgacctgcactggatggaaggcctgctgatcggcgccatcgtcggctccaccgacgccgccgcggtgttctccctgctcggcggcaaaggtctcaacgagcgggtcaccgcgaccctggagatcgaatcgggcagcaacgacccgatggcggtattcctcaccgtgaccctgatcgagatgctcgccagcggccagaccggcctcagttggggcttcgtcctgcacctggtgcagcagttcggtctcggcgccctgctcggtctcggcggcggctggtttctgctgcaactgatcaaccgcatgcacctggccggcggcctctacccgctgctggtgatcagcggcggcctgctggtgttcgccctggccaacgccgtcggcggcagcggcatcctggccatctacctgtgcggcctgctcctcggcaaccggccgatccgcagccgccacggcatcctgcacatgctcgacggcatggcctggctggcgcagatcggcatgttcctggtcctcggcctgctggtcaccccccacgacctgtggccgatcgccctgccggcactggccctggcgctgtggatgatcctggtggcacgaccgctgtcggtactgatcggactgatcccgttccgcgccttccacgaccgcgagaaagccttcatcgcctgggtcggcctgcgcggcgcggtgccgatcatcctcgcggtgttcccgctgatggccggcctgccgaacgcccagctgttcttcaacgtggccttcttcatcgtcctggtctcgctgctggtgcagggcaccagcctgccctgggcggccaggctgctgcgggtggtggtgccgccggacccggcaccgatatcccgcgccggcctggagatccacccgaccagcgagtgggagctgttcgtctaccacctgaacaaggaaaagtggtgcatcggcgccgccctgcgcgagctgaagatgcccggcgggacccggatcgccgcgctgttccgcggcaccgaactgctccacccgtcgggcagcaccatcctcgaggccgacgacatcctctgcgtgatcggccacgaacacgacctgccggccctcggcaagctgttcagccaggcgcccgaccgcggcctcggcgcgcgcttcttcggcgacttcgtgctggaaggcgatgcccagctgtcggcggtggcctcgctctacggcctgaagctcgacggcatcgacggcgagcaagcgctgggccgcttcatcgcccacgagatcggcggcgaagcggtgatcggcgaccaggtggagtggaacggcctgacctggaccgtggccgccctggaaggcaaccgtatccgcaaggtcggcgtgaagtttccggaaggccgcccagggcccggacttttcctctga

SEQ ID NO: 339792 - DNA, 3357 bp, Pseudomonas aeruginosa
atgcctgccctccgctccctgatcgctactcttttcctcggcctctgccttgccagtccgccgctcctcgcccagtccgagccgccctcggccgaagccgtccagcaaagcctcgacaagctggccgaacgcaagctcgccgaagccgaccagaaggtcgtcaaggccagactcgaacagaccctcaagttcctcgccgcgcgcgacgaagcgctgcagagcctggaagacctgaaaaagcgcctgagcgacgcgccccggcagatcgaggataaccagcgcgaactggagcgcctgaagaagacccgcgaacgcccggtcagcgagcgctacagcggcgagagcgtggcccgcctggagatgctgctcaacgaccgcaccacccagcaggccgagtggcagaaggccctgggcgaggccaacagcctgtcgatcaccgccgagacccgcccggaacgagcccaggccggcatcagcagcatgcaggcacgaatcctggagatcggctcgctgctcaaggccggcaaggaaagcggcaaggcgatcaacgccgaccgtcgcggcgagctgctcgccgagcaggccgcgctgaccgtgcagagccagctgttgcgccaggagctggccggcaacaacctgctgcaggacctcggcaagagccagcacgatctgctcaccgagaagatctcgcgcctggaaaaggaaaccctcgacctgcaggcgctgatcagcgagaagcgccgcgagcagtcggaaaagaccgtcgccgagctgtccaaggaaggcgcccagggggccggcaccgacagcctgctgagccaggagaacgccaagaatctgcgtctctccgactacctgctgcgcgccaccgaccgcctcaacgtgctcacccggcgcaacctcgagaccaagcagcaactggacaacctgacccagtccaaccaggccctcgaggaacagatcaacgtcctgcgcggcagcctgctgctgtcgcgcatcctctacaagcagaaacaggcgctgccgaagatcaagaccgaccagagcctggccgacgagatcgccgacctgcgcctcggccagttcgaactgaaccaggaacgcgacaagctggcgaccccgcagcaatacctggacgacctgctcgcccagcagcccagcgagcaggtcacgccggaactgcgcaaggatctcgacaccctgctggcaacccgttccgagctgctcgaacggctcaaccacgaactcaacgcgctgctcaacgaagcgatcaccttgcagttgaaccagaagcagttgctttccaccagcgagagcctgcgcaccaccctcgacgagcagatgttctggattcccagcaaccagccgctcgacctgtcctggttcaagatgaccccgaccctgctgaagaaccagctcaccgagatcccctggggctccggggtgcgtgaactgggcgaaggcctggtcgatcggccgctgctgttcttgccgctgttcctgctgatcgccgcgctgctgtggaaacgccgctacctgtacgacaagctggcggagctgaacgacgacatcggccacttcaagcgcgacagccagctgcataccccgctggcgatcctgatcaccatcctcctcgccctgcccggcaccctgaccttcgccgtcgccggcctggccctgctgctggacgcccgcggccagaacgccaccctcggcagcgccctgctggaaatggctcaggtctggctgctgttctacaccgcccatcgcatcctcaccccgggcggcatcgccgagcggcatttccactggagccgcgaacaggtcggcttcctcgacaggcacctggtccgcctcggcgttgtggtcctggcgctggtcggcgtggtgacggtggccgagcaccagccggcgagcctggccgacgacgtgatcggcatcgccgtggtcctgctcggctacgcggccatggcctggctgctcagccgcctgctgttcagcagccccggcgacgagcgtccgtcgctgatcaagatgatcgtcggcctcctcttcaccgcgctgccgctggtgctcttcgtcgcggtctgcttcggctactactacacctcgctgaagctcaccgaccgtctcatcgataccctctacctgctgctgctctggttcgtcatcgaagccgccttcgtccgcggcctgggcgtggcggcccggcgcctggcctacgcccgggccctggcgaaacggcagaacgcggcgaaggaaggcgtcgacggcgagaccaacgtcgaggagccgaccctcggcatcgagcagatcaaccagcaatcgctgcggctgatccgcctggccctgctgatcggcttcatcgtctgcctgtactgggtctgggccgacctgatcagcgtgatctcctacctcgacaacgtcaccctgtaccagtacaccgccggcaccggcgaagcggccaccagcgtgccgatcagcctgcgcgacttcctcgcggcgctggccatcgcggtggtcaccgtggccctggcgcgcaacctgcccggcctgctggaggtattggtgctacagcgcctgaccctggcccagggcagcgcctacgccaccaccaccctgctttcctatgccatcagcggcatcggcatcgtcagcgccctgtccaccctcggggtcagctgggacaagctgcaatggctggtggcggcgctctcggtaggcctcggcttcggcctgcaggcgatcttctccaacttcgtctccggcctgatcatccttttcgagcgtccggtgcgaatcggcgacgtggtgaccatcggcaacctgtccggcacggtcagtcggatccgcatccgcgccaccaccatcaccgatttcgaccgcaaggagatcatcgtcccgaaccagaccttcatcaccgggcagttggtgaactggtcgctgagcgataccgtgacccgggtcaccatcaagatcggcctggcctacgagaccgacctgccgctggcgcgcaagctgatgatgcaggcggtcaaggaaaacccgcgggtactgcgcgacccggagccgctgctgtacttcctgaccatcagcgccagcaccttcgactacgagctgcgcttccacgtccgcgaactgggcgaccgcaacccctctaccgacgagatcctgacgaagatcgctaccagcttccgcgaacacaagatcgacatggctttcaaccaggtcgatgtgttcgtcaagaacctccagggccagcaggtccagctgttcgtcggcgagccgcagcacagcggcgtcggcaatccgcccgcgctcaagggccaggacggtcccgccgaaccgacccgctga

SEQ ID NO: 339793 - DNA, 1461 bp, Pseudomonas aeruginosa
ttgaaatcactcgacgacctcgacttcgacaaccgcttcgcccgcctgggcgacgccttctccaccgaagtcctgcccgaccccatcgccgagccgcgcctggtggtagccagccccgccgccctggcgctgctcgacctgccagcggaaaccagtgacgaagcgctgttcgccgagctgttcggcgggcacaagctgtggtcggaggccgagccgcgggcgatggtgtattccggccaccagttcggctcctataacccgcgcctgggcgacggccgcggcctgctgctcggcgaggtgatcaaccaggccggcgagcactgggacctgcacctcaagggcgccggccagaccccctactcgcggatgggcgacgggcgcgccgtgctgcgctcgtcgatccgcgagttcctcgcctccgaagcccttccggcactgggcattcccagcagccgggcgctctgcgtgatcggttcgagcacgccggtctggcgcgagaagaaggaaagcgcggcgacgctgctgcgcctggcgcccagccacgtgcgcttcggtcacttcgaatacttctactacacccgccagcacgaccagttgaaacagttggcggcgttcgtcctggaacaccacttcgccgactgcaacgcagccgagcggccgtacgcggcgatgttccgccaggtcgtcgagcgcaacgccgaactcatcgcccgctggcaggcctatggcttctgccacggggtgatgaacaccgacaacatgtcgatcctcggcattacctttgactacgggccctacgccttcctcgacgatttcgacgccaatcacatctgcaatcactccgacgacgccggccgctactccttcagcaaccaggtaccgatcgcccattggaacctggccgccctggcccaggcgctgacgccactggtggaagtggacgaactgcgcgccagcctcgacctgttcctgcccctctaccaggcccactacctcgacctgatgcgccggcgcctgggcctgggcgtcgccgcggagaacgaccaggccctggtccaggaactgttgcagcgcatgcagggcagcgcggtggattactcgctgttcttccgccgactcggcgaggagactccggagcgggcgctggccagcctgcgcgacgacttcgtcgaccgcgaggccttcgaccgctgggccgaggcctaccgccggcgcgtcgaggaagaaggcggagaccaggagtcgcggcgccggcgcatgcacgcggtcaatccgctctatgtgctacgcaactacctggcacagcaggctatcgaagcggccgagcagggcgactacacggaagtccgcttgctgcaccaggtgctgagtcgcccgttcgaggaacagccgggcatggagcgcttcactcggcgcccaccggactgggggcggcacctggaaatcagttgctcctcctga

SEQ ID NO: 339794 - DNA, 975 bp, Pseudomonas aeruginosa
atgaagatacgcgacctcgatctcagccagagttcgatcaacaccgaacaccaggcgctaggtctgcctcctgtcgaagatttcgtcacccatccggacgaccacccggtactgcgcgccgccatgtgggcggcggtgctgatcctggtcggcctgctcgccttcctggcctggcgcctgttcttcgacaacggcggcagcaacggcttcgagatcatcgagcaggccctgaccagccggggtttctggagcgcggtggcggtgggcttcttcgcccaggtgatcgacggtgcgctgggcatggcctatggcatcaccgcgactaccttcctgctcagcgctggtgccacgccggccgctgccagcgccagcgtgcacatcgccgaagtgttcaccaccggcttttccgggatttcccacgtcaagctcggcaacgtcaacaagtcactcttcctccgcctgctgctgccgggaatgatcggcgcggtgctcggcgccgtgctgatcacccgcttcgacggccaccagctcaagcccttcatctccgcctacctgctgctgatgggcctgtacatcctgagcaaggcctaccgccacgtgatcaagcgccgggcaccgcgccacgtggccaagctggcactcttcggcggcttcgtcgatgctgccggcggcggcggctggggcccggtggtcaccagcagcctgatcggctcgggtagcgacccgcgcaccaccatcggctcggtgaacttcgccgagttcttcctgaccatcgccagcgccacctccttcatcctcctcgctggccagccggacacctggaagatggtcgccgggctggtcttcggcggcctgttcgccgcaccgttcgccgccctgctgtgcaagaagctttcgccgcgcaccctgctggtcatcgtcggcaccctgatcaccctgatcagcgcctacaacatctacatcggcctgcgctga

SEQ ID NO: 339795 - DNA, 1278 bp, Pseudomonas aeruginosa
atgaaactggaaaccctggccgtccacgccggctacagccctgacccgaccacccgcgcggtggcggtgccgatctaccagaccacctcctacgctttcgacgacacccagcatggcgccgacctgttcgacctgaaggtaccgggcaacatctacacacggatcatgaaccccaccaacgacgtactggaacagcgcgtcgcggcgctggaaggcggggtcggggcgctggcggtggcctcggggatggcggccatcacctacgcgatccagaccgtcgccgaggccggcgacaacatcgtctcggtggccaagctctacggcggcacctacaacctgctggcccacaccctgccacgcatcggcatccaggcgcgcttcgccgcccacgacgacatcgccgccctggaagcgctgatcgacgagcggaccaaggccgtgttctgcgaaaccatcggcaacccggcgggcaacatcatcgacctgcaggcactggccgacgccgctcaccgccacggcgtaccgctgatcgtcgacaacacggtagccaccccagtgctctgccggccgttcgagcacggtgccgacatcatcgtgcactcgctgaccaagtacatgggcggccacggcaccagcatcggcgggatcgtggtcgactccggcagattcgactgggcggcgaacaagtcgcgcttcccgctgctgaacacgcccgatccgtcctaccacggcgtcacctacaccgaggtcttcggacccgccgccttcatcggccgctgccgggtggtaccgctgcgcaacatgggcgcggcgctctcgccgttcaacgccttcctcatcctccaaggcctggagaccctggcgctgcgcatggagcgccactgcgacaacgccctcgccgtggcccgctacctgcagcagcatccgcaggtggcctgggtgaaatacgccggcctcgccgacaaccccgagcacgccctggcccggcgctacctggggggccgcccggcggcgatcctgtctttcggcatccagggcggcagcgccgccggcgcgcgcttcatcgacgccttgaagctggtggtgcggctggtcaacatcggcgacgccaagtccctggcctgccacccggcgagcaccacccaccgccagttgaacgcggaggaactggcccgcgccggagtctccgacgacatggtgcggctgtcgatcggcatcgagcacatcgacgacatcctcgccgacctcgaccaggccctggccgccgccgcacgctga

SEQ ID NO: 339796 - DNA, 453 bp, Pseudomonas aeruginosa
atgccactgcccaccgaactcgccaggcacctgaccgaagaaaagatcgccttcgtccagcgcagcggactcagggcggaagtcctcgaacccggctacgtgcgcctgcgcatgccgggcgccggcaacgagaaccacatcggcagcatgtacgccggggcgctcttcaccctcgccgaacttcccggtggcgcgctgttcctgaccagcttcgacagcgcccgcttctatcccatcgtcaaggagatgaccttgcgcttccgccgtccggccaagggcgacatacgcgtcgaggcacgcctggatgccgagcgcatccgccaactggaaaccgaggccggggagcgcggcaaggccgaatacagcctcgaactgcaactcaccgacgagcagggcgaggtagtggcggaaagcgccgcgctgtaccagctacgcagccacgcgcgaccctga

SEQ ID NO: 339797 - DNA, 816 bp, Pseudomonas aeruginosa
atgatccgccacctcctggtcgcccacgacctcaccccggaagccgacgtcgccctcgcccgcgccgcccagttggcccgccagcacgatgcgcgggtcagtctgctgcacgtgtacgacccggggctatcggcgtcggcggtgaagaccgtcagcgccatgctgcaactcaagcgcaaggaggccggcctcgacgaggacagcgccatccacctgttcaggggccagccgatcgacggcatcctgcagcagacccgggcgctcgaaccggacctgctgctgatgggcgcacaccaccagaagaccttcgaacgcttcggcaacaccaccctcgaccaagtggtgcggcgcagccgggtgccggtgctgctcgccgtgcgcgaggcggacgaaccctaccgccaggcgctcagcgccctggacttttcccagtgcgcctgtaccgcgctgcgccaggcctaccgcctgctgccggtggaagccgacctgcacgccctgcacgtgttcgagtcccccgacgacggcgtgctcggcctgccccggcagaatgccgcgcacctagccacccaggccgggctgatcgaacaattgctgagcgacgagcaggagcgcctgccgggcgtcgggccgcagctgagccacgaagtggttcccggcgtgctgccgtacagcctggacgccgcgttgaagcagcgccagccggagctgctcgccctcggccggcacagccgaaacgcgctgatgcaggcgctgctcggcaacctggcgcagcgttacctgcgccagccgagctgcgacgtcctggttacctcgtag

SEQ ID NO: 339798 - DNA, 768 bp, Pseudomonas aeruginosa
atgcggcgcgtggtgttcaatcagaaaggcggggtaggcaagtccagcatcgcctgcaacctggcggcggtcagcgcggcggagggctatcgcaccctgctggtggacctggacgcccaggccaactccacgcactacctgaccggactgaccggcgaggacctgccggtggggatcgccgacttcttcaagcagaccttgtcttccgggcccttcagcaagaagggcagggtcgagatctacgagacgccgttcgacaacctgcacatcgtcacctccagccccgaactggccgacctgcagccgaagctggagtcgaagcacaagatcaacaagctgcgcaaattgctggacgaactggacgaagactacgaccggatctacctggataccccgccggcactgaatttctacacggtatctgcgctgatcgctgccgatcgctgcctgattcccttcgattgcgacagcttctcccgccaggcgctgtatggccttctccaggagatcgaggaactgcgcgacgaccacaacgaagacctgcaggtcgagggcatcgtggtcaaccagttccagccgcgcgccagcctgccgcagcaactgctcgacgagctggtggcggaggaactgccggtgctgccggtgtacctgatgagttcggtgaagatgcgcgagtcgcaccaggcttgcaccccgctgatcttcctcgaaccgcggcacaagctgacccagcagttcgtcgagttgcacgggctgctcgaaagctga

SEQ ID NO: 339799 - DNA, 906 bp, Pseudomonas aeruginosa
gtggaactcaggcacctgcgctatttcatcgccgtcgccgaggagctgcacttcggccgcgccgccgagcgcctggggatctcccagccgccgttgagccagcagatccaggcgctggaggaggaaatcggtgcgcgcctgttcgagcgcaccaaccgccgcgtcgaactcaccgacgccggccggctgttcctcgacgagtcccgccaggtgctggcccaggtagacaaggcggtgctgctggcgcgtcgcgcccacctgggggaactgggcgagctgaagatcggtttcacttcctcggcacccttcacctcgaccatacccagcagcatccatgccttccgcaaggcctatccggacgtacacctcgacctgcaggaaatgagcagccgccaggtactcaaggcgctgctcgaggaaagcctgcaggtgggcgtgatccgcccgctggcgctgccggatgcggtgcattgggtggagttgttccgcgaaccgctggtggcggtgctgcgggccgaccatccgctggcggccggcagcgaggatggcctggccatcgccgccctggccgaggagcccttcgtgttcttcccgcgcagctacggcaccgggctctacgaccaggtcatcgccctgacccgacaggccggcttcagcccgcgcatcgcccaggaggccagcgaggcgatgaccatcatcggcctggtctcggccggactgggggtgtcgatcctgccggcgtcgttccgccgcacccgggtcgacggcgtggtctaccgcaccctgagcgatcccgaggcgacgactgcggtatggctggtccgccggcagaacgagggctcgccgctggcgctgtccttcatcgacctggtgacccgcgaggcggccagcctgcgccggcgctga

SEQ ID NO: 339800 - DNA, 1317 bp, Pseudomonas aeruginosa
gtgagcaatccgcaagtccggccacaggccgaagaagaacccgcgttaatcgaggcggcccgcgaagcagccaacgaggtgctggaagccgccaccgaagtcgaacgctatatcgaaaaaggcaccccgcagttcatgcgcacctcgctggcgctgttctccggcggtttcgccacctttgccctgctctactgcatccagccgatgatgccggtgctgtccaaggcgttttccatcagcgccgcggaaagcagcctggcattgtccgtcgccaccgccatgctcgcccttggcctgctggtcaccggcccgatctccgacgcgatcggccgcaagccggtgatggtcgtctcgctgctggccgccgcgctgttcaccctcggcagcgcggtgatgcccacctggcatggcgtgctgctgatgcgcgcgctggtcgggctgtccttgagcggcctggccgcggtggcgatgacctatctcagcgaagagatccatccgcagcacatcggcttgtcgatgggcctgtacatcggcggcaacgccatcggcgggatgagcggacgcctgatcagcggcgtcctggtcgatttcatctcctggcatgccgcactggcggtcctcggcggcctggccctggtcgccgcgctggtgttctggcgcgtgctgcccgagtcgaaacacttccggccggcaccgctgaagccggcgaccctgctcaacggctaccgcttgcacttccgcgacgccggactgccctggctgttcctgatcggcttcctgctgatgggcagcttcgtcaccctgttcaactacatcggctaccgcctgctggccgagccctaccacatgagccaggcggtggtcggcgtgctctcggtggtttacctctcgggcatctacagctcggcctgggtcggttcgctggccgacaagctggggcgacgcaaggtgctctgggcggtcatcctgctgatgctcggcggcctgctgctgaccctgttcgagccgatcccgctgatgctcgccggcctgttgctgttcaccttcggcttcttcggcgcgcactcggtggcgagcagctggatcgggcgccgcgccctgcgcgccaagggccaggcctcgtcgctctacctgttcagctactacgtcggctcgagcctggccggcaccctcggcggggtgttctggcattactacggctggaacggcatcggactgttcatcggctcgctgctggtggtcgcggtattggtctcgctgcacctggcgcgcctgccggccctgcctggcaacactctggcgcaggccgcccactga

SEQ ID NO: 339801 - DNA, 930 bp, Pseudomonas aeruginosa
atgcatccctgggtacgacgcaacattccgcaactggccgggcgcctggcgctggtcaccggcgccaacagcggcctgggttggcaggcggcgcgcacgctggccggcaaaggggcgaccgtggtgatggcctgccgcaatcgcgaacaggcggagcgggcgcggcgggcgatcctcgacgagtatccccaggcacgcctggagctggccgatctcgacctggccgacctcgcctcgatccgcgcctgcgccgccggtttccgccagcgccacgaacgcctcgatctcttgttcaacaacgccggagtgatgttcctgcccctgcggcgtacccgcgacggtttcgagatgcagatgggcaccaatcaccttggccacttcgcgcttacgggactgctgctggactcgttgctggccgctccacggcccagggtggtgggcatgaccagcggtttcaaccagttcggccggctgccgctcgacgacctcaacgccgagcgcggctacaaccgctatctcgcctattgccacagcaagcaggccaatctgctgttcagcctggagttgcagcgccgcgccggccagcggggcgtgcttctgcagagcctggcggcgcatccgggctacgcggcgaccaacctgcagtacgcggcgccggcgatgtctggttcgcgcctgggacgctgggcgatgaaggtggccaacggagcgttcgcgcaatcggctgagatgggggcgctgccggcactttccgcgctgaccgaacagcgctggtatggcggcgcctatgtcggcccagatcgctggctggaaacccgcggttatccggcggcggcgcggattccgcggaatgcgcgcgacctggggctggccgcgcggctgtgggcgctatcggaagaactgaccggagtacgcttctggtcggagtga

SEQ ID NO: 339802 - DNA, 1074 bp, Pseudomonas aeruginosa
atgagccgccgcacggactccgacgcaccgaccatcaccgccgcctatccgcgcctgctgctcggcctgctggaggaacgcggcctggacggacgcgcgctgctgcgggaaatcggtctgtcgacgctgcgactggaagagccggaagcacgcgtaacatcgcagcagtaccaggcgatcgccgccacggcgctcgcgctgagcggcgaccccggcctgggcgcacagctcgccttgcgcacgcctcccaccgcccatggcagcctgggctacgcgatgatggcctcggcgacgctcggcgatgccttgtgcctggcgctgcgctacatgccgctgctgcagggcaacgtcgaaatcagcctgctgcgcgaggacgagcaggtgatcctgcgcctgctgccaggccctgcgctcccgccggcgctgcaccggtacttcagcgaagccctgctgatcggcctgtatcgctccggcgcctggctgctcggcgaaccggccctggccggcaggctcgacttcgactatcccgaacctgccgtgcctgtgccgctgccgcagtgccgctacgaccaggcccacgtccaactggtgttccccgccatcctgctcgcccgctcgctaccgatggccgatccggctgcattgcgccgcgcccgcgaacactgcgaacgcgaactggcgctgctcgatgccggccgccgggacatctgcgcccgcgtgcggctggagctggaacggcaggaacagcgtttccccaacctggaggaagtagccacgcgcctgcacctgtccagccgcagcctcaagcggcatctgcatgacgccggcaccagctttcgccagttgctcggccaggctcgccagcgccaggccttgcgattgctgcggcgtcccgaggtgtcgttgcagcgtatcgccctgtacctgggctacagcgatccaaccaacttcacccgcgccttcaagcgctggaccggcgagccgccgagcgacacccgcgcccgcctgctgggcgggcaaccagtttcacgaacaaatgccaagcgctcgacaaatccctcgcgtttcccttga

SEQ ID NO: 339803 - DNA, 981 bp, Pseudomonas aeruginosa
atgaaaccagcgatcaagcgcgcctgcctgctcggcacggcactgttctccctctgcgccagcgcagcccaggcggccggcgttctggtaggaacctgggacctgcggggcaacggccagctcgccgcggtctaccgcgacggcgccaacctgcaggtggtggaaggcggcagcacccgcaactacagcttcggcaacgtggtctggtcggtcttcggcgccaccgataccgacggccagcccggcgcggaaatcctggtcaaggccggtcccgacctggtgatcgtctcccacgccagcaccacccagcgcaagtacccggtaggcaacgtctcctgggcgatcatgcgtgccaccgacgtcgacaacgtcgccggcgacgaagtcatcctcagcatcggcaacggcgtgcgcaccgtattcgatcgcacccgtacgcaacgcgacgccaccttcagctacaacggcacctggggcctgttcgacgtcgccgacgtggacggcgcgccgggcaaggaactggtgctgaacatgggcaacggcgtcaaggtcatcgacccgcgcaccagtggcgccaaggacttcaccttcagcggctaccacgcgctcgcacagatcgccgacctcgacggccagcccggcgcggagatcatcggccgcaccagcaccggcatctacgtgatcagcaacgccacttcccgcaaggaatacagcatcggcgccagcgcctgggcactctatggcggcaccgcggacaccgacggcaagccgggcaacgagctgatcgtggtgatgcagggcaaggtgcgggtcatccaccacgccagcggcgccagcaacgactaccgcatcggcgacgtcaactacagcatcgattcggtggccgacatggatggccagccgggcgcggaaatcctcgtgcgcgacgccaacggcaagctgttcgtgatcaacgaccgcaccggcaaggtaagcagttga

SEQ ID NO: 339804 - DNA, 1068 bp, Pseudomonas aeruginosa
atgactgccctgaagaacgaccgcttcctccgtgccctgctcaagcagcccgtcgatgtcacccccgtctggatgatgcgccaggccggtcgttacctgccggaataccgtgccacccgtgccaaggccggcgatttcatgagcctgtgcatgaacccggagctggcctgcgaagtgaccctgcagccgctggaccgttacccgcagctggacgccgcgatcctcttctccgacatcctgaccattcccgatgccatgggccagggcctgtacttcgagaccggcgaaggcccgcgcttccgcaaggtggtctcgtcgctggccgacatcgaggcgctgccggttcccgatccggaacaggacctgggctatgtgatggacgccgtgcgcaccatccgccgcgagctgaacggccgcgtaccgctgatcggcttctccggcagcccctggaccctcgccacctacatggtcgagggcggctcgagcaaggacttccgcaaatccaaggcgatgctctacgacaacccgaaggccatgcacgctctgctggacaagctggcgcaatcggtgaccagctacctcaacgggcagatccgcgccggcgcccaggcggtgcagatcttcgactcatggggcggcagcctgtcggcggcggcctaccaggagttctccctgacctacatgcgcaagatcgtcgatggattgatccgcgagcacgacggacgccgggtgccggtgatcctcttcaccaagggaggcggcctgtggctggagtcgatggccgaggtcggcgccgaggcgctgggcctggactggacctgcgacatcggcagcgcccgggcccgtgtcggtgagcgtgtagccctgcaaggcaacatggatccctcggtgctctacgccaatccggcggcgatacgcgccgaagtcgcgcggatcctggcggcctacggcaagggtacggggcatgtgttcaatctcggccacggcatcaccccggaagtcgacccggcccatgccggcgccttcttcgaggcggtgcacgagctgtcggcgcagtaccacggctga

SEQ ID NO: 339805 - DNA, 1434 bp, Pseudomonas aeruginosa
atgtctgaacgtctgaattccgaccgcctgaacaacgacttccagttcatcgaagtcgggcgcaaggacccgaagaagaagctgctgcgccagcgcaagcgcgagttcgtggagatccacgacctgttcaagccgcagcaggccgccgaccaggcccaccgctgcctgggctgcggcaacccctactgcgagtggaagtgcccggtgcacaacttcatcccgaactggctgaagctggtttccgaaggcaacatcctggccgccgccgaactgtcgcaccagaccaacaccctgccggaagtctgcggccgggtctgcccgcaggaccgcctctgcgagggtgcctgtaccctcaacgacggctttggcgcggtgaccatcggctcggtggagaaatacatcaccgatacggccttcgccatgggctggcgcccggacctgtccaaggtcaagccgaccggcaggcgcgtcgcggtgatcggtgccggcccggccggcctcggctgcgccgacgtgctggtgcgcaacggcgtgaccccggtggtgttcgaccgcaacccggagatcggcggcctgctgaccttcggcattcccgagttcaagctggagaagcacgtcctcagccgtcgccgcgaggtgttcaccggcatgggcatcgagttccgcctgaacaccgagatcggcaaggacgtgaccatggagcagttgctcgatgagtacgatgccgtgttcatggggatgggcacctacacctacatgaagggtggtttccccggcgaggacctgccgggcgtacacgacgccctggacttcctgatcgccaacgtgaaccgcaacctcggcttcgagaagtcggccgaggacttcgtcgacatgaagggcaagcgcgtggtggtcctgggcggcggcgacaccgcgatggactgcaaccgcacttcgatccgccagggcgccaagtcggtgacctgtgcctatcgccgtgacgaagaaaacatgccgggctcgcgcaaggaagtgaagaacgccaaggaagagggcgtgaagttcctcttcaaccgccagcccatcgccatcgtcggcgaggaccgggtggaaggcgtgaaggtggtcgagacccgtctcggcgagccggacgcccgcggacgccgcagccccgaaccgatccccggttccgaggagatcatcccggcggaagccgtgctgatcgccttcggcttccggccgagtccggcgccgtggttcgagcgcttcgagatcgccaccgacagccagggccgcgtggtggctccggcgcaggcgcagttcaagcaccagaccagcaacccgaagatcttcgccggtggcgacatggtccgtggttccgacctggtggtgacggcgatcttcgaaggacgtaccgcggccgaaggcatcctcgactaccttggcgtctga

SEQ ID NO: 339806 - DNA, 4446 bp, Pseudomonas aeruginosa
atgaaagcaggtctgtaccatcctgaaacgttcaaggataactgcggatttggcctgatcgcccatatgcagggcgagccgagccatcaacttctgcaaaccgcaatcgaagcactgacctgcatgacccaccgcggtgggatcaatgccgatggcaagaccggggacggctgcgggttgctgatccagaagcccgacctgttcctgcgtgccgtcgccagggaagccttttctgtcgacctgcccgagcaatacgcggtgggcatggtgttcttcaaccaggacccggtgaaagccgaggcggcacgcgagaacatgaatcgcgagatcgtcgccgccggactggagctggtcggctggcgcaaggtgccgatcgataccagcgttctcggccgcctggcgctggagcgcctgccgcagatcgaacaggtgttcatcggaggcgccggcctgagcgaccaggacttcgccatcaagctgttcagcgcacggcgccgctcgtcggtggccaacgccgccgacagcgaccactacatctgcagcttttcgcacaagaccatcatctacaagggcctgatgatgccggccgacctggccgccttctatccggaccttggcgacgagcgcctgcagaccgcgatctgcgtattccaccagcgcttctccaccaacaccctgccgaaatggccgctggcgcagccgttccgcttcctcgcccacaacggcgagatcaacaccatcaccggcaaccgcaactgggcccaggcacggcggaccaagttcaccaacgaactgatccccgacctggaagagctaggcccgctggtgaaccgcgtcggctccgactcgtcgagcatggacaacatgctcgaactgatggtcaccggcggcatggacctgttccgcggcctgcgcatgatcatcccgccggcctggcagaacgtcgagaccatggacgccgacctgcgcgcgttctacgagtacaactcgctgcacatggagccctgggatggccccgccggcgtcgtgctgaccgacggtcgctatgccgtctgcctgctcgaccgcaatggcctgcgcccgtcgcgctgggtcaccacgaagaacggctacatcaccctggcctcggaaatcggcgtctgggactacaagcccgaggacgtcatcgccaagggtcgcgtcggtccggggcagatcctcgcggtggacaccgagaccggccaggtcctgcacagcgacgacatcgacaaccgcctgaagtcgcgccatccctacaagcaatggctgcggcagaatgccctgcgcatccaggcgaccctggacgacgaccatggcgtggccagctacgacgccgaccagctcaagcaattcatgaagatgttccaggtcaccttcgaggagcgtgaccaggtgctgcgtccgctcggcgagcagggccaggaagcggtaggctccatgggcgacgatacgccgatggcgatcctctcccggcgcatccgctctccgtacgattacttccgccagcaattcgcccaggtcaccaacccgccgatcgacccgctgcgcgaagccatcgtgatgtccctggaaacctgcctgggcgtcgagcagaacatcttcgaggaagccccgcaccatgccaaccaggcgatcctcaccactccggtgatctcgccggcgaagtggcggaccatcatgaccctggaccgcccgggcttcgaccgccacttcatcgacctcaactacgacgagtcgatgggcctggaggccgcggtgcgcaacatcgccgaccaggccgaggaggccgtgcgcggcggcaaggtgctgctgatcctcagcgaccgccatatcgctcccggcaaactgccgttgcatgctgccctggccgtcggtgcggtgcatcaccgcctggtgcagaccgggctgcgctgcgactccaacatcctggtggagaccgccaccgcccgcgatccgcaccatttcgcggtgctgatcggcttcggcgcctcggcggtctatccgttcctcgcctacgaggtgctggccgacctgatccgcaccggtgaagtgctgggcgatctctacgaggtgttcaagtactaccgcaaggggatctccaagggcctgatgaagattctctcgaagatgggcatctccaccgtcgcgtcctaccgtggcgcgcagctgttcgaggcggtgggcctgtccgacgaggtcaccgacctgtgcttcaccggagtcgccagccgcatccagggtgcgcgcttcgtcgatatcgagaacgagcagaagctcctggccgccgaggcctggagcaaccgcaagccgatccagcagggcggcttgctgaagttcgtctatggcggcgaataccacgcctacaacccggatgtggtgaataccctgcaggctgccgtgcagcagggcgactacgagaagttcaaggaatacaccgcgctggtggaccagcgcccggtgtcgatgatccgcgacctgttgcaggtgaagaccgccgcgcagccgctggcgctcgacgaggtggagccgctggaagccatcttcaagcgcttcgatgccgccgggatttccctcggcgcgctgtcgccggaggcccacgaggcgctggccgaggcgatgaacaccctgggcggtcgctccaactccggcgagggcggcgaggacccggcgcgctacggcacgctgaagagttcgaagatcaagcaggtggctaccggccgcttcggcgtgaccccggaatacctggtcaacgccgaggtcctgcagatcaaggtggcccagggcgccaagcccggcgagggcggccagttgccgggcggcaaggtcaacggcctgatcgcccgcctgcgctatgcggtgcccggcgtgaccctgatctcgccgccgccgcaccacgacatctactccatcgaagacctggcgcaactgatcttcgacctcaagcaggtcaacccgcaggcgctggtatcggtgaagctggtgtcggagccgggcgtcggcaccatcgccgccggcgtggccaaggcctatgcggacctgatcaccatctccggctacgacggcggtaccggcgcctcgccgatcacctcgatcaagtacgccggctcgccctgggaactgggcctggcggaaacccaccagaccctgcgcggcaacgacctgcgtggcaaggtccgggtgcagaccgatggcggcctgaagaccggcctggacgtgatcaaggcggccattctcggcgccgagagcttcggcttcggcaccgcgccgatgatcgccctgggctgcaagtacctgcgcatctgccacctgaacaactgcgccaccggcgtggcgacgcagaacgacaagttgcgcaaggaccacttcatcggcaccaccgcgatggtgatcaacttcttcaccttcatcgccacggaaacccgcgagtggctggcgcgcctcggcgtgcgcagcctgggcgagctgatcggccgcaccgacctgctggagatcctccccggcgagaccgccaagcagcagaacctggatctcgctccgttgctgggcagtgagctgatcccggccgacaagccgcagttctgcgaggtggagaaaaacccgccgttcgaccagggcctgctggccgagaagatggtcgagctgtcgaaggccgccatcgaaggcctgagcggcggcgagtacgagctggacatctgcaactgcgaccgatccatcggcgcgcgggtatccggcgagatcgcccgcctgcacggcaaccagggcatggccaaggcaccggtggtgttccgtttcaagggcaccgcgggacagagcttcggcgtgtggaacgccggtggcctgcacctgtacctggaaggcgacgccaacgactacgtaggcaagggcatgaccggcggcaagctggtgatcaccccgcccaagggcagtccgttcaagacccaggaatcggccatcgtcggcaacacctgcctgtacggcgccaccggcggcaagctgttcgccgccggaaccgccggcgagcgcttcgccgtgcgcaactccggttcccatgcggtggtggaaggtaccggcgaccactgctgcgaatacatgaccggcggtttcgtctgcgtgctgggcaagaccggctacaacttcggctccggcatgaccgggggcttcgcctacgtcctcgacatggacaacactttcgtcgaccgcgtgaaccacgagctggtggaaatccagcggatcagcggcgaggcgatggaggcctatcgcagccacctgcgcaaggtcctggtcgagtacgtgaacgaaacggcaagcgagtggggcgcgaacatcctggaaaacctggatgactacctgcgtcggttctggctggtgaaaccgaaggcggccagcctcggttcgctgctgaccagcacccgtgccaacccgcaataa

SEQ ID NO: 339807 - DNA, 1662 bp, Pseudomonas aeruginosa
atgaccagcttgcatgccgatgaggccttcctgggccactaccaattcagtcacgacccgttcgcgccgcgcgttccgggtttcaagttcttcccggcgcagcgcaagccggtgctcggccagttgcaccatctggcccgctacagccagctcctgctgctggtcaccgggcccctgggcagcggcaagaccctgttgcgccaggcgctggtggccagcaccaacaaggatgcggtcctcagcgtggtgatctcggcgcgcaccgccgccgacgagacttcgttgctgcgccaggtggcgcagggcctgagcatcaaccaggcgagcctggaggcgatcctgaccaaggtggcgcagctggcgatcaccgggcaggacgtctacctgatggtggacgatgccgagcagctccaggacagcgcgctggaagtgctgttgctgctggcttccggcaccaacgagggacgcctgcatgtattcctgttcggtgagccgtcgttgctgccgcgcctggaggtgttttccgagggtgaggagcgcttccatgccatcgagttgcagccatacagcgaagaggaaacccgcgactacctggcccagcgtctcgagggcgccgggcagggcatcgagctgatttccaacgacctgctggtggacatccacgagcagtcggaaggctggccgggagcgatcaaccaggtcgcccgcgatgccctgatcgaagcgatgctggccaatcgtggcgcagcgcgcaaggcaaccggagggtctttcaacttgcccaagaagcatctggtgattcttgcggtcgtggccatcggcgtgatcgccgcctggttcatgcaaggcaagagcaagccggaggcgccgcagaccgcctctaccgaattgtccatgaatggcgctacgccggcccaggcccagcagccgggcagcggcccggccgtggagttcaacggctccagccagccgttgccgctaccgttggtcggcgagtcgcagccggtcattcgcgagccgctggcccaggccgccgggcaaggtggcgacgacgaaggcggcctgccgtccgccgcggtgccgcctaccgtttccagctcggctcctccggtgacgccgctggccaacaacggcgtcacgccgatgcatccggtgccgccggcgccgaccgaaccgaccgcgcctgcggcgaccccgactccgactccggcgcagaccccggcaccggccgcgccggtcgccagcgccccggccagcaagccggccccggcccccgctccggccaagccggcggcgagcaagccggccaccaccgccgcggcgaagccggccccggctccggccgccaagccggccagcggtggcggtgcgggaagccagtggtatcgcaaccagtctggtggtaacttcgccctgcagatcctcggtaccggctccgaagccaatgcccaggcgttcattcgccagcagggcggcggcgatttccgctacttcaagaaaaccctgcaaggcaagccgttctacgtcgtcacctatggcagcttcccgaatcgtgccgccgccctggccgcagtgaaaaaactgccgtccaaggtgcaggccggcaagccgtggccgcgtaccttcgccagcatccagcaggagatcggccaggcgcattga

SEQ ID NO: 339808 - DNA, 1107 bp, Pseudomonas aeruginosa
atgcgcacacttcacgtcgatctaggcgagcgtagctatcccatttacatcggtgaaaacctgctgggcgacgcccgctggttcgcgccgcatatcgtcggtcgccgggtcgcggtgatcagcaacgaaacggtcgctcctctctatctggaaaccctgctcaaggcactgcaaggccacgaggtcacccctgtggtgctgcccgacggcgaggcctacaagcagtgggaaaccctgcaactgatcttcgatgccctgctgaaggagcggcatgaccgcaagactaccctgatcgccctgggtggcggcgtcatcggtgacatggccggtttcgccgcggcctgctaccagcgtggggtcaacttcatccaggtgccgaccaccctgttgtcccaggtcgactcctcggtgggcggcaagaccgggatcaaccatccgttgggcaagaatatgatcggtgcgttctaccagccccaggcggtggtcatcgacaccgcgtcgctgaagacgctgccgtcccgcgagctgtccgccgggctggcggaggtgatcaagtacggtttcatttgcgacgaaccgttcatcacctggctggaagagcacatggatgccttgctggcactggagccgaccgttgtcaccgaggccatcgagcgctcttgcgcggcgaaggcccgcgtggtgggcgccgacgagcgcgagtcgggcgtgcgtgccacgctgaacctcggccataccttcggtcacgcgatcgagacccagcaaggttacggcgtctggttgcacggcgaagcggtaggggcgggaaccgtgatggcactcgagatgtcgcatcggttgggttggctgagcgtcgccgagcgcgatcgcggtatccgtctgctgcgccgggctggcctgcccgtggtaccgccggccgagatgacggcggaagattttatggaacacatggccgtcgacaagaaagtgctcgatggccgcctgcgtctggttttgctgcaaggactggggaatgccgtggtcaccggcgattttccccgtgagatcttggacgcgaccctgcgcaccgactatcgggccttggccgaccagcttggagatgaatga

SEQ ID NO: 339809 - DNA, 519 bp, Pseudomonas aeruginosa
gtggtcaacctgatcctcgtcggcccgatgggtgctggaaagagcaccatcgggcgcctgctcgccaaggagctgcatctcgcgttcaaggactccgacaaggagatcgaacagcggtgcggcgcgaatatcccatggatcttcgatgtcgagggcgaggtcggtttccgcgagcgcgagcaggccatgctcaccgaactctgcgccgccgacggcatggtgatcgccaccggcggcggggcggtgatgcgcgacggtaaccgccaggtgctgcgcgccggtggccgggttgtgtacctgcatgcctcggtcgagcaccagatcgcgcgcacggcgcgggaccgcaaccgccccttgttgcagaagcccaacccgggacagatcctccgcgacctgatggcgctgcgcgacccgctctaccgcgaaatcgccgatgtggtggtggagaccgacgaaaggccgccgcgcctggtcgtccaggaaattctcgaacgcctgcgcaagttgccgccccgctga

SEQ ID NO: 339810 - DNA, 2133 bp, Pseudomonas aeruginosa
atgaacagtggcctctcgcgcctcgggatcgctttgctggctgccatgttcgcgccggcattgctcgccgcggacctggagaaactcgacgtggcggcactgcctggcgaccgggtcgagctaaagctgcagttcgacgagcccgtcgccgcgccgcgtggctataccatcgagcagccggcgcgaatcgccctcgatctgccgggggtgcagaacaaactcggcaccaagaatcgcgagctgagcgtgggcaatacgcgcagcgtcacggtggtcgaggcgaaggatcgcacacggttgatcatcaacctgaccacgctgtcgtcctacaccacccgggtggaaggcaacaacctcttcgtggtggtcggcaattcgccggccggcgccagcgtcgcttccgccgctccggtcaaggcaagcccggctccggccagctatgcccagccgatcaagcccaagccgtacgtgccggcgggtcgtgccatccgcaacatcgatttccagcgtggcgaaaagggcgagggcaacgtggtcatcgacctgtccgacccgaccttgagcccggatattcaagaacagggcggcaagatccgcctggacttcgccaagacccagctgccggatgcgctgcgggttcgcctggacgtcaaggacttcgccacgccggtgcagttcgtcaacgccagcgcgcaatccgaccgtaccagcatcaccatcgaaccgagcgggctctacgactatctggtctaccagaccgacaatcgcctgaccgtcagcatcaagccgatgaccacggaagacgccgagcggcgcaagaaggacaatttcgcctataccggtgagaaactgtcgctgaacttccaggacatcgacgtgcgttcggtactgcagctgatcgccgacttcaccgacctgaacctggtggcctcggataccgtgcagggcaatatcaccctgcgcctgcagaacgtgccgtgggaccaggcgctggacctggtgctgaagaccaagggcctggacaagcgcaagctcggcaacgtgctgctggtggccccggccgacgagatcgccgcccgtgagcgccaggagctggaagcgcagaagcagatcgccgagttggcgccactgcgtcgggaactgatccaggtgaactacgccaaggccgcggacattgccaagctgttccagtcggttactagtagtggcgaagagaaagaaaattctcgtggttcgattaccgtagatgaccgtaccaacagcatcattgcctatcagccgcaggagcggctggacgagctacgccgaatcgtttcccagttggacatcccggttcgtcaggtgatgatcgaggcccgtatcgtcgaggccaacgtggggtacgacaagagtcttggtgtgcgttggggtggtgcctaccacaatggcaactggaacagctacggcaagaacggcaacatgggcatcaaggataaggaaggttacaactgcgggccgttccaggggcagtgtacgttcccgaccagagataattctccgaccccatttgtggatatgggggccaaggatgctacttccggtatcggtattggctttatcaccgataacatcattcttgacttgcaattatcggccatggagaaaaccgggaacggcgaagtggtttcgcaacccaaggtcgtaacttctgacaaggaaaccgcgaagatcctaaagggatcggagatcccatatcaggaggccagttccagtggtgcgaccagcacctcgttcaaggaggccgctctttctctggaggtgacgccgcagatcactccagacaatcggatcatcgttgaggtgaaggtgaccaaggatgctcccgacttccagaatgctttgaatggagttcctccgatcaacaagaacgaggttaacgccaagattctggtcaacgatggtgaaaccatcgttatcggcggtgtattcagcaacacccagacaaaggctgtcgacaaggtacccttcctcggtgacctgccttacttgggccgtttgttccgccgcgatacggtctccgacacgaaaaacgaacttctggttttcctgacaccgcggatcatgaataatcaggccatcgcaatcggtcgctga

SEQ ID NO: 339811 - DNA, 525 bp, Pseudomonas aeruginosa
atgagagcccgcctgattctgagcagcttgctgctcaccatgcttgccggttgcggcgcgaattccgagttcggcgatcttcaagcctatatgaacgaggtacgtgctcgacctaagggcaatatcgagcctctgccgaagtttcagccatatgaagcttttacttatagcgcttcgaacctgcgtagtccgttccagccgccggtgaagatcgacctgaccgtgcggcagaaaggcaacaaggtggttaaacccgacgagacacgggtcaagcagttcctggaaggtttcaacatcgaaaccttcgagatggtcggcaccctgtccaacgcccagggcaccttcgccctggtgaagggcgcgggtggcgtgcaccgggtgagggtcggggactacctggggcgcaacgacggcaaggtcgtcggcatcagcgaaggaaaaatagacgtgatcgaaatcgttcctgacggagaggggaactggctggagcgtccgcgcagcctgactctcaaggaacgctcctga

SEQ ID NO: 339812 - DNA, 624 bp, Pseudomonas aeruginosa
atgagtctggccagttccctggaaagtctgcgcaagatcgacgtaaacgacctcgatctgaacaacatcggttcctggccggcggcggtcaaggtcatcgtctgcgtgctgctgaccgcggcggtcctggcgctgggctacaacttccatctccgtgacttgcaaacacagctcgaacagcaggctgcgcaagaagaatcgctcaagcagcaatttgctaccaaagcgttccaggccgcgaacctggaagcctacaaggcacagatgaaggagatggaggagtccttcggcgccttgctgcggcagttgcccagcgacaccgaggtacccgggctgctcgaggacatcactcgtaccggtctgggcagcggcctggagttcgaggagatcaagctgctccctgaagtcactcagcagttctatatcgagctgccgatccagatcagcgtggtcggcggctaccacgacctggcgaccttcgtcagcggcgtgtccagcctgccgcggatcgttaccctgcatgacttcgagatcaagccggcttcgcccgataacacctcgaagctgcgcatgagcatcttggccaagacctaccgctacaacgacaaggggctgaagaaatga

SEQ ID NO: 339813 - DNA, 597 bp, Pseudomonas aeruginosa
atggcacggatcaaccttctaccctggcgcgaagagctgcgcgagcagcgcaagcagcagttcctggtgattcttggcggcgtccttttggtttccggcgcactggtgtttcttggtggccaatatctcaacactgcaattgagcatcagggcgcgcgcaacgacttcctgcgcaaggagatcgttgtgctggatgcgcggatcaaggaaatcagcgagttgagatcgcggcgccagcagttgctcgagcggatgaagatcattcaggacctgcagggcaaccgcccgatcattggtcgggtgttcgaccaactggtgcgcaccttgcctgacggtgtgtatttcaccgacctgaagatgaccggcaagaacatcgccatcgccggcgcggccgagtccaacaaccgcgtttccaatctcatgcgcaacatggacgcgtccgagtggctgaccgctccgaccctgaacgaggtcaaggcggtgacccagggcgcggtggaccaggccaacgtgttccaactgaccgtgcagcagacgcagcccggcgaggaagacgccaaggcgaagcatggggttgcgcaaggagccaagaaatga

SEQ ID NO: 339814 - DNA, 1065 bp, Pseudomonas aeruginosa
gtgctagggctcataaagaagaaagcgaacaccttgctggggatcgacatcagctcgacctcggtaaagctccttgagttgagccgctccggaggccgctacaaagtggaggcctatgccgtcgagccgcttccgccgaatgcagtcgtggaaaagaacatcgtcgagctggaaggggtcggccaggcgttgtcgcgggtgctggtcaaggcgaaaaccaacctgaagtcggccgtggtcgccgtcgccggttcggcggtgatcaccaagaccatcgagatggaggccgggctttccgaggatgaactggaaaaccagctgaagatcgaggccgaccagtacatcccctatccgctggaggaagtcgccatcgacttcgaggtccaggggctctccgcgcgcaatcccgagcgcgtggacgtactcctggccgcctgtcggaaagagaacgtcgaggttcgcgaagcggccctggcgctggccggcctgaccgccaaggtggtcgacgtcgaggcctacgcgctggagcgctcctatgcgctgctgagcagccagctgggtgccgacaccgaccagttgaccgtggcggtagtggacatcggcgcgaccatgaccaccctgagcgtcctgcacaacggacgcaccatctatacccgcgaacagctgttcggcggtcgccagctcaccgaggagatccagcggcgttacggactctcggtggaggaagccggtctcgccaagaagcagggtggtcttccggatgactacgacagcgaagttctgcgtccgttcaaggacgccgtggtgcagcaggtttcccgctcgctgcaattcttcttcgccgccggacagttcaacgacgtcgactacatcgtcctggcgggcggtacggcgtctatccaggatctcgatcggttgatccagcagaagatcggcaccccgaccctggtcgccaacccgttcgccgacatggcgctgaacggcaaggtgaatgccggcgccctggccagcgacgctccggcgttgatgatcgcctgcggcctggcgttgaggagtttcgactga

SEQ ID NO: 339815 - DNA, 2472 bp, Pseudomonas aeruginosa
atgcgcctgctgaagttcctgtggtggacttgcgtcaccctgatttgtggagtgctgctcagtttcagcggcgcctatctctatctgagtcccagcctgccctcggtggaagctctgcgtaacgtccagctgcagatccccctcaaggtctacagcgaggacggcaagctgatctccgagttcggcgagatgcgccggacaccaatccgcttcgccgacatcccgcaggacttcatccatgccctgctgtccgccgaggacgacaatttcgccaaccattatggcgtcgatgtgaaaagcctaatgcgcgccgccgcgcaattattgaaaagcggtcacatccagactggcggcagcaccatcaccatgcaggtagcgaagaactacttccttaccaatgaaagaagcttctcgcgaaagatcaatgaaatcctcctggctctgcagatcgagcgacagctgaccaaggacgagatcctcgagctttacgtcaacaagatctacctgggcaaccgtgcctatggcatcgaggctgccgcacaggtctattacggcaagccgatcaaagacttgagcctggccgagatggcgatgatcgccggactgccgaaagcgccctcgcgctacaacccgctggtcaacccgacccgcagtacggagcggcgcaactggatcctcgagcgcatgctcaagctcggcttcatcgaccagcagcgctaccaggccgccgtcgaggagccgatcaacgcctcctaccacgtgcagacccccgaactgaatgcgccctacattgccgagatggcacgtgccgagatggtcggccgctacggcagcgaggcctataccgagggctacaaggtcatcaccacggtccgcagcgacctgcagaacgccgccagccaatcggtccgcgacggcctcatcgactatgaccagcgccacggctaccgcggcccggagacccgcctgccgggccagacccgcgacgcctggctcaagcacctgggccagcagcgcagcatcggcggcctggagccggcgatcgtcacccaggtggaaaagagcgggatcatggtgatgacccgcgacggcaaggaagaagccgtgacctgggacagcatgaaatgggcacgccccttcctcagcaacaacagcatgggcccgatgccgcgccagcccgccgacgtggcccaggccggcgaccagatccgcgtgcagcgccaggaagacggcaccctgcgcttcgtacagattcccgccgcacagagcgcgctgatctccctcgacccgaaggacggggcgatccgctcgctggtcggcggcttctccttcgagcagagcaactacaaccgcgcgatccaagccaagcgccagccgggctccagtttcaagccgttcatctacagcgcggccctggacaatggtttcaccgccgccagcctggtcaacgatgcgccgatcgtgttcgtcgacgagtacctggacaaggtctggcgaccgaagaacgacaccaacaccttcctcggcccgatcccgctgcgcgaagccctgtacaagtcccgcaacatggtctcgatccgcgtcctgcagggcctgggcatcgagcgggcgatcagctacatcaccaagttcggcttccagcgcgacgaactgccgcgcaacttctccctggccctgggtaccgcgacagtcacaccgatggaaatcgccggcgcctggagcgtattcgccaacggcggctacaaggtcaatccgtacgtcatcgaacgcatcgagagccgcgacggacaggtgctgtaccaggccaatccgccccgcgtgccggtggaagaacaggtcgctgcgccggatgcggaagacgccgggaatcctggcgaccccgagcatccggagagcgccgaaggcgaaggttcgatcgaagcccagcaagtcgccgccaaggcccagaccaccttcgagccgaccccggccgaacggatcatcgatgcccgtaccgcctatatcatgaccagcatgctgcaggacgtgatcaagcgcggtaccgggcgccgcgccctggcgctgaagcgcaccgacctggccggcaagaccggcaccaccaacgattccaaggatggctggttctccggctacaactccgactacgtgaccagcgtctgggtcggcttcgaccagccggagaccctgggtcgccgcgagtacggcggtaccgtcgcgctgccgatctggatcaggtacatgggcttcgccctcaaggacaagccgatgcacaccatggccgagccgccaggcatcgtcagcctgcgcatcgacccggtaaccggccgttcggccgcgccgggcactcccggcgcctatttcgagatgttcaagaacgaggacaccccgccctcggtcaacgaactgccgccgggcagcttccctggcagcccgctgccggatgacgaaggcgcgccgatcgacctattctga

SEQ ID NO: 339816 - DNA, 1269 bp, Pseudomonas aeruginosa
atgtccgatcttaaaaccgctgccctcgaatatcacgcacaaccccgtccgggaaaactgagtgtcgagctgaccaaacccaccgctaccgcccgggacctgtccctggcctacagcccgggtgtcgccgagccggtgcgtgaaatcgcccgcgatgccgagctggcctaccagtacaccggcaagggcaacctggtggcagtgatttccgacggcaccgcgattctcggcctgggtaacctcggcccgctggcctccaagccggtgatggaaggcaagggtgtgctgttcaagcgcttcgccggcatcgacgtgttcgacatcgaggtcgacgccgagagcccgcaggctttcatcgataccgtcaagcgtatttccatcaccttcggcggtatcaacctcgaggacatcaaggctcccgagtgtttcgagatcgagcgcgcgctgatcgaacagtgcgacatcccggtgttccacgatgaccagcacggcaccgccatcgttaccgcggcgggcatgctcaacgcgctggaactggccggcaagaagctggaagaagcgaagatcgtctgcctcggcgccggcgctgccgccatctcctgcatgaagctgctggtgagcatgggcgccaaggtcgagaacatctacatgatcgaccgcaagggcgtgatccacgccggtcgcgacgatctgaaccagtacaagtcggtgttcgccaccgagaccgacaagcgtaccctggccgacgccctggagggcgccgacgtgttcgtcggcctgtccggcgccaacctgctggagccggaagacctcaagcgcatggcgccgaacccgatcgtgttcgcctgctcgaacccggacccggagatcaagccggaactggcccatgccacccgcaacgacgtgatcatggctaccggacgttccgactatccgaaccaggtcaacaacgtgctcggtttccccttcatcttccgcggtgccctggacgtacgtgccacgcgcatcaacgaagagatgaagatcgccgccgccctggccctgcgcgacctggccaagcagccggtcccggaggacgtctgcgccgcctatggcgtggacaagctggaattcggtcgcgagtacatcattccgaagccgatggacaagcgcctgatcaccgtggtttccgatgccgtggccaaggctgccatcgagaccggcgtggctaccctgccgtatccgaagaactatccgctgaaatcggtggacgaagtcttcaacggctga

SEQ ID NO: 339817 - DNA, 1440 bp, Pseudomonas aeruginosa
atgaagaccgcctggctcctgctgctgttgctgggagtcggcgcgctgggcggctgcgcggtgaacccggccaccggcaagagcgatttcgtgatgatgagcgagcagcaggaactcggcatgggcgctcgctacaaccaggaaatcctcaagcagttcccccgctacaacgatgaaaagctccaggcctacgtgcaacgggtaggcgagcgggtcgcccgcagcagccaccgcagcaacctgcaatatcatttcaccgtcatcgattcgccggacatcaacgccttcgccctgccgggcggctacatctatatccatcgcggactgatcgcctaccttggctccgaggccgaactggccgcggtgctcggtcatgaggtcggccatgtcacggcgcgccacagcgtgcgccagcagagtcaggccagcgcctggaacatccttggccaggcggtggcgatcggcaccggggtcggcgccgccggcgacctggccaacgtgctcggcacggccttcgtccgcggctacgggcgtgacatggaactggaggccgatggtctcggcgcccagtacctggcccgcgccggctacgatccgacggcgatgatccaggtggtgcgggtgctgaagaaccaggaggacttcgctcgcgaagaggccgcgcgtaatggccaggcggtacaggccggcggctaccacgggttgttcgatacccatccggacaacgaccggcgcctgcaggaagtggtcggcccggcccggcagctggccaacggacagcaggaagtggggcgcgaggtctttcttcgccatctggaaggcatgccgttcggcgactcggcatcggccggggtgcgtcgcgggcagaacttctaccatgccgagctggacttcaccctgagctatccggcgggctggaagatcctcaaccagcccagcgccctgcttggctatccggcggacgagcagtcgttcatcggcatgaagctggtgccccatgattcccgcctgacgcccgcggagttcctgcgcaagaacgccgggcaacggctggcccaggaagagtcgctgaagcaggccgggctgaacggctacacggcggtggtgccaggcaacccggcgcgacgggttgctgtgatctaccagggcgaccgcgcctacctgttcgtcggcgtggtcaaggtcggttccctggagacccaggacgaccgcttcctcagcgtgatccgcagcttccgtccgctgcgcgacaaggagcgggccctggcgcagccgcgacgcctgcatctggtgcaggtcaaggcggggcagacgctggagcaattggcggctggcggcgaggggtcattgagtgactccgtggctcgtctgcgtctgctgaatgacctttatccgagcggtgaaccccgtccgggcgattggcttaaagtcgtacgctag

SEQ ID NO: 339818 - DNA, 768 bp, Pseudomonas aeruginosa
gtgggcgcctttttcatgtccgtggtttccgccttcgccggtgcggcggaggcctgccggcctaccggtgccttgcagaacgtcgaggtggcgcgggtggtggacggcgataccgtgcgcctgcgcgatggccgcagcgtgcggctgatcggtatcaatgcacctgaactggcgcacaacggccgcaccaccgagcccttcgccgaagccgcgaagcagcggctgcaggcgctggtatcggccagcgacgggcgtctcgccctgcagccgggccgccagccccgcgatcactacgggcggaccctggcgcacctgttcgatgccagcggcgccaacctcgaggcgcgcctgctcggcgagggcctgggctacctggtggcggtcgcgccgaacaccgagctgacggcctgtcagcaagcggcggaacgtgcagcgcgttcggctaatctgggtgtatggaagcgttcgccggtgctttcgctcgatcgactggcgcagagcggcttcgccgtggtccgcgggcgggtgctcgaggtcgaacgcaaccggggcggtatctggctggagatggacggtccgctggtcctgcggatcgagccgaaggtgctcaaggcgttcgatgcgaaacgggtgatgcagatggcgggacgttcgctggaagtgcgtggctgggtggtcgatcgttcccgccgtggcgctgtgccggccggcaaggcgcgctggcagatgtcggtgaccgatccggcgatgctggaatggttgccatga

SEQ ID NO: 339819 - DNA, 216 bp, Pseudomonas aeruginosa; identical to SEQ ID NO: 318037

SEQ ID NO: 339820 - DNA, 2220 bp, Pseudomonas aeruginosa
gtgtcagacctgatcctacgcctagccctgccttcgccactccgccgcctgttcgactaccgcgcgccccgcggcattccgcgcagcgccctacagccggggattcgcctgctgctgccgttcgggcgccgggagctggttggcgttctgatagaggtgacggaccgttccgaagtacccgaagacaagctcaagcctgccctcagggtactcgacgccaagccgccgatgccggcgcacctgctcgaactctgtcgctggaccgcccagtactaccagcacagcctcggcgacaccctgtcctgggcgctgcccaacctgttgcgccagggcgagccggccgaggcgcgccagcagcgcttctggcatgccaccgcgcaatccagcctcgacgatccgcgcctggcccgggcgccgcgccagcgccaggccctggcgattctcaagcagcatccgcacggggtttcccatgagttgctgaaccaactggaaataaacaaggacagcctcgacctgctcaaggaaaaaggcctggtcgaactggaggtgcggcgccacagcaccccgccgcgcgaaggcggctggctggcccaggcggagttgccgctgaaccccgagcagcgcgccgccttcgaggcggttcgcgccagccacggcggtttccattgcttcctgctggccggggtcaccggcagcggcaagaccgaggtctacctgcaactgatccgcgaaaccctggccgcaggccgccaggccctggtgctgattcccgagatcaacctgggcccgcagaccctggcgcgtttcgaacgccgcttcaacgcgcgcatcgccctgctgcattcggccctgaccgaccgcgagcgcctcgacgcctggctcgccgcccgggatggcgaggccgacatcgtcatcggcacccgctcggcactgttcacgccgctgaagcggccgggactgatcatcgtcgacgaggaacacgacgcctcctataaacagcaggacggcctgcgctaccacgcccgcgacctggcactggtacgcgcgcgcctggagaacgtgccgatcctgctcggttcggccacgcccgccctggaaagcctgcacaacgcccaggccggccgctacggcctgctgcgcctgacccagcgcgccggtggcgcgcacccgccgaagttcatccgcctcgacgtgaagagcatgccgctcgacgccggcctttcccgcccgctgcaacaggccatcggcgataccctggcggccggccagcaggtcctggtgttcctcaaccgccgcggcttcgctccgaccctgctttgccacgactgcggctggatcagccaatgcccgcgctgcgacgcgcggatgaccgtgcaccagggcagcggcgagttgcgctgccaccactgcgaccaccgccagcggccgccgatgaactgcccgcaatgcggcaagctcgacctgcgtccggtaggcgccggcaccgagcgcgccgaggaacgcctgcggattctcttcccgaaccatccggtgctgcgcatcgaccgcgacagcacctcgcgcaagcacgccatgcgcgacctcttcgccaccatcaacagcggtgagccatgcatcctggtcggcacccagatgctcgccaaggggcaccacttcccacgggtcaccctggtggcgatcctcgatgccgacggcggcctgttttccgccgacttccgcgccagcgaacgcatggcccagcagatcgtccaggtcgccggccgcgcaggacgcgccgaggagcccgggcgggtactgatccagacccacctggccgatcacccgctgctggtccagctcaccgaggacggctacttcgcctttgccgaacaggccctcagcgaacgccgcgccgccggcctgccgcccttcgcccacctcgccctgctgcgcgccgaagcgcacaagccgggccaggcggaagccttcctcgacagcgcctgcagtgccgccgagcaattgctcgagcagatgggcggaccggaggtggaactgctcgggccggtgcccgcgcccatggagcggcgtgccggcaagcaccgcgcgcaactgctgctgcagtgcatgagccgggcgccgctgcatcgcctgctgacgccctggctgcagagcctcgaacagttgcccggcgggcgccaggtgcgctggtcgctcgatatcgatccgatcgacctgttctga

SEQ ID NO: 339821 - DNA, 1764 bp, Pseudomonas aeruginosa
atgaaagacacgattcgccagctgatccagcaagccctcgaccaactgaccgcggacggcaccctgcccgccggcctgaccccggacatccaggtggagaacaccaaggaccgtagccacggcgatttcgccagcaacatcgccatgatgctggccaagccggccgggatgaagccgcgcgacctggccgccaggctggtcgaggcaatccccgcccacgagcaactggccaaggtggagatcgccggccccggcttcctcaacttcttccaggatcacgtctggctcgccgccagcctcgaccgcgccctcgccgacgaacgtctcggcgtgcgcaaggcaggcccggcgcagcgcgtggtgatcgacctgtcctcgccgaacctggccaaggagatgcacgtcggccacctgcgctcgaccatcatcggcgacgccgtcgcgcgcgtcctcgagttcctcggcgacacggtgatccggcagaaccacgtcggcgactggggcacccagttcggcatgctgctcgcctacctggaagagcaaccggtcgacgccgaggccgagctgcacgacctggaggtcttctaccgcgcggcgaagaaacgcttcgacgagtctcccgaattcgccgaccgcgcccgcgaactggtggtcaagctgcaggccggcgaccccgactgcctgcgcctgtggacccgcttcaacgagatttccctgtcgcactgccagaaggtctacgaccgtctcggcgtgaagctgagcatggccgacgtcatgggcgagagcgcctacaacgacgacctcgcccaggtggtcgccgacctgaccgccaagggcctgctcaccgaagacaacggcgcgctgtgcgtcttcctcgaagagttcaagaacgccgagggcaatccgctcccggtgatcgtgcagaaggccggcggcggctacctctacgccaccaccgacctcgccgccatgcgttatcggcacaacgtgctgcacgccgaccgcgtgctgtacttcgtcgaccagcgccaggccctgcacttccagcaggtcttcgaagtggcgcggcgcgccggtttcgttccggccggcatggagctggagcacatgggcttcggtaccatgaacggcgccgacggccgtccgttcaagacccgcgacggcggtacggtgaagctgatcgacctgctggaagaggccgagagccgcgcctatgcgctggtcaaggaacgcaacgagcagcgcgccgagcgtggcgaggagccgttcgacgaggtccagctgcgcgagatcggccgggtggtggggatcgactcggtgaagtacgccgacctgtccaagcaccgcaccagcgactacagcttcaacttcgaactgatgctcagcttcgaaggcaacaccgcaccctacctgctctacgcctgcacccgcgtggccagcgtcttccgcaagctcggccagggccgcgagcaactgggcgggaagatcgtcctcgagcagccccaggagctggccctggccgcacagctggcgcagttcggcgacctgatcaacaacgtcgcgctcaagggcgtgccgcacctgctctgcgcctacctgtacgagttggccgggctgttctccagtttctacgagcactgcccgatcctcaccgccgaggacccggcgcagaaggacagccgcctgcgtctcgccgcgctgaccggccgtaccctggaacagggcctggagctgctcggtctgaagactctggaacgcatgtaa

SEQ ID NO: 339822 - DNA, 534 bp, Pseudomonas aeruginosa
ttgaccaccatcgtatctgtccgccgcaacggcaaagtcgtcatgggcggcgacggccaggtttccctgggcaacaccgtgatgaaaggcaacgccaagaaggtccggcgcctgtatcacggtcaggtactggccggtttcgccggcgccaccgccgatgccttcaccctgttcgagcgcttcgagcagcaactggagaaacaccaggggcacctggtccgcgccgccgtcgaactggccaaggactggcgcaccgaccgctccctgagccgcctcgaagccatgctcgcggtcgccaacaaggatgcctcgctgatcatcaccggcaacggcgacgtggtcgaacccgaacacggcctgatcgccatgggctccggcggcggcttcgcccaggccgcggccctggccctgctgcagcacaacgccgagctgagcgctcgggaagtcgccgagaccgcgctgaacatcgccggctcgatctgcgtcttcaccaaccagaacctgaccatcgaggagctggacagcgccgtctga

SEQ ID NO: 339823 - DNA, 1344 bp, Pseudomonas aeruginosa
atgtccatgacgccccgcgagatcgtccacgaactcaaccgccacatcatcggccaggacgacgccaagcgcgccgtcgccatcgccctgcgcaaccgctggcgacgcatgcaactgccggccgagctgcgcgccgaggtcacgccgaagaacatcctcatgatcggccccaccggcgtcggcaagaccgagatcgcccgccgcctggcgcgcctggcgaacgcgccgttcatcaaggtcgaggcgaccaagttcaccgaggtcggctatgtcggacgcgacgtcgagtcgatcatccgcgatctcgccgacgccgcggtgaagatgctccgcgaacaggagatccagaaggtcaagtatcgcgccgaggacgccgccgaagagcgcatcctcgatgccctgctgccggccgcgcgtcccgccatgggcttcggcgacgagccggcacgcgaggacagcaacacccgccagctgttccgcaagcgcctgcgcgaaggccagctggacgacaaggaaatcgacatcgaggtggccgacaacccggccggcgtggagatcatggccccgcccggcatggaggagatgaccaaccagttgcagaacctgttctccggcatgagcaagggcaagaagaagacccgcaagctgaaggtcgccgaggccctgaagctgatccgcgacgaagaggcggtgcgcctggtcaacgaggaagagctcaaggcacgcgccctggaggcggtcgagcagcacggcatcgtcttcatcgacgagatcgacaagatcgccaagcgcgccaacgccggcggcgccgacgtctcccgcgagggcgtacagcgcgacctgctgccactgatcgagggctgcacggtgaacaccaagctgggcatggtcaagaccgaccacatcctgttcatcgcctccggcgccttccacctgagcaagccgagcgacctggttcccgagctgcagggccgcctgccgatccgcgtggagctcaaggccctcagcccgaacgatttcgagcgcatcctcaccgagccgcatgcctcgctcaccgagcagtaccgcgagctgctgaagaccgagggactggccatcgagttcgccgaggacggcatcaagcgccttgccgagatcgcctggcaggtcaacgagaagaccgagaacatcggtgcccgccgcctgcatacgctgctcgagcggctgctggaggaggtctcgttcagcgcagccgacctggccagcgagcatagcgacaagccgatcctgatcgatgccggctacgtcaacagccacctcggcgagctggccgaggacgaggacctgtcccgctacatcctttga

SEQ ID NO: 339824 - DNA, 372 bp, Pseudomonas aeruginosa
atgcgtatcccttccgccatccagctgcacaaagcctcgaagaccctgaccctgcgctacggcgaggacagctacgacctgcccgccgagttcctccgcgtgcattcgccctcggccgaggtccagggccacggcaacccggtattgcagtacggcaagctgaacgtcggcctggtcggcgtcgagcccgccggccagtacgcactgaagctgagcttcgacgacggccacgacagcggcctgttcacctgggactacctgtacgagctggcgacccgcaaggaccagctatgggccgactacctggcggagctggccagcgccggcaagtcgcgcgaccccgacgagtcggtcgtcaagctgatgctctga

SEQ ID NO: 339825 - DNA, 1680 bp, Pseudomonas aeruginosa
atgagtcaaaagaacaataacgagcttcccaagcaagccgcggaaaacacgctgaacctgaatccggtgatcggcatccggggcaaggacctgctcacctccgcgcgcatggtcctgctccaggcggtgcgccagccactgcacagcgccaggcacgtggcgcatttcagcctggagctgaagaacgtcctgctcggccagtcggagctgcgcccaggcgacgacgaccggcgcttttccgacccggcctggagccagaatccgctgtacaagcgctacatgcagacctacctggcctggcgcaaggaactgcatagctggatcagccacagcgacctgtcgccgcaggacatcagtcgtggccagttcgtcatcaacctgctgaccgaggcgatgtcgccgaccaacagcctgagcaacccggcggcggtcaagcgcttcttcgagaccggcggcaagagcctgctggacggcctcggccacctggccaaggacctggtgaacaacggcgggatgccgagccaggtggacatggacgccttcgaggtgggcaagaacctggccaccaccgagggcgccgtggtgttccgcaacgacgtgctggaactgatccagtaccggccgatcaccgaatcggtgcacgaacgcccgctgctggtggtgccgccgcagatcaacaagttctacgtcttcgacctgtcgccggacaagagcctggcgcgcttctgcctgcgcaacggcgtgcagaccttcatcgtcagctggcgcaacccgaccaagtcgcagcgcgaatggggcctgaccacctatatcgaggcgctcaaggaggccatcgaggtagtcctgtcgatcaccggcagcaaggacctcaacctcctcggcgcctgctccggcgggatcaccaccgcgaccctggtcggccactacgtcgccagcggcgagaagaaggtcaacgccttcacccaactggtcagcgtgctcgacttcgaactgaatacccaggtcgcgctgttcgccgacgagaagaccctggaggccgccaagcgtcgctcctaccagtctggcgtgctggagggcaaggacatggccaaggtgttcgcctggatgcgccccaacgacctgatctggaactactgggtcaacaactacctgctcggcaaccagccgccggcgttcgacatcctctactggaacaacgacaccacgcgcctgcccgccgcgctgcacggcgagttcgtcgaactgttcaagagcaacccgctgaaccgccccggcgccctggaggtctccggcacgcccatcgacctgaagcaggtgacttgcgacttctactgtgtcgccggtctgaacgaccacatcaccccctgggagtcgtgctacaagtcggccaggctgctgggcggcaagtgcgagttcatcctctccaacagcggccacatccagagcatcctcaacccaccgggcaaccccaaggcacgcttcatgaccaatccggaactgcccgccgagcccaaggcctggctggaacaggccggcaagcacgccgattcgtggtggctgcactggcagcaatggctggccgaacgctccggcaagacccgcaaggcgcccgccagcctgggcaacaagacctatccggccggcgaagccgcgcccggaacctacgtgcatgaacgatga

SEQ ID NO: 339826 - DNA, 858 bp, Pseudomonas aeruginosa
atgccccagcccttcgtcttccggaccatcgacctcgacggccagaccatccgcaccgcagtgcggccgggcaaggaaggaagcactccgctgctgatcttcaacggcataggcgccaacctggaactggtattccccttcgtccaggcgctcgacccggaactggaggtgatcgccttcgacgttcccggcgtcggcggttcctcgacgcccagcgtgccctaccgctttcccggcctggccaagctggcggcgcggatgctcgactacctggactacggccaggtcaacgcgatcggcgtgtcctggggcggcgcgctggcccagcagttcgcccacgactatccggaacgctgcaagaagctgatcctcgccgccacttcggctggcgcggtgatggtgccaggcaagccgaaggtactgatgcgcatggccagcccgcggcgctacatccagccctcctatggcgtacacatcgcaccggacatctacggcggggccttccgccgcgaccccaagctggccatggcgcatgccagcaaggtgcgttcgtcgggcaagctgggctactactggcaactgttcgccgggctcggctggaccagcatccactggctgcataggatccgccagccgaccctggtgctggccggcgacgacgacccgatcatcccgctgatcaacatgcgcgtgctggcctggcgcattcccaacgccgaactgcacgtgatcgacgacggccacctgttcctggtgacccgcgccgaatcggtggcgccgatcatcatgaagttcctcgccgaggagcgccgccgcgccgtcatgcaccctcgtccgttcctgcccaagaccggctga

SEQ ID NO: 339827 - DNA, 1683 bp, Pseudomonas aeruginosa
atgcgagaaaaacaggaatcgggtagcgtgccggtgcccgccgagttcatgagtgcgcagagcgccatcgtcggcctgcgcggcaaggacctgctgacgacggtccgcagcctggccgtccacggcctgcgccagccgctgcacagtgcgcggcacctggtcgccttcggaggccagttgggcaaggtgctgctgggcgacaccctgcaccagccgaaccctcaggacgcccgcttccaggatccatcctggcgcctcaatcccttctaccggcgcaccctgcaggcctacctggcgtggcagaagcaactgctcgcctggatcgacgaaagcaacctggactgcgacgatcgcgcccgcgcccgcttcctcgtcgccttgctctccgacgccgtggcacccagcaacagcctgatcaatccgctggcggtaaaggaactgttcaataccggcgggatcagcctgctcaatggcgtccgccacctgctcgaagacctggtgcacaacggcggcatgcccagccaggtgaacaagaccgccttcgagatcggccgcaacctcgccaccacgcaaggcgcggtggtgttccgcaacgaggtgctggagctgatccagtacaagccgctgggcgagcgccagtacgccaagcccctgctgatcgtgccgccgcagatcaacaagtactacatcttcgacctgtcgccggaaaagagcttcgtccagtacgccctgaagaacaacctgcaggtcttcgtcatcagttggcgcaaccccgacgcccagcaccgcgaatggggcctgagcacctatgtcgaggccctcgaccaggccatcgaggtcagccgcgagatcaccggcagccgcagcgtgaacctggccggcgcctgcgccggcgggctcaccgtggccgccttgctcggccacctgcaggtgcgccggcaactgcgcaaggtcagtagcgtcacctacctggtcagcctgctcgacagccagatggaaagcccggcgatgctcttcgccgacgagcagaccctggagagcagcaagcgccgctcctaccagcatggcgtgctggacgggcgcgacatggccaaggtgttcgcctggatgcgccccaacgacctgatctggaactactgggtcaacaactacctgctcggcaggcagccgccggcgttcgacatcctctactggaacaacgacaacacgcggctgcccgcggcgttccacggcgaactgctcgacctgttcaagcacaacccgctgacccgcccgggcgcgctggaagtcagcgggaccgcggtggacctgggcaaggtggcgatcgacagcttccacgtcgccggcatcaccgaccacatcacgccctgggacgcggtctatcgctcggccctcctgctgggcggccagcgccgcttcatcctgtccaacagcgggcacatccagagcatcctcaaccctcccggaaaccccaaggcctgctacttcgagaacgacaagctgagcagcgatccacgcgcctggtactacgacgccaagcgcgaagagggcagttggtggccggtctggctgggctggctgcaggagcgctcgggcgagctgggcgaccctgacttcaaccttggcagcgccgcgcatccgcccctcgaagcagccccgggcacctacgtgcatatacgctga

SEQ ID NO: 339828 - DNA, 618 bp, Pseudomonas aeruginosa
atgaagacacgcgaccgtatcctcgaatgctcgctgttgctgttcaacgaacagggcgaacccaacgtctcgacactggaaatcgccaacgcactgggcatcagcccgggcaatctctactaccacttccatggcaaggaaccgctggtgatggcgctgttcgagcggttccaggccgagttggcgccgctgctcgatccgcccgaggaggtgcgcctgggcgcggaggactactggctgttcctgcatctgatcgtcgagcgcctcgcccactaccgcttcctgttccaggacctgtccaacctgaccgggcgcctgccacggctggctcgcggcatccgtacctggctcggcgcgctgaagcggaccctggccaccctgctggcccgcctcaaggccgaccggcagttgcgcagcgacgcgccggcactcgggcaactggtcgaacagatcaccctgaccctgctgttctccctggattaccagcgggtactgggcagcaagggcgaggtgcgcacggtggtctaccagatcatgatgctggtcgccccgcatctgcgcagcgaggcccaacgctcggcggaaagcctggcgcagcgctacctgggaccggaatga

SEQ ID NO: 339829 - DNA, 930 bp, Pseudomonas aeruginosa
atggctggcaagaagaagagcgaaaaagagtccagttggatcggcgagatcgagaaatactcgcggcagatctggctggctggtctgggggcctactcgaaggtcagcaaggacggcagcaagctgttcgagaccttggtgaaagacggcgagaaggctgaaaaagaagcgaagtccgatgtggacgcgcaggtcggtgcggcgaaggcttccgcccgctctgcgaagagcaaggtcgacgaggttcgggaccgtgcgctcggcaagtggagcgagctcgaggaagctttcgacaagcgcctgaacagcgccatctcgcgtctcggcgtgccgagccgcaacgaggtgaaggagctgcacggcaaggtcgatacgctgaccagacagatcgagaaactcaccggcgtcagcgtcaagccggcggcgaaggcagcggccaagcctgcggcgaaaccggctgccaagcccgcggcgaaaaccgcagcggccaagccggcagctaaaccggcagccaaggccgccgccaagcctgcggcgaaacccgcggcgaaaaaacctgcagcgaagaccgcggccgccaagccggcagccaagcccgccgccaaaccggctgcgaaggccgccgcgaaaccggcggccaagccggcagccaaggctgcggcgaagcctgctgcgaaacctgccgcagccaagcccgccgcgaagccggcagccaagccggccgctgcgaccgccgccaagcccgcggcgaaacctgccgccaagccggctgcgaaaaagcctgcggcgaagaagccggccgccaagcccgccgcggcgaaaccggccgctcccgccgcgtcttcgggcgcgcccgctgcccccgccgccacaccggctgccagcgctccggcagcgaacgctccggcgacgccgagcagccagggctga

SEQ ID NO: 339830 - DNA, 417 bp, Pseudomonas aeruginosa
atggccaagattgccctgaagaaaaagaccgtttccgaatccacttccctggtctccgagatccgccactatgcccgccagatctggcttgccggcctgggtgcctattcccgcctgggcaccgaaggcagcgactacttcaaggaattggtgaaagctggcgaagccctggagaaaaaaggcaaatcgctggtcacaagtcaggtcgattcggccaatgacagtgtcaagaccggcctctcttcggtgaagggaaaagtcgaagaccagctcgacaggatcgagcaggcattcgacagccgtgtcgctagcacgttgaaccggataggcataccttcccggaacgatgtcgaagcactctctgctaagctggatgagctgagcgcagtgctcgagcgtgtcgcgagaacccaataa

SEQ ID NO: 339831 - DNA, 276 bp, Pseudomonas aeruginosa
atgtcgcgtatccacatcgaacgtccgcacagcctggggctggacgccgcacgggccaaggcggagaaactggccgaacgtctggcgaaggagcacggcgtgcagtgcgaatggcagggcgacgagctgaccttcaagcgcagcggcgtcgacggcaggatcgcggtgggggcggacaaggtcgcggtggacgtcaagctcggcctgatgctgtcggccatgagcggcctgctcaagggcgagatcgagaaggcgctggacaaggcgctggcctga

SEQ ID NO: 339832 - DNA, 771 bp, Pseudomonas aeruginosa
atgaacgatccccgcaaaggcgccgacgccgaacccaccacccacttcggctaccagaacgttccggaaagccagaaggcgaagaaggtcgcccaggtattccactcggtggcagccaagtacgacctgatgaacgacctgatgtccggtggcatccatcgcctgtggaagcgcttcaccatcgagctgtccggcgtgcgcagcgggaaccgcgtgctcgacatcgccggcggcaccggcgacctgacccggcagttctcgcgcctggtcggcccgaccggcgaggtggtgctggccgacatcaacgcctcgatgctcaaggtcggccgcgacaagctgctcgacaagggcgtctccggcaacgtcagcttcgtccaggcggacgccgagaagctgcccttcccggacaaccacttcgactgcgtgaccatcgccttcggcctgcgcaacgtcacccacaaggacgaagcgatccgctccatgctacgcgtgctcaagcccggtggccgcctgctggtgctggagttctccaagccgagcagcaacctgctgtccaaggcctacgacgcctattcgttcagcctgctgccgctgatgggcaagctggtcaccaacgactccgagagctatcgctacctggccgagtcgatccgcatgcaccccgaccaggaaaccctgaaggcgatgatggtggaagccggcttcgaccgcgtgacctaccacaacatgaccggcggcatcgtcgccctgcaccgcggtatcaagccttaa

SEQ ID NO: 339833 - DNA, 627 bp, Pseudomonas aeruginosa
atgagctcgctgctgatccaggccgtgctggccgccgccgaaaccggcatcaatcgcgtcctgcgcctcgacgggacagcgctgccgcgcctgcgcaggctttccaccaaggtcatcgaggtcgactgcttgagcccgccgctgcgggtcttcatcctgcccgccggcgacggcctgcacttcgccgcgcagcatgaggcggaggtcgactgcaccttgcgtgcgccggccggcaacctcctgcacctggccctggcgcgcgacaagacccgcgtcctgcacagcccggaagtcagcatggacggcgacagcgcggccctgctggaactggccggcatcctgcaaagcctggagctggactgggagtacgaactgtcgcgctggctcggcccgctcgccacccaggtgctcggcagcggcctgcgcgacgcttcgcgctggagcgcgcagagcctgcacagcctgcgcctgaacctggccgactaccttgccgaggaaagccgcacgctggtcggccagcacgaagccgaagcccgcttcgccgaactggaccagctgaagctggccctcgatcgtctcgacgcgcgcgtcggacgcctcagccaaaagaccaagcccgacgcatga

SEQ ID NO: 339834 - DNA, 1602 bp, Pseudomonas aeruginosa
atgaagctcctcgctttccgccgcctcctgcgcatccagcgcgtcgtcatccgctaccgcctggacgacctgatcctcgaactgccgatgctgccctggtggctgcgcctgctcggtgccaccctgccctggcgctggctgccgcggcgcaagctggaactgacccgcggcgcgcgcctgcgcctggcgctgcaggacctcggaccgatcttcatcaagttcggccagattctctccacccgccgcgacctgctgcccgacgacatcgccaacgaactggcctggctgcaggacaaggtgccgcccttcccgccggagctggcggtcaagcgcatcgaggaacaactgggcgcgaagatcgaacaggtcttcgcccgcttcgaacgcgaaccgctggcctctgcctcggtggcccaggtccacgccgcgcggctgaagagcggcgaggaagtggtggtgaaggtgatccggccgaacctggaaccggtgatccgctccgacatcgcctggctgttcatcctcgcccgcctcgccgagcgggtctccagcgaggcgcggcgcctgcacccggtggaagtggtcagcgactacgagaaaaccatcgtcgacgaactcgacctgctccgcgaggcagccaacgcctcgcagctgcggcgcaacttcgaaggctcgccgctgctctacgtgccacaggtctactgggactggtgccggcccaaggtgctggtgatggagcgcatctacggcatcccggtgaccgacctggaaaccctgcgcgaccaacgcaccgacttcaaggcactggccgagcgcggcgtggagatcttcttcacccaggtgttccgcgacagctttttccatgccgacatgcaccccggcaacatcttcgtcagcacccgcgcgccctggagcccgcaatacatcgcggtggactgcggcatcgtcggcagcctgaccgacgaggaccaggactacctggcgcgcaacctgatcgccttcttcaagcgtgactaccgcaaggtcgcccaactgcatatcgactccggctgggtcccggcggaaaccaaggtcaacgacttcgaggcggcgatccgtaccgtctgcgaaccgatcttcgagaagccgctgaaggacatctccttcggccaggtcctgctgcgcctgttccagaccgcgcgccgtttcaacatggagatccagccgcaactggtgttgctgcagaagaccctgctgaacatcgaaggcctcggccgccagctctacccggaactcgacctgtgggccaccgcacagccgttcctggagcgctggatgcgcgaacgggtcagcccgaagcagttgctgcgcaatttccagcaacaggtcgagcaggtgccgcacctgtcgcaaatggcccgcgacaccctcgaacgcctgtcacaaccgcacgcccacaatgcgccgccgccggagtggaaaggttcccgccacgactggctcgggcgcctggtgggcgcggtgctgctggtcggcgccgccgaggtcggcctgggtcagcagctggaagcctggccggcgtgggtgatgctggccggcggggtgttcctgatcctgcgccgctag

SEQ ID NO: 339835 - DNA, 405 bp, Pseudomonas aeruginosa
atgaaagactggctggatgagattcactggaacgccgacggcctggtcccggcgatcgcccaggatcacgagaccgggcgcgtgctgatgatggcctggatgaaccgcgaggcgctggccctgaccgccagcgagaaccgtgcaatctattggtcgcgttcgcgtggcaagctgtggcgcaagggcgaggagtccgggcatgtgcagaagctgcacgaactgcgcctggactgcgacgccgacgtggtcatcctgatggtcgagcaggtcggcgggatcgcctgccataccggccgggaaagctgtttctaccgcgtcttcgagaacggcgcctggaagaccgtcgatccggtgctgaaggacccggacgctatctacgaacacgcaggacaccaccatgactga

SEQ ID NO: 339836 - DNA, 336 bp, Pseudomonas aeruginosa
atgactgacaccctgacccgcctggcggcggtgctcgaggagcgcaagaacgccgcgcccgacagctcctacgtggccagtctgtaccacaagggcctgaacaagatcctggagaaggtcggcgaggagtcggtggaaaccatcatcgccgccaaggatgccgcggccagcggcgactgccaggacctgatctacgaaaccgccgacctctggttccactcgctggtgatgctctcggccctcggccagcatccgcaagccgtgctggacgaactggagcgccgcttcggcctttccggccacgccgagaaagccgcccgccaaccatcggcctga

SEQ ID NO: 339837 - DNA, 249 bp, Pseudomonas aeruginosa; identical to SEQ ID NO: 318018

SEQ ID NO: 339838 - DNA, 426 bp, Pseudomonas aeruginosa
atgttcggaatcagcttcagcgaactgttgctggtcgggctggtcgccctgctggtgctcggccccgagcgcctgccgggcgccgcacgtaccgccggcctgtggatcggccgcctgaagcgcagtttcaataccatcaagcaggaagtggaacgggaaatcggtgcggacgagatccgccggcaactgcacaacgagcacatcctctcgatggagcgcgaagcgcagaagctgctggccccgctgaccggccagaatccccagcaggaaaccccgccgccggcggccgagagcccggcgccaagcgtacccacgccgccgccgcccagcacgcctgcggttccgcccgcggacgccgcggcaccgccggcagtcgctacctccactcccccttcgccaccgtccgagacgccgcgtaatccatga

SEQ ID NO: 339839 - DNA, 804 bp, Pseudomonas aeruginosa
atgagcgccgataaacccgagcagcccgagcacgaccaggaaatgcccctggtctcgcacctgaccgaactgcgtacgcgcctgctgcgcagcgtggcggcgatcttcctgatcttcgccggcctgttctacttctcgcagaagatctacaccctggtctccgagccgttgcgccgcttccttccggaaggcaccagcatgatcgccaccgacgtcgcctcgccgttcctcgcgccgttcaagctgaccatggtggtggctctgttcctcgccatgccggtgatcctcgcgcaggtctggggcttcatcgcgcccggcctgtacaagcacgagaagcgcgtggcgctgccgctgctggtgtccagcatcatcctgttctacgccgggatggccttcgcctacttcctggtgttcccgatgatcttccacttcttcgccagcgtgacgcccgagggcgtggcgatgatgacggacatcaacagctacctggacttcgtcctgaccctgttcttcgccttcggcgtcgccttcgagatcccggtggccacggtgctgctgatctggatcggggtggtcgacgtcgagtacctgaagaagatccgcccgtacgtgatcatcggctgcttcgtggtcggcatggtcctgaccccgccggacatcttctcccagaccatgctcgcggtgccgatgtggctgctgttcgagatcggcctgctgttcggccgcctggtacgcaagcgcggcgagcatccggacgaccaaccggccagcgacggcgaccagcctccggccacccgccagtga

SEQ ID NO: 339840 - DNA, 708 bp, Pseudomonas aeruginosa
gtgaacctgctgctcctcgacgacgccgacttcgtgtcggcggatcgtgcggtcctgcacgatcgccgcctcaagcacctgcacgaagtgcaccgcgccgagaacggcgacaccctgcgggtcggccgcctcggcggctggatgggcgaaggccgcctgctgaagctcgacgccagcgaggcgaccctggaggtgcgcttcgaccagccgccgccggccaagctgccgatcaccctgctgctggccttgccgcgaccgaagatgctccgccgggtgttgcagaccatcgccgcgatgggcgtaccgaagctggtgctgctgaacagctaccgcgtggaaaagagcttctggcagaccccgttcctcgacccggcggcgatccgcgagaacctggtcctcggcctggagcaggcccgcgatacggtgctgccggaaatcatcgtcgagaagcgcttcaaacccttcgtcgaagaccgcctgccggccctggccgccggcagcctcggcctggtcggccatcccggcccctggccggcctgtccgcgcgcggtggagaagccggtgaccctggcgatcggcccggaaggcggctggattccctacgaggtcgacaagctgcgcgaagccggactgcatccggtgcagctcggcgaacgtatcctgcgcgtggaaaccgcggtcagcgccttgcttgcgcggttgttctga

SEQ ID NO: 339841 - DNA, 1944 bp, Pseudomonas aeruginosa
atgtacgattggtgggttctccaactggccaagctgagcgtcagccgcaagctgatggtcggtttcggtgtcctcctcgcgctgcttctgctggtggtgatcagcagcaaccgcaccctcacgcaccagaccgccctcagcgagcagctcgccgaagtcgccagcctgatggaacaggcccagcaagccgaacaaggccgcctggcattcgaagccggcagcgacccgcgccaggccgagcaggtccgccagaccctggccgggatgctccagcgcctgcaggcgctgcgccacagcgagcttgacccggccgccctggcccaccaggccgaagccatcgaagcctaccgcaaggccttcgacgacctcgccgcagccgatcagcaacgcagcgccgcccgtggtgtgctggtgggcactgcacagcaggcgctggacagcttcgcccgcctcgaggaactgatggacgccagcctcgcgcagcaggccggcgacccgcaggccttgcaacgcagccgtgcggtggccgacctgcaccaacagttgctcatggtgcgttaccaggtgcgcggctacgtcttcgagcgcagcgacaaggccgagcaggccgcgttcgccgcgttcgacgccctccgccaggccggcacgacgctgcgaggccaattgcccggcgaggccgatgcggcgctggaacaggccatgcgcagcctccagggctatcgtggcggcatcgagcagttccgtgccggcgtcgtccgcacgcgccaggcgcagcaagcgatgcaaagcagcacccaggatatggcccgggccggccggaccctcaccgaagccggtcgccaattgcgcgagagcaccgccagccgcgaccgcgccagcctctggctgatcgccgcgctggccctggccttcggctgcgtcgccggctgggcgatcaaccggcagatcgtccggccgctggacgaagccctcgcgcaggccgaggccatcgccgccggcgacctcggcaagcgtccgcagaatcccctgaccctccagcgccgcgacgaactgggccagttgcagcgagtcatgcagcgcatgggtgacagcctgcgcgagctggtcgggcggatcggcgacggcgtcagccagttggccagctccgccgaggaactctcggcggtcaccgagcagacccgcgccggggtcaacagccagaaagtggagaccgaccaggtcgccaccgccatgcatgagatggccgccaccgtgcaggacgtcgcgcgcaacgccgagctggcctcccaggccgctcgccaggccgatgaagaggcgcgccagggcgacgcggtggtcgaccaggcggtgacccgcatcgagcgcctggctaccgaaatggacgtttccagcgaagccatggcgcgcctgaagaacgacagcgagcagatcggcagcgtcctcgacgtgatcaagtcggtggccgagcaaaccaacctgctggcgctcaacgccgccatcgaagcggcacgcgccggcgacgccggacgcggcttcgcggtggtcgccgacgaggtccgtggcctggcccagcgcacccagcagtccaccgccgagatcgagggcctgatccagcgtctccagcagggcgccggtgaagccgccgaacgcctggagaacagccgctcgctgaccgccagcacggtggaactggcgcgccgcgccggcgccgcgctggacagcatcacccgcaccgtctccgacatccagaacatgaacctgcagatcgccactgccgcggagcaacagagcacggtggccgaggagatcaaccgcagcgtcctcagcgtgcgcgacgtcgccgagcagtcggccgccgccagcgagcagaccgccgcctccagcggcgagctggcgcgcctgggcacgcagttgcaggcgcaggtgggacgcttccgcctgtaa

SEQ ID NO: 339842 - DNA, 462 bp, Pseudomonas aeruginosa
atgcgcccgatgaccatcgatatcgacgaactggccttcgccctggataccccgggaatcgaccactacctcgacctgcacagcggcaaggtgctgctgatctccgccgaggcgcccgatcccgaactggacgcattgctggaaaacgagccggaacgcctgctgctgatcgacccgctgagcaccacccagtcgctgggactgatgcaggatttcctccgcgaggtggaagagccgcacgcctatgcgacgctcgccaacgcgctgcagagccgcaagccgttcaaggccttcaagcactctctgatggagtacccggaactgttgcaggactggtaccgctaccagaacgagcgcctgcgcgaatgggcgctggactggctggaggacaacgatatccagccggccgcgcggcagagtccgacgtcgctcctgccgccgccgggcaagccgttcgcctag

SEQ ID NO: 339843 - DNA, 735 bp, Pseudomonas aeruginosa
gtgattgaagtacgcaacctgctgaaggtcttcgatacccgcggccaggtagtgcgcgcggtggacgacgtgagtacccgcgtggccaggggcgaggtgctggtggtgattggtccgtccggttccggcaagtcgaccttcctgcgctgcctgaacggcctggaggagttcgacgaaggctcggtgagcatcgacggcgtcgacctggccgacccgaggaccgacatcaatgcctaccgccgcgaagtcggcatggtgttccagcatttcaacctgttcccgcacatgaccgtgctcgaaaacctctgcctggcccagcgcgtggtgcgcaaacgcggcaaggccgagcgcgaggccaaggcgcgggcgctgctggccaaggtcggtatcgggcagaaggccgacgaatatccctcgcgcctgtccggcggccagcagcagcgcgtggcgatcgctcgcgcgttgtgcatggaccccaaggtgatgctgttcgacgaaccgacctcggcgctcgatccggagatggtcggcgaagtcctcgacgtcatgaagaccctggccgtggaaggcatgaccatggtctgcgtgacccacgagatgggctttgcccgcgaagtggccgaccgcgtgctgttcttcgaccacggcaagctgctggaggacgcgccgccggcgcagttcttcgacaatccgcaggacccgcgggcccaggccttccttcgccaggtcctctag

SEQ ID NO: 339844 - DNA, 963 bp, Pseudomonas aeruginosa
gtgaccaagaagaaacgttccgtctggccctggcacctgctgaccgggctgatcctgctggtcctggcctgggcgctgtggttctccacctcgctgatttcctatgaatggcgctggaaccgcgttccgcagtacttcgcctaccaggccgaggagccgttgcgggccaacgagatcggccgggtcgaggctatcgaggaacagggcagggacgcgcgcgtcacgctgcttggcgagagcggcgagaagcaggtcgtgaccgtcgcccaggacagcctgcaattctccgaaggcgacgacgtggccgagggcgacgcggtcggggtgacccgccactgggccgccggcccactgctctggggcctgtggaccaccctctggctatcgctggtgtccggtgccatcggcttggcgatcggcctggttgccggcctctgccggctgtcgaagaacccgaccctgcacgacctgtcgacgatctacgtcgaactggtgcgcggcacgccgttgctggtgcagatcttcatcttctacttcttcatcggcaccgtgctcaacctgtcccgcgagtttgccggggtcgcggcgctggcgctgttcaccggcgcctacgtggccgagatcatccgggccggcgtgcagtccatcgcccgcggacagaacgaggccgcccgctccctgggcctgaacgccggccagtcgatgcgctacgtgatcctgccgcaggccttcaagcgcgtgctgccgccgctggccgggcagttcatcagcctggtcaaggacacctcgctggtctcggtgatcgccatcaccgaactgaccaagagcggccgcgaggcgatcaccacctcgttctccaccttcgagatctggttctgcgtcgccgcgctgtacctgctgttgaacctgcccctttcgcacatggcatcccgactggagcggaggctcggacaaagtgattga

SEQ ID NO: 339845 - DNA, 801 bp, Pseudomonas aeruginosa
atgaaaaagtatcttgcttcattggttctgggcgtctgcgccctggtgggcgtggcttcggtccaggcggccggcgcggtggaggacgcggtcaagcgcggcaccctgcgggtcggcatggacccgacctacatgcccttcgagatgaccaacaagcgcggccagatcatcggcttcgaagtcgacctgctcaaggccatggccaagtccatgggcgtcaagctggagctggtctccaccagctacgacggcatcattccggcgctgctgaccgacaagttcgacatgatcggctcgggcatgaccctgacccaggagcgcaacctgcgcctgaacttctccgagcccttcatcgtggtcggccagaccctgctggtgcgcaaggagctggaaggcaagatcaagtcctacaaggacctgaacgatccgcagtacagcatcacctcgaagatcggcaccaccggtgagatcgttgcccgcaagctgatcagcaaggccaagtaccacggcttcgacaacgagccggaagcggtgatggacgtggtcaacggcaaggccgacgccttcatctacgactcgccctacaacgtggtggcggtgagcaagttcggcgccggcaagctggtctacctcgaccagccgttcacctacgagccgctggcgttcggcctgaagaaaggcgactacgacagcatcaatttcatcaacaacttcctccatcagatccgcgaagacggcacctatcagcgcatccacgacaagtggttcaagaacaccgagtggctgaaggaaatggaatga

SEQ ID NO: 339846 - DNA, 2586 bp, Pseudomonas aeruginosa
atgaataacccatccactacgaaagcaccgctggccgactacctcgctcatcttcccctggcggaagaggagcgggagcgacttggcgagtccgcttccttctccgagctgcacgctcgcctggcgggagcggaaggcgccgctgccgatgccgggggcgatcccgccctggcctcggtacgcgcccgcctgcagctgggcacccctgagctggacgacgccgagatgttcggcgtcgacgcccagggtcgcaccttcctcaagatttccccgccgatccgccgtaccaaggtgattcccgagccctggcgcaccaacatcctggtgcgcggctggcgtcggctgaccggacgcagcaacccgcccaagcccaagcgtgccctgccgcgggcccgctggcagcgggtcggctcgctgcgccggttcatcctgctgttgttgatgctggcgcagacctcggtcgccacctactacatgaaaggcatcctgccctaccagggctgggccttcgtcgacctggaggaactggcccagcagagcctgctggataccgtccagcaggtgctgccctatgtcatccagttcggcatcctggcgctcttcgcgatcctcttctgctgggtctcggccggcttctggaccgcgctgatgggcttctgggagctgctcaccgggcgcgaccgctaccggatctccggcagcagcgccggcagcgagccgatcgccgccgacgcccgcacggcgatcgtcatgccgatctgcaacgaagacgtgccgcgggtattcgccggcctgcgggcgaccgtcgagtcgatggccgccaccggcgagatggagcgcttcgacttcttcgtcctcagcgacaccaacgacccggatatcgccgtcgccgagcagcaggcctggctcgagctgtgccgcgagaccaagggcttcggcaagatcttctaccgtcgccgccggcgccgggtgaagcgcaagagcggcaacatcgacgacttctgccggcgctggggcggcgactaccgctacatggtggtgatggacgccgacagcgtgatgagcggcgactgcctagccaagctggtgcgcctgatggaggccaatcctgaggcggggatcatccagaccgcgccgaaggcgtccggcatggacaccctgtatgcgcgcatgcagcagttcgccacccgcgtctacggcccgctgttcaccgccggcctgcacttctggcaactcggcgagtcgcactactggggccacaacgcgatcatccgcatgcagcccttcatcgaccactgcgccctggcgccgttgccgggcaagggctcgttcgccggcgcgatcctgtcccacgacttcgtcgaggctgcgctgatgcgccgtgccggctggggcgtgtggatcgcctacgacctcgacggcagctacgaagaactgccgccgaacctgctcgacgaactcaagcgcgaccgccgctggtgccacggcaacctgatgaacttccgcctgttcctggtcaagggcatgcacccggtgcaccgcgcggtgttcctcaccggggtcatgtcctacctgtcggcgccgttgtggttcttcttcctggtgctttccaccgcgctgctggcggtgcaccagctgatggagccgcagtacttcctggaaccgcggcagttgttcccgatctggccgcagtggcatccggagaaggccatcgcgttgttttccaccaccctgaccctgttgttcctgcccaagctgctcagcgtaatgctgatctgggccaagggcgccaagggtttcggcggggtgatccgagtgaccctgagcatgctcctggagatgttcttctcggtgctgctggcgccggtgcgcatgctcttccacacccgcttcgtgctggccgccttcctcggctggtcggtgcagtggaactcgccgcagcgcgacgacgacgccacgccctggagcgaggcgatccgccggcacggcatgcagaccctgctaggtatcgcctggaccctgctggtggcctggctcaacccgcgcttcctgtggtggctgtcgccgatcgtcggttcgctgatcctgtctatcccggtatcggtgatctccagccgggtgaagctgggcctgcgcgcccgcgatgaaaagctgttcctgatcccggaggagtacgacacgccgcgcgagctgcgcgccaccgacgagtacacctacgagaaccgctggcatgcgctcaaggatggcttcctcaaggccgccgtcgatccgttgctcaacgccctggcctgcgccatgggcacggctcgccacaaccgtgcgcaagccatcgagacggtgcgcggcgagcgtatcggcaaggccatcgagaagggcccggaacagctcgacggcgccacgcgcctggccctgttgagtgacccggtagcactttcgcgcctgcatacgcgggtctgggaagaggaccgcgacgactggctcggccgctggcgcaaggccgaggcggacgacccccacgccgccagcgtaccgctggcccaggtagtgcccggcgacgccggcctgctgcccgccgcccagtcctga

SEQ ID NO: 339847 - DNA, 1578 bp, Pseudomonas aeruginosa
gtgattttccgttccgtttcaaacaccgatttccgcgcccgcgtgcgcaccctgctgcttgccggctcgaccgcgctggcattcgtcgccgccccggtatgggcgttcagcatcgacgacgtggcgagcaaggccaaggacctggccggcgacaagtattccgcgccgaccagcaacctgccatcggaattcagcgaaatgaaattcgccgattaccagcagatccgtttcatcaacgagcgcgcctactggggcaagctgaagacgtcgttcaagctgagcttctatcaccagggcatgcacttcgacacgccggtgaagatcaacgaggtgaccgctaccacggtcaagccgatcaagtacgatcgcaccaagttcgatttcggatccctgaagttcgacgagaatgccaccaaggatctcggctatgccggtttccgcgtgctctatccgatcaacaaggccgacaagcaggacgagatcgccaccttcctcggcgcgagctacttccgcgtggtcggcaagggccaggtctacggtctgtcggcgcgcggcctggcgatcgataccgcgctgccttcgggcgaagagttcccgcgcttccgtgaattctggatcgagcggccgaaggcgcaggacaagcaactggtgatctacgccctgctcgactcgccgcgggccaccggcgcctaccgcttcgtgctgcgtccgggcaaggatgcggtgatggatgtccaggcccgcgtgttcctccgcgacaaggtcagcaaactgggcctggcgccgctgaccagcatgtacctgttcggctccaaccagccgtccgagcagcacaacttccggcccgagctgcatgactccagcggtctgcagatccatgccggcaacggcgagtggctgtggcgtccgctgaacaatccgaagcacctgtcggtgagcaccttcagcgtggagaacccgaaaggcttcggcctgctccagcgcggccgcgagttctcccgctacgaagacctggacgaccgctacgacctgcgtccgagcgcctggatcgagccgaagggcgactggggcaagggcaccgtggaactggtggaaatcccgaccccggacgaaaccaacgacaatatcgtcgcgttctggaaccccgagacccagcctgaggtcggaaagccgctggacttcgcctaccgcctgcactggaccatggatgaagacgagctgcacgacccgaaatcctcctgggtcaagcagaccatgcgctcggtcggcgacgtgaagcagaagaacctgatccgccagcaggacggcagcaccgccctggtcgtcgacttcgacgggccggccctgaaggacctggcgccggacgcgccggtgactacccaggtcagcaccgacagcaacgccgaggtggtggagaacagcctgcgttacaacccggtcctgaaaggctggcgcctgacgctgcggatcaaggtcaaggatccgaagaagccggtggaaatgcgcgcggcgctggtcgacgaggcgcagaagccactgagcgaaacctggagctatcagctgcctgccgatgaataa

SEQ ID NO: 339848 - DNA, 438 bp, Pseudomonas aeruginosa
atgaaggcattgctgcagcgcgtcggcgcggcgcgggtggaggttggcggcgaaatcgtcggctccatcgatcgcggcctgctggtgctggtcggggtcgagcccgaggatggcgagcgttgcgcggcgaagatgctgcacaagctgctcaactacagggtgttcggcgacgacgagggcaagatgaaccggtccttgctggacgtgcagggcggcttgctgctggtctcgcaattcaccctggcggcgaacacccgcagcggactgcgtccgagcttctccagcgcggcgccgccggcgcaaggagagacggtgttcgagcacctggtgaaactggcgcgggaggcctatccgcaggtggcgaccgggcgtttcggcgccgacatgcaggtgcacctggtcaacgacgggccggtgaccttcctgctggagagttga

SEQ ID NO: 339849 - DNA, 972 bp, Pseudomonas aeruginosa
atgctagttctgtatccggaaattaaaccctacgctcgccacgagctggccgtcgacgaaccgcatgtgctgtatgccgacgaaagcggttcgccggacggactgccggtcgtcttcgtccacggcggccccggctctggttgcgatgccctgtcgcgtcgcttcttcgatcccaacctctaccgtatcgtcaccttcgaccagcgcggttgcggccgttccacgccccacgccagcctggagaagaacagcacctgggagttggtggcggacatggagcgcctgcgcgagcacctgggtatcgagaagtgggtgctgttcggcggttcctggggctcgaccctgtcgctggcctacgcgcagacccatcccgagcgggtccatgcgctgatcctgcgcggcatcttcctctgccgtccgcaggacatccactggttctaccaggaaggcgccagccgcctgttccccgactattgggaagactatgtcgcgccgatcccgccggaagagcgcggcgacctgctggcggccttccacaagcgcctgaccggtagcgaccagatcgcccagatgcacgccgccaaggcctggtcgacctgggagggccgcaccgccacgctgcgccccaaccccatggtggtggaccgcttcaccgagccaggcagggcgctgtcgatctcgcgcatcgagaaccacttcttcgtcaaccagggcttcctcaggcccaaccagttgctcgaggacatgcaccgcatcgcccatctgcctggcgtgatcgtgcatggccgctacgacgccatctgtcccctggacaatgcctgggccctgcaccaggcctggccgaacagcgaactgcagatcatccgcgacgccgggcacaccgccagcgagccggggatagtcgatgcgctggtgcgcgccaccaacgagatcggccggcgactgctcgacctgccgccggaggccgaatga

SEQ ID NO: 339850 - DNA, 477 bp, Pseudomonas aeruginosa
atggccgaggccttgcgacaccgtatccgcgccgccggcctgctggtggtggagcaacgcatcctgctggtccgccacgaggtcggcggcgacatctactggattccgcccggcggcggcttcgagtcggaatgcgacgaatcgacgaaggataccgtccggcgcgagtttttcgaggagaccggcctgcgggtggacgtcggcccgctggtctacgtgcgcgaattcgccgaacccgccgccgggcgcttccacatggagctgttctaccgcatcgacgcctggcgtggcgagccgaccctggccaacctgaagggcctgggcggcgacgagttcgatatccgcgaggtcggctggatcgcccgcgacgaactgcctggcctgccgtctttctatccggccgaactggccgacgacgtctggtcgcgcctggacgcgccgacgccatcgatccgccacctcggcctgcagcgctag

SEQ ID NO: 339851 - DNA, 900 bp, Pseudomonas aeruginosa
atgaaaacccttgtatccagcactttcgcactctccctgtcgctcgccatcggcgccgcgcaggccgaggaactcagcggcaccctgaagaaggttgccgacaacggcacgataaccctgggttatcgcgatgcctcggtgcctttctcctaccttggcgataacagcggccagcccatgggctattcggtggaactggccggcaaggtggtggaacggctcaaaagcaccctcggcaagccggaactcaaggtgaagtacaacctggtcacttcgcagactcgcatcccgctggtgcagaacggcaccgtcgacctggagtgcggctccaccggggtcaccgccgagcggcagaaacaggtggcgttctcctacggcttcatctacgtcaagggccagttgctgacccgcaaggacagcggcatcgcccacttcgacgacctcaagggcaagaacgtggtgaccaccgccggcaccaccaacgagcgctacctgaagaactacaacgccgaacacaagctggggatgaacgtggtcagcgccaaggaccacggcgaagccttccagatgctgcaatcgggtcgcgcggtggccttctacatggacgatgcgctgctctacggcgaacgcgccaaggcgcgccagccgcacgactgggtggtggtcggcgagccgcaatcgcgggagatctacagctgcatggtgcgcaaggacgacccgcagttccttgctctggtcaacgagaccctggccgggctgtatcgctcgggcgagatacagggcatctaccagcgctggttccagcagccgatcccgcccaaggggttgaacctggagttccccatgaccgcggagctgaaggcgatcctcgagaaccccaccagcgatccggtgcagtga

SEQ ID NO: 339852 - DNA, 351 bp, Pseudomonas aeruginosa
atggaaccgacccgtatcgccaccaacgaccgcctgtccgccgcggtctgcttcgacgccttggtatttctttccggccaggtgccgggccaggccgaggatatccatggccagacccgcgaggtgctggcgaagatcgacgcgctgctggccgaggccgggtcgcgcaaggagcgtatcctcagcgcgaccatctacctgaaggacatcgcccgcgatttcgccgccctgaacgaggtctggacccagtggttgccgaccggccaggcgcccagccggaccaccgtccaggcggagctggcgcgtccgtcggtgctggtggagatcaccgtggtggcggccaggggctga

SEQ ID NO: 339853 - DNA, 1251 bp, Pseudomonas aeruginosa
atggctcagcgggtttgcatcatcggcgccggcgtggtcggcctggccacggcctacgccctggttcgcgaagggttcgacgtgaccctggtggaagcgcgcgagcggggcgggctggaaaccagctacgccaatggcgggcagttgtcctatcgctacgtggcgccattggccgacagcggcgtgccggcccaggcgctcggctggctgctgcgcaacgatgcgccgttgcgcctgcggccgcgccttgatccggcgcagtggcgctggctgctgggcttcctcgcggcctgccgcggctcgctgaaccgccgcaatgccgcgcacctgctgcgcctggcattgctcagccagcgcaccctgcaggcctggcgcgaggaggatggcctcgatggcttcgactggcggcgcaacggcaagctggtggcgtttcgccaaccggccagctttgcgcgggcccgccagggcctggccgatccttcggcgcaattcgtcctgaccgccgccgagtgcctcgcgctggagccggccctgtccgccgcgcccttcgtcggcggcatccacacgccggacgaggaggtcgccgactgccatgccttctgcgtgcaacttgccgagcgcctgcaggcttccggacattgccggcaactgcatggccgcagggtgacgaagatcgtcgagggcggcgcggcggtgcgtggcgtcgaggtcggcggcgatctcatcgaggccgatcatgtggtgctggccgccggctaccgcagcgccgaattgatgctgccgggcctgcgcctgccgctatacccgctcaagggctatagcctgaccctaccggtcggcgcgcagcaccgcgcgccggataccagcatcaccgattacgaccgcaagatcgtctacgcgcggatcggcgagcggctgcggatcgccgcgatggtcgacatcgtcggcttcgaccccggcctcgagcccgcgcgcctggcactgctgcgccagcaggcgcgggacacgttcccgcagggcggcgatttcgacgccgccgtcgaatgggccggcatgcgcccggccacgcccaccggggtaccgctggtgggcaacggcggctaccgcaacctctggctcaacctcggccacggcgcgctcggcttcaccctggcctgcggcagcgcgcgcctgctggccgagcagatcggccgccgcccgccgagcatcgataccactggcctgctgccgcgcggcgcgctggctggctga

SEQ ID NO: 339854 - DNA, 912 bp, Pseudomonas aeruginosa
atgatgaagctccgccatatcgaagtgttccaggcgatccgccaggctggctcggtcagcggcgccgcgcagttgctgcatgtgtcccaaccggcggtgagcaaggtcctgcagcacgccgagcagcaactgggcttcccgctgttcttgcgagtgcgcggcaagctgctggcgactccggaagcgctggaactggagcgcgaagtggccaagctcagcgatagcctgcaggcggtgcggcgcctggcgcagaacctgcggcgccagccgggccacagcctgcgcatcggcgccaccccggccctggcgctgtcgctgctgccgcgggcgatcggcgaatggagcgcgcgctatccgcagagcggctgcgaactggccaccttgcattcgcgcgagctggtgcagggcctgctgatgcgcgaactggacctggccctgagcctgaagcagccggaacaccccggcctgcgcggcgaagccatcgccagcggcgtattggtggccctggcgccgcgcgaacactggcccgaagcggaacgccggcagccgctgagcctggccgggctggccggcgaagcgctgatcgggctgtccaccgccgacccgctgttcgcccgcctggaggattacctcagcgccgtggagccaccgccgcaggtgaagatcgccgtgcagacctacgccctcgcccgcgccctggtggaggctggggcgggcctggcgctggtcgatcccttcaccgccctcggcgccgacccgcacagcaccgcgatccgcccattgagcccggccttcccggtcaccctctacgccatcacccgcgccgacgaaaccccgccgcacaccctcgctccgctgctgcggatgctcgcccgccaggccgaggagcgtttgcgggccgtgcagatgtag

SEQ ID NO: 339855 - DNA, 681 bp, Pseudomonas aeruginosa
atggccttccagtggccgcgctcggccgccttgctgtacaacccgacgatacgaggccacggacgcaaggtatcgggcttggccagggtcgccgcttcgcgataccaagcatcggcctgcgggtccagggggggtagatggtccttttcgttaacgcagacaaaaggcttgctgtcagccatagcgggaactgctgcgagacaaagtacagcccatattccaatagccattatccgaatcactgacccggcttccagtcgggtcgagctgcgtcgtagccctggacggggtggggtggcaaggggttatcttttaccaaattgggaaaacgaagatcggggtcggcatcaatttgcagatagagggagtagtagaatttctcaagcttttcatccggcgtataccacattgcacttgaaggaggcgtcctctttccgaagacgcgcgagagaaaaaaggctgcgctcctgccgccttgagagacggagacttgatagtagccaagtgcctttggataattatgctcaaccaactcatagtagcttccaagctcatagctcgccggagcataaccttgactggaagcacaactggtatacaccacccccaattccttttccttggccacataaatatagagtttacccaactcggtcagtgctggcgggttccccaaactag

SEQ ID NO: 339856 - DNA, 819 bp, Pseudomonas aeruginosa
atggccgacagtaagccgttcgtctgtgttaatgagaaagaccatttaccacctctcgatccccaggccgatacctggtatcgggaagcagttgcgctagctaagcctgacaccttgcgtccttggggacgtattgtggacttatacagtaaggcagttgagcgtgggcattggaaggcgatgcataatttggcgaatctttatcgcacggggtggcccggaggggtagaaaaagatacgcagaaggcactggacctctatcaaaaaatgatcgatctggaggtaccccaagggttctatgatatgggagcaatgatcggcaatcgtgcaggggtcaagaatcctgcaactgacgggcttacttttcttgataaggctgctagcctaggaaatccgccggcactaaccgaactaggtaagctttatatatatgtggccaaaaaaaaggatttggggttggcgtatactcactgtgctgctagccagggctatgcgccggctaattatgagttgggagcgtattacaagatagtggagcacaatttcccaaaggcactggtttattatcaggcgtcagtctctcaggggggcaagagcgcggcttttttcctatcacgagtcttcggaagtgagactcctcctgcaagtgcaatgtggtacgcccccgacgaaaagttgcaagaagcgtattattcaatctacaaaaagcttgaggccgaccctgacttacgtttcccccatctgatagaagaccatcctctgcctccacatccaacgcaaggctatgatgccgatcggcctgactggaagccagagtga

SEQ ID NO: 339857 - DNA, 2205 bp, Pseudomonas aeruginosa
atgagcgacctgtacaaaccgcagaccctcaaactgtacgcgcaacaggccggcagcgtccggctgaccctcgactggttcgccaacaaggctttctacccgccgcgcgcgggtgtgcacatcaagccgctgatcaatggccaggcggccttcgacgcggtgcatgcggcgatggaagcggcccggcacagcatcgacatcatcacctggggcttcgacccggccatgcgcttcaaacgccccgacggaccgcgaatcggcgaattgctgcagacgaagggccgcgaaggagtgcaggcgcgagtgctggtctggagcaaccaactcgccaggctcaaggaaaacaccatccccggggccggcgtcggcggttccggcggcacctgggcgggctcgggcgtcgccagcggcagcgcggtggacaacgaggtgctgcgactggagcagcggcgccagcataacctcaacctcatcgcgcggcagaaggaagccctggagcgctcggaacggctgcaccgcgaaggcaggctgccgagcttcgacccgcggggcgccgcccacgcgcggacgcgcatcgccgagctggaggcggagaacgccgagatccagcgcactctcgacagcagcgaggcccagggctacggcggcaagcgcggttccggcggcacccgccaggatccctgggggcagatattcacccgcgactggttcaaggcggtacgcggcggtgggttgcagaacgtcgagttccgtacccgcgacttcgagcagacggccaggccggtgatgaacggcgagcaagtgcgcctcgtcaacgggcggctgcaaagcctgatccacctattgcgcgccgatggcatcgacgacctgggcatcggccagttgctggtactcacccagttcgccagccatcaccagaagatggtcctggtcgactatggcagcccgcaggccatcggcttcgtcatgggtcacaacatgcaccgcaactactgggacaccagcgcccacctgttcgacgaccgcgccgccggtcgcgatcccgggttcgggccctggcaggatatctccatgcaggtccagggaccggtgctggccgacctcagccgcaacttcagcgaggcctgggacctcgagacgccgtggtacaagcgcgacgccttgccgctgccgaagatcgccacgcccgccagcaacagcgtcgcgcagatttgccggacccagccgcaggacgacgagcgctcgatcctggagcactatctcaaggccctgggcaatgccaccgactacgtctacatggaaaaccagtacttccgttatgccggcttcgccgagcgcctgcggaagactgcgcaggtgcgcaaggcccggggcgtgcctggcgacctgtacctgttcgtcgtgaccaacacccccgactccagcgacgcctcgaagaccacctacgacatgatgaagggcctgggccaggagcaactgatgccgcaggtacagcgcgacctggcgcatgacttgagggaaaagcgggagcagttgaagcaggtcagggaaaacctacatcccgatccctatgtccggcgcggccaggaaaacaacatcgaacggctggagcgcaagatcgaggcgctcgaagagaaaggcgtgacgccggaagtcgagcaacgcctcggcgatctcggcgcgcaggagattcccggactggcgaagaacaccggcgaggacgacaagccctatcaactcgccgaagtacccggcctcaaggtggtcgtcgccaccctggccaccagtgaccctgcccccggcagcccgccgccagcgcgcctgtccgccgaagccgaggccgccctcggggcgccgccgctgaaggcgcgctacaaacacatctacgtgcactccaagctgctgctggtggacgacctctataccctgctcagctcggccaatatcaatgtccgcagcatgcatggcgacagcgagttggggattgcccagcccaatccggatttggcgagggcgatgcgggaggagttgtggggggcacatgcttatgaagttgccaaaacgatcgaagacaacttcgaactgtggagtcagaagatggatgataactggaaggcccaagtggcagatgagccttttacctcgcacttgctgcgtttctgggatgtcaccacgccctatagtcccaatcttacggtggactga

SEQ ID NO: 339858 - DNA, 2373 bp, Pseudomonas aeruginosa
atgttcgcccccgccaaccagacgcacttcagccttcgcatcgaaaacctccggcacgacttccaggtactcgccttccgcggtcgcgaagccatcagccagccctttcgcttcgacctggagctggtcagcgagcgatccgatctggacctcgacgcgctgctgcaccagccggccttcctgatcctctcgccgagcgggcaaggggtccacggacagctcaccagcatcgcccagggggactccggcaagcgcctgaccggctatcgcgcgaccctggagccgcgcctggcctacctggggctgtgcagcgaccaacgcatcttccagcgcctcagcgtgccggaaatcatcggccgggtgctggagggccacggcattctcgccgacgcctaccgcttccagctgggcccgacgccgtacccggcccgcgaatactgcacgcagtacgacgaaaccgacctggcgttcctcagcaggctctgcgaggaggaaggcatccattaccaccatgagttttctgcccagggccatatgctggtcttcggcgacgaccagacctcctttccgcggctgcaacgccccgtcgcctacgtgcaggacgccgggctggtcgccgaccagccggtggtcaagcgcttcggcgtgcgcttcgacacccgtgccagccgggttacccggcgcgactacgacttcgagcaacccgcgttgcagatgcaggccgcccatggcccgcagcccggggcgcagcaaccggacctggaggactacgactatcccggccgcttcacccaccgcgagcgcggcaagcacctgagccggcgcgcgctggaacggcatcgcgccgactacctacaggccaggggcgaaagcgacgaaccggcgctgctcagcggacacttcctgacgctgtccgcgcatccccgcggcgaatggaacgatctctggctgcttaccgaggttctccacgaagggcggcagccgcaggtactggaagagtcgatcgacagcgacgtcgcgcagggccggggcgatttccgccagggctatcgcaaccgtttcgtcgccactccctggagcgcgcatttccggcccccgctggagcatcccaggccacacgtgctgggctgccagacagcggtcgtgaccggccccgccggcgagaccatccactgcgaccaatacggccgggtcaaggtgcagttcttctgggatcgcctcggccaggccgacgacaacaccagttgctggttgcgcgtcgcctccaactgggcgggcaagcgctatggcggcgtcgccatcccgcgggtgggcatggaagtcctggtgggtttcctggagggcgatccggatcagccgctggtcaccggctgcctctaccacagcgaaaaccgggtgccctacgagctgccgcagaacaagacccgcagcgttttcaagaccgacagctaccccggcggcggcggtttcaacgaactgcgcatcgaggaccgcaagggccaggaacagatcttcgtccacgcccagcgcgactgggacgagaacatcgagcacgaccagaagatccgcgtcggccacgagcgccacgacacggtcgagggcgatagctacagcgagttcagggccgaggaacagcgcacggtccatgccgaccgcaaggtcgaactgaaggcggccgaccacctcagcgtcgccgacgcgttgcacctgaggatcggtaccggccagttcgtcgaggcgggcgacgagatccatttcaaggccggcgacaaggtagtgatcgaggcaggcatggagctgaccctaaagggcggtggcagcttcgccaggctcgacccgggcggtgtcaccctcgacggcgcccaggtgatgatcaacagcggcggcagccccggcatcggtagcggcgttcgcgcgctgtcgccgctgcaaccgctcgcggccgacgccgcggcggcgggaggcgccttgttgggagccatcgcccagaaggtcggcgaagcgccgcagaaactcctgcgtttcgaactcagtccgttgcccggcgtgccatcggcggccaggcaaccgtatcggctctacgccaacggtgccttcaaggaggagggcatcgccgacgaaggcggcgcaatcagcttcgaaccgctgccgggcgaacgcacctatcgcatcgagaccgccaatggccacgcctacgaagtggagatggtcgaccagccggacgcactgcaggtcgacgatcggctcgcccagcaggggttccgcgactaccgggcggaaatgccccagcacaagccgcgttccgccccggacgcctaccggcgcgacgcctcgcggcccggcgccgccgacaaggatgaccccacgccatga

SEQ ID NO: 339859 - DNA, 801 bp, Pseudomonas aeruginosa
gtggatgaagtcctgagtttcaagcgcggccgcgtgccgctactgatcagcatgccgcaccccggcacgcgcctgaccccggcggtggacgccggcctggtggaggaggcgcgggcgctgaccgataccgactggcacattccccggctctacgatttcgccgaggaactgggcgccagcaccctggctgcccactattcgcgctatgtagtcgatctcaaccgcccttccgacgacaagccgctgtacagcaccgccactaccggcctgtatccggacaccctgttcgacggccggccgctctaccgcgaaggcatggcgccgtccgccgaggaacgcatgcgctacctggccgaagtgtggacgccttaccaccggaccatcgccgaggaactggcgcggctgaaggccgagttcggctacgcgctgctctgggacgcccactcgatccgttcccacgtgccgcacctgttcgacggccgactgcccgacttcaatctcggcaccaacgccggcgccagttgcgatccagcgctggcggcccgcctggaggcggtctgcgctgccgccgaaggctacagccatgtgctcaacgggcgcttcaagggcggccacatcacccgccactacggccagccggagcagcacgtccatgccgtccagctggagctggcgcagtgcacctacatggacgagcaggccccgttcgcttaccgcgcggacctcgccgaagcgacccgcgcggtcatccgcgaactgctggaaagcctcctcgcctgggggcacgagcgctacgcctga

SEQ ID NO: 339860 - DNA, 1209 bp, Pseudomonas aeruginosa
atgaaacgactctggcagcattgccatgccgccaccctcaagggcggcaagtactcgatcgtcgaggacgccgccctggtcaccgacggtccgctgatccactggatcggcccgcgcgccgaactgccgcctgacgactacgccgaacgcatcgacctcgatggcgcctggctgaccccggggttgatcgactgccacacccacgcggtgttcggcggcaaccgcagcggcgaattcgagcagcgcctggagggcgtcagctacgccgagatcgccgccgccggcggcggcatcgccagcaccgtacgcgccacccgcgaggccagcgaggaagaattgctggccagcgcgcgcaagcgcctggagcccttgctgcgcgacggcgtgacggcgctggagatcaagtccggctacggcctcgacctggccagcgagcgcaagatgctacgggtcatccgccgcctcggcgaacgcctgccggtgaccgtgcgcagcacctgcctggccgcccatgcgctaccgccggaatacgccggacgcgccgacgactacatcgagcatatctgctcgacgatgctccccgcgctggccggagagggactggtggacgcggtggacgccttctgcgagcacctggcgttttccccggcgcaggtcgagcgggtattcatcgccgcccgagagctgggcctgccggtgaagctgcacgccgagcagctatcctcgctgcacggttccagcctggcggcgcgctaccgggctttgtcggccgaccatctggagtacatgaccgaggacgacgcccggtccatgggcgaggcgggcaccgtcgcggtgctgctgccgggcgccttctacctgttgcgcgagacccagctgccgccgatcgatgccctgcgccggcacggcgtggccatggccattgccagcgatctcaatcccggcacctcgccagcgctgtcgttgcgcctgatgctgaacatggcctgtaccctgttccgcctgaccccggaggaggcgctggccggcgtcaccctgcacgccgcccgggcgctggggctggaagcccgccacggcagcctggaggttggcaagctggccgacttcgtcgcctgggacatcgagcgtccggcggagctggcctactggctgggcggcgatctgccgaaacgcgtcattcgccacgccgaggaggtataccgtggatga

SEQ ID NO: 339861 - DNA, 1533 bp, Pseudomonas aeruginosa
atgagcgacctaccgagcgtcgtgttcggcgacggtccgctgcgttggcaggaactggtcgcggtggcccggcacggtgcgcgcctggaactgtcggcggcggcctgggcacggatcgacaatgcccgcgccatcgtctgccgtatcgtcgccaatggcgagcgtgcctacggcatcagtaccggcctcggcgcgctgtgcgacgtcctgctggaaggcgagcagctcgccgagctgtcgcgcaacaccttgctcagccatgcctgcggggtcggtgagccgctgcgcgacgaacagacccgggcgatcatctgtgccgccgtcgccaactacagccagggcaagtccgggctcgaccgttcgctggtggaagggctgctggcgctgctcaaccacgggattaccccgcaggtgccggcccagggctcggtgggctacctgacccacatggcgcacgtcggcatcgccctgctcggcatcggcgaggtcagctaccgcggcagcgtcgtgccggccgccgccgcgttggcggcggaaggcctggcgacggtgcgcctgggagccaaggacgggctctgcctggtcaacggcacgccgtgcatgaccggcctcgcctgcctggccctggacgacgcgcagcgcctggcgcagtgggccgacgtgatcggggcgatgagcttcgaggccctgcgcggccaactggcggcgttcgacgccgagatcgttgcgctcaagccgcatcccgggatgcagcgggtcgccgccaatctgcgagccttgctggctggcagccaggtactggagaacgcccgcggcatccgcacccaggatgccctgagcatccgctcgataccgcagatccatggcgcctgccgtgaccagttggcccacgcggcgcggcagatagagaccgaactcaactcggccaccgacaacccgctgctgctgggtacgccggaggcctaccgggtggtatcccaggccaatccccacggcgaatcggtggcgatggccgccgacctgctggcgatcgccgtggccgagctgggcggggtcgccgagcggcgcctggatcgcctggtcaacccgctggtcagcggcctgccggcgttcctggtgggcaagccgggagtcaactcggggatgatgatcacccagtacgtcgccgcctccctggccggcgagaaccgccagctggcgcagccggcggtggtcgacaacttcgtcacctcggcgctccaggaggaccacctgagcctcggcaccagtgccgcgctcaagcttggcagggccctggagaacctccggcggatcctcgccatcgagtacctgctggccgcccaggccttcgaattcctcgccccgcaacgcttcggccagggcaccgcggcggcctggggcatcctgcgcgagcgcgtgcccgcgtacgacaccgaccgctggctggctcccgacatcgccagcgcggcggccatcctcggcgagcggaagagtctcgcccggctggccgcgagcataggagacctgcaatga

SEQ ID NO: 339862 - DNA, 831 bp, Pseudomonas aeruginosa
atgagcggtgcgcagatgaacaagatcgaagtgaagaacgtgttcaagatcttcggcccgcgcgccgatgccgcgctggctcttatccgccagggacgcagcaagggcgaagtgctggcgcagaccggctgcgtggtcggcgtcaacgacctgtcgctgaccatcggtgctggcgagatcttcgtgatcatgggcctgtcgggttccggcaagtcgaccctggtgcgccacttcaaccgcctgatcgaccccaccagcggcgagatcctggtggatggcgaggacatcctgcgctacgacatggaagccctccggcaattccgccggcgcaagatcagcatggtgttccagagtttcggcctgctgccgcacaagagcgtgctcgacaatgtcgcctacggcctgaaggttcgcggcgaaagccgggcgcagtgccacgagcgggccctgcactggatcgccacggtgggcctgaagggctacgagaagtcctatccgcaccagctttccggcggcatgcgccagcgtgtcggcctggcccgcgcgctggccgccgacactgagatcatcctcatggacgaggccttcagcgccctcgacccgttgatccgcgcggacatgcaggaccagttgctggaactgcagaaaaccctgcacaagaccatcgtcttcatcacccacgacctcgacgaggcggtacgcatcggcaaccgcatcgcgatcctcaaggacggccaactgatccaggtcggcacaccacgggaaatcctccaccagccggccgacgactacgtcgaccgcttcgtccagcggcgggtggcgaacctatga

SEQ ID NO: 339863 - DNA, 852 bp, Pseudomonas aeruginosa
atgtttcccgaacgcctgacattttccatcgccgactgggtcaacgcttgggtcgacgccctggtgaccaactacggcgacctgttccgcaagatctccgacaccctgctgtgggccatcgtcaacctcgaagggctgctccgcgccacgccctggtggctattgctggcgatcgtcgcggcgatcgcctggcacgccacccggcgcctgctgccgaccctggtgatcaccggcctgctgttcctggtcggcgccgtcggcctctgggacaagctgatgcagaccctcgcgctgatgctggtggcgaccttcatctcggtgctgatcggcatccccctgggcatcctcgccgcgcgcagcaaccgcctgcgcgcggtactgatgccgctgctggacatcatgcagaccatgcccagcttcgtgtacctgatcccggtgctgatgctgttcggcctgggcaaggtgccggcgatcttcgccaccgtgatctatgccgcgccgccgctgatccgcctcaccgacctgggcatccgccaggtcgacagcgaggtgatggaggcggtcaacgccttcggcgccaaccgctggcagcagctgttcggcgtgcagttgccgctggccctgccgagcatcatggcggggatcaaccagaccaccatgatggccctgtcgatggtggtgatcgcttcgatgatcggcgcccgcggcctcggcgaagacgtactggtgggcatccagacgctgaacgtgggcaagggcctggaagccggcctggcgatcgtcatcctcgcggtggtgatcgaccgcatcacccaggcctatggccgttcccggcacgagacgagcaaatga

SEQ ID NO: 339864 - DNA, 969 bp, Pseudomonas aeruginosa
atgcgatacaagaagtcgatgttgagtattctctgtgccctcggcctgctcgccgccgcggcgggcgcccaggcggaaggctggtgcgagtccggcaaggcggtgaaattcgccgggctgaactgggagagcgggacgctgctcaccgaactgatgcagttcgtcctggccaagggctacggctgtaccaccgacagcctgccgggcaactcgatcaccatggagcaggcgctgagcaccaatgacatccaggtcttcgccgaggagtggatcggccgcagcgacgcctggaacaaggccgccgcggccggcaaggtggtcggcgtcggcgaacccatcgtcggcgcggtggagggctggtacgtgccgcgctacgtgatcgagggcgacccgcagcgcaagctcgaggcgaaggcgccgaagctgcgctctatcgccgacctggcgcagtacgccgaggtcttccgcgacccggaagaaccgggcaaggggcgcttctacaattgcccggccggctggacctgcgagctggagaacagcgagatgctgaaaagctacggcctggaggagacgttcaccaatttccgtccgggcaccggcccggcactggacgcggcggtgctgtcgagctatcggcgcggcgagcctatcctgttctactactggtcgccgacgccgctgatgggccgtgccgacctggtgcgcctggaggaaaggcccggcgtcgacaagcgcatcaggatccaggtcggcctgtcgcggaccttccacgaccaggcgccggagctggtggcggtgctggagaaggtcaacctgccggcggagctgctgaacagcgacctggcgcggatggccaaggacaggatcgatgcagcgcgcctggcgcgcgagttcctcaaggagcaccccgaggtctggcacgcctgggtcgacgaggacgcggcgaagaagatcgaagcggcactctga

SEQ ID NO: 339865 - DNA, 1404 bp, Pseudomonas aeruginosa
atgacgcacgacacggggcttcggcgcgggctgaacgcccgtcatattcgtttcatggcactggggtcggcgatcggcaccggcctgttctacggttccgcatcggccatccagatggccgggccggcggtgctgctggcctacctggtcgccggcgcggcggtgtacatggtgatgcgcgcgctcggcgagatggcggtgcacgagccggtgtccggctcgttcggccattacgccagcagctatctcggccccctggccgggttcgtcaccggctggacctacgctttcgagatgatcatcgtctgcctcgccgatgtcaccgcgttcggcatctacatggggttctggtttcccgacgtgccgcgctggatctgggtactgtccatcgtgctgttcatcggcgggctgaacctctgccatgtcaaggtcttcggcgagctggagttctggctgtcgctggtcaaggtcggcgccatcgtcgcgatgatcctcgccgggctcggcatcatgttcttcggcttcagcctggacggcgcggcgacgtccgccaccggcgtgcacaacctgtggcagcacggcggcttcctgcccaacggttgggccgggctggtcgcctcgctgtcggtggtggtgttcgccttcggcggcatcgagatcatcggcatcaccgccggcgaggcgcaggacccgcagcgggtgatcccgcgggcgatcaatgcggtgccgctgcgcatcctgctgttctacgtgctgaccctgttcgtgctgatggcgatcttcccctggcagcagatcggcagcaacggcagtcccttcgtgcagatcttcgacggcctggggatcgagtcggccgcggcgatcctcaatgtcgtggtgatcaccgcggcgatctcggcgatcaacagcgacatcttcggcgccggtcgcatgctctacggcatggcccgccagggccaggcgccggtcggcttctcgcgggtgtcgcggcacggcgtgccgtggatgaccgtgctgctgatggcggtggccctgctgctcggcgtggcgctgaactacctgatcccgcagagcgtattcctgctgatcgcttccatcgccaccttcgccaccgtgtgggtctggctgatgatcctcctggcccaggtcggcatgcgccggcgcatggggccgcgccaggtcgccgcgctgaagttcccggtgccgctgtggccattcgcgccggcggcggcgatcgtcttcatgctgttcatcttcgtggtgctcggctatttcccggacacccgcccggccctgtgggtcggggctatctggatcgccttgctggtgatcgcctaccggcgctgggtcaggccgaagggcgatgccgcgcatggcgtgcttcaggcccagggagggctgtga

SEQ ID NO: 339866 - DNA, 1530 bp, Pseudomonas aeruginosa
atgagcctgtatctgaaacccggccagctgaccctggccgacctgcgccaagcctacctggcccccgtgcgcctgagcctggatcccagcgccgacgcgccgatcgccgccagcgtcgcctgtgtcgagaacatcatcgccgagggccgcaccgcctacggcatcaacaccggcttcggcctgctggcctcgacgcggatctccccggccgacctggagaagctccagcgttccatcgtcctgtcccatgccgccggcgtcggcgaggcgctggacgacgccatggtgcggctggtcatgctgctcaaggtgaacagcctggctcgcgggttctccggcatccgccgcaaggtgatcgacgcgctgatcgcgctgatcaacgccgaggtctatccgcacatcccgctgaaaggctcggtgggcgcctccggcgacctggcgccgctggcgcacatgtcgctggtgctgatcggcgaaagccgggcgcgccatcgcggtgagtggctgccggccgccgaagcgctggcggtggccgggctggagccgctgaccctggcggcgaaggaaggcctggccctgctcaatggcacccaggtatcgaccgcctacgcgctgcgcgggttgttcgaggccgaggacctgttcgccgccgccaccgtctgcggcgggctcagcgtcgaggccatgctcggttcgcgggcgccgttcgatgcgcgcatccacgccgcgcgcggccagcgtgggcagatcgacgtggccgcggcctatcgcgacctgctcaccgccagcagcgaggtggcgcgttcccatgagaagtgcgacaaggtccaggacccctattcgctgcgttgccagccgcaggtgatgggcgcctgcctgacccagatgcgccaggccgccgaggtgctggagatcgaagccaacgcggtgtccgacaacccgctggtattcgccgccgagggcgacgtgatctccggcggcaacttccacgccgaaccggtggcgatggccgccgacaacctggccctggcgctggccgagatcggttcgctgtcggaacggcgcatctcgctgatgatggacatgcacatgtcgcagttgccgccgttcctggtggccaacggcggggtcaactccggcttcatgatcgcccaggtcaccgccgccgcgctggccagcgacaacaaggccctggcccatccggccagcgtcgacagcctgccgacctcggccaaccaggaagaccacgtgtcgatggcgccgaacgccggcaaacggctctgggcgatggccgagaacgtccgcgggattctcgccgtggaatggctgggcgcctgccagggcctggacttccgcgagggcctgaagagttcgccgaagttggagcaggctcgccgcctgctgcgcgacaaggtgccgtactaccaggaggatcgcttcttcgcccctgatatcgaggccgccagccagttgctcgccagcggttgcctgaatgcgctgctgccggcccggctgttgccgagcctttga

SEQ ID NO: 339867 - DNA, 1443 bp, Pseudomonas aeruginosa
atgacccagggcagcgacagcaagccactgatcgaacggcgctcgatcgactacatcccggcgaacgagcgccacggccgcctctacagccagttcaccctctggctgggggctaacctacaaatcaccgccatcgtcaccggcgccctcgccgtggtcctcggcggcgacgtgttctggtcgctggtcggcctgctcatcggccagctcctcggcggcgcggtgatggccctgcacgccgcgcaggggccgcgcctggggctgccgcagatgatttccagccgggtgcagttcggcgtctacggcgcctgcatcccgatcgccctggtgtgcctgatgtacctgggcttcaccgccaccggcacggtgctttccggccaggccatcggccagctcaccgggctcagcgacagcgccgggatcttcatcttcgccgccttcatcgtcctggtgacggtgctcggctatcgcgtcatccacatcatcgggcggatcgccagcgtcctcggcatcatcgccttcgtctacctgttcagccgcctgatgctgctcagcgacatcggcgatctgctcgccatccgccacttcagctgggcctcgttcctcctcgcggtgtccctggcggcgtcctggcagatcgccttcggcccctacgtggccgactattcacgctacctgccggcgtccacctcgtcgtggaagaccttcctcgccgtcggcctcggctcggtgctcggcgcccaggcctcgatggtcctcggggtgttctccgcagccctggccaacggtcagttcgccggccgcgaggtggcctacatcgtcggcctgggcagcagcgggaccgtcgccgcgctgctctacttcagcatcgccttcggcaaggtgaccatttccacgctgaactcctacggaagcttcatgtgcatcgcgaccatcatcagcagcgtacgcggtcagctggagatcacccgcctgcaacgcctgttcttcgtcctcgtgatcgtcggcgcctcgacgctcatcgcgctgctcggccagcactcgttcctcgctgcgttcaagtccttcatcctgttcctgctgaccttcttcaccccgtggagcgcggtgaacctggtcgactactacttcatcacccgcgagcgctatgacgtgcccgcgctggccgaccccgacggccgctacggtcgctggaacctgccgggaatcgccgtctataccctcggcgtgctggtgcagatgccgttcctggcgaccacgctgtacaccggaccgatggtcgagcaccttggcggcgtggatatctcctggatcatcggcttgctggtgccggcggtcctctactacctggtggcgcggcgcaaggccacgcgccaggccccggcgcgaatgatcctgccggccgatcccggcgccttcgaacgtcccgcgcacggggcctga

SEQ ID NO: 339868 - DNA, 1680 bp, Pseudomonas aeruginosa
gtgaccaccccgagcaaattccgcgatattgaaatccgcgccccgcgcggcactacgctgaccgccaagagctggctgaccgaagcgccgctgcgcatgctgatgaacaacctcgacccggaggtcgcggagaaccccagggaactggtggtttacggcggcatcggccgtgccgcgcgcaactgggagtgctacgacaggatcgtcgagaccctcaagcaactgaacgacgacgagaccctgctggtacagtccggcaagccggtcggcgtgttcaagacccacgccaacgcgccgcgggtgctgatcgccaactccaacctggtgccgcactgggcgacctgggaacacttcaacgaactggacgccaagggcctggcgatgtacggccagatgaccgccggttcgtggatctacatcggcagccagggcatcgtccagggcacctacgaaaccttcgtcgaggctggccgccagcattacgacggcaatctcaagggccgctgggtgcttaccgccggccttggcggcatgggcggcgcccagccgctggcggcgaccctggccggcgcctgttcgctgaacatcgagtgccagcagagccgcatcgacttccgcctgcgcagtcgctacgtcgacgagcaggccaaggacctggacgacgccctggcgcggatccagcgctacaccgccgaaggcaaggccatctccatcgccctgctgggcaatgccgccgagatccttccggaactggttcgccgcggcgtacgcccggacatggtcaccgaccagaccagcgcccacgatccactcaacggctacctgccggccggctggagctgggaagagtaccgcgaccgcgcgcagaccgacccggccgccgtggtcaaggccgccaagcagtccatggcggtacacgtgcgggccatgctggcgttccagcagcagggcgtgccgaccttcgactatggcaacaacatccgccagatggccaaggaagagggggtggccaatgccttcgatttccccggcttcgtcccggcctacatccgcccgctgttctgtcgcggcatcggtccgttccgctgggccgcgctgtcgggcgaccctcaggacatctacaagaccgacgccaaggtcaagcaactgatccccgacgatgcccacctgcaccgttggctggacatggcccgcgagcgcatcagcttccagggcctgccggcgcgcatctgctgggttggcctggggctgcgcgccaagctcggcctggccttcaacgagatggtgcgcagcggcgagctgtccgcaccgatcgtcatcggccgcgaccacctcgactccggctcggtggccagccccaaccgcgagaccgaggccatgcaggacggctccgacgcggtgtccgactggccgctgctgaatgccctgctgaataccgccagcggcgccacctgggtctcgctgcaccacggcggcggcgtgggcatgggcttctcccagcactccgggatggtgatcgtctgcgacggcagcgacgaggccgccgaacgcatcgcccgcgtgctgaccaacgacccggggaccggggtgatgcggcacgccgacgccggctaccaggtcgccatcgattgcgcgaaggagcagggcctgaacctgccgatgatcaccgcccagcgctga

SEQ ID NO: 339869 - DNA, 798 bp, Pseudomonas aeruginosa
atgatcgataccccggtggtggcggcgctggacatgtatgtcgagccggactgcgtcaggcaggccggcgcaaccttcatcggcgaggtctgccggcgcctgggcgtgcgccgttacgcgccggccgccgccgatctggcggtgcagtggcgacagcctaacctgctgttcgcgcagacctgcggctatccgctgatgacccagttgcgcggccaggtggcggtgctcgcggtgcccagctacgacttgcccgattgcgctcccggcgagcattgcagtctgttcgtcgccgccgaaggacaggcgcgccagcgcctcggcgacttccgcaatacccgcctggcgctcaacgaccgcgactccaacagcggcatgaacctgctgcgccatgcgctggcgccgctggggcgagactcggcgttcttcgccgaagtgcgcatcagcggcggccacctgcgcagcctggcgatggtggcggcgggtgaggtcgagctgacctcggtggatgcagtgaccttcggctacctgcaacgccacgcaccggagcgcctggccggcctgcgcgtgctcgggcgcagcgcgccgagcccggccttgccgctgatcacctcgctgcactggagtgcggcgcaacgccgcgaactgttcgaagcgctgaacctgacgctgatcgagtgcccgcacctggccgcgacactggcgctgaaaagcttcctcccggccggcgaggagcattaccggattctcctcgactacgagcgtcaggcgcagggctggggttacccgcaattgcgctga

SEQ ID NO: 339870 - DNA, 939 bp, Pseudomonas aeruginosa
atggcgcactacctgagcgggcgtcagcgcaccctggtgcggcggctccaggataccttccaggcgcgcagcgaatggccgacctggctgctggtcgcctgcctgtacggcggttgggcactgctcgccagccagtatcggcattggggctggccggtgctggcggggctggtgccgttcgcctccctctacatgtcgttgcagcatgagctgatccatggccacccgacccgctggccgaggttcaacgccgtgctcggctacctgccgctggccgtctggtatccctatccgctgtaccgtgacagccacttgcggcaccaccgcgacgagcaactgacctacccggggctggaccccgagagtcgttacgtcagtctgtccgaatggccgcgcctgggctcctggcggcggcgctggctctgcctggacaagaccctgctcggtcgcgccaccctcggcccgctgctggccctggcggcgatggcgcgcctggagggttcgcggttgcgccagggagagggcgccgcctggcgcctgtggggcctgcatgccgtgctgctgggcgggttgctggccgggctttggcgctgggcgggcatcccgccctggttgtacctgccggcggtggcctatccggccctcggcctgagcatgctgcgctctttctacgagcaccgtccggcccgcgagccggcgcagcgcagcgtgctggtcgaggcggggtggccgtggcggctgctgttcctcaacaacaacctgcatctggtccaccacgatctgccgggcctgccctggtacctgctgccgcgcgtgtataacgcaagccgccgtgcctaccggcgacgcagtggcgatttccacctgcccggctatggtcgtctatggcggcgccacggttggcggccggtggatgcgccggtgcatcccgagcattga

SEQ ID NO: 339871 - DNA, 1023 bp, Pseudomonas aeruginosa
atgcccccgcttcgccagatcctcgccgtcctcgccctgggcgccagcctcgccagccagaccgccgtcgcggcggaatgcccgtacccgggcaaagtggtgttcgccgggctgaactgggaaagcggcatgttcaccaccgacctgttgcgctacgtactggaaaaaggctacggctgcgagaccgacgcgctgccaggcaataccgtgaccatggaaaacgccctgcgccagaacgatatccaggtcaccggggagcaatgggccgggcgtagcccggtgtggcgcgcggcggaggaggcgggcgaggtgttctccgtcggcgagacggtgaagggcgccaccgagggctggtgggtgccggagtacctggtcaagggcgacccgcaacgaggcatcgaggcgaaggcgccggagttgaggtcggtcgccgacctgccgcgctacaaggcgctgttccgcgatcccgaggagcccgccaaggggcgtttctacaactgcccgaccggttggacctgcgagatcgtcaacagccagaagctcaaggcctacaggttgcaggacagctacacgaacttccgcaccggcaccggcccggcgctggatgcggcgatcagtgcggccttccggcgcggtgagccggtgcttttctactattggtcgccgactccgttgatgggccgtttcaagctggtgcaactggaagagccgccgttcagcgagaaggcctgggccaccctgtccgatccgaagaaccccgaccccatcggttcccgctcgttgccggcgaagatcaccattggcgtttcccgcgatttccatgacaaggcgccggcgttggtcgagctgttccgcaaggtcgagatccccttgccgctgttcaacgagctgctcgccgacatggcgcagaatcatcgcgaggtcggcgaggtgcgtgcgcagttccttcgccagcatcgcgaaatctggagccactgggtgccggccgaagtcgccgcgcgcctcgatacctccctgaagtaa

SEQ ID NO: 339872 - DNA, 591 bp, Pseudomonas aeruginosa
atgagcgaattccgcatcctgcgcgccgtcgactacccgagaatgccgtggaagaacggcgccggctccaccgaggagatcgcccgcgacggcggcgacggcctggacggcttcggctggcgcctgtcgatcgccgatgtcggcgagtccggcggcttctcccgcttcgccggttaccagcggatcatcagcgtgctggagggcggcggcatgcgcctgcgggtggatggcgcggaatccgcgccgctacgcgcgcggcaggccttcgccttttccggcgacagcgaggtgcactgcaccctgctcgatggagctatccgcgacttcaacctgatctatgcgccccggcgccatcgcgcgcgcctgcaatggctgcgggtcgagggcgagctggactggcacggcacggcgagcacgctgctgctgttcgcccagcagggcggggtagcgatttccttgcaagggcaacctcgcgggcaactggctgcccacgactgcctgtgcgccgagggactgcagggcttgcagtattggcgcctgacggcacacgagccggcgtgggtctgtgcggtggaactcgattcgctgtga

SEQ ID NO: 339873 - DNA, 753 bp, Pseudomonas aeruginosa
gtgacgtcctcttcttccgatcgttccccgctggcctcgcaactcggcgaggtaccggcgccgctctacgcgcgggtcaagcagatgatcgtcagccagatccagtcgggcgcctggccgccgcaccaccgggtgccctccgagagcgaactggtcagccagctcggcttcagtcgcatgaccatcaatcgcgccctgcgcgaactgaccagcgacggcctgctggtgcgcatgcagggggtcggtaccttcgtcgccgagcccaagggccagtcggcactgttcgaggtgcacaatatcgccgacgagatcgcggcccgcgggcatcgccatcgttgccaggtgatcaccctcggcgaggaggtcgccggccccgagcgcgccctggcactggacgtgcgcgaaggccagcgggtgttccactcgctgatcgtgcactacgagaacgatatcccggtgcagatcgaggaccgctacgtgaacgccgcggtggcgccggactacctcaagcaggatttcacccggcaaacgccctatgcctacctgacccaggtggcgccgctcaccgagggcgagcatgtggtcgaggcgatcctcgccgagccggccgagtgcaagctgttgcagatcgaacgcggcgagccgtgcctgctgatccgccgccgcacctggtccgggcgtgtcgcggtgaccgccgcgcggctgctgcacccgggttcccgccaccgtctggaaggacgcttcagctcatga

SEQ ID NO: 339874 - DNA, 1362 bp, Pseudomonas aeruginosa
atgtccgcaattttcgctgaacgtgcgttgctgccggaaggctgggcgcgaaatgtccgtttcgagatttccgcggacggagttctcgccgagattcgtcccgacgccaacaccgacggcgccgaacgcctcggcggcgccgtgctgccggggatgcccaacctccattcgcacgcgttccagcgcgccatggccgggctcgccgaagtcgccggcaatcccaacgacagtttctggacctggcgcgagctgatgtaccggatggtcgctcggctgtcgccggaacagatcgaggtcatcgcccgccagctctatatcgagatgctcaaggccggctacacggcggtggcggaattccactacgtccatcacgacctcgacggccgctcctacgccgaccccgccgaactttccctgcgcatctcccgcgccgccagcgccgccggcatcggcctgaccctgcttcccgtgctttacagccacgcaggcttcggcggccagccggccagcgagggccagcggcgcttcatcaatggcagcgaggcctacctggaactgctccagcgcctgcgcgcgccgctggacgcggcaggccactccctgggcctgtgcttccactccctgcgcgcggtgactccgcagcagatcgccacggtcctcgccgccggccacgacgacctgccggtccacatccatatcgccgaacagcagaaggaagtcgacgactgcctggcctggagcggacgccggccgttgcaatggctgtacgagaacgtcgcggtcgaccagcgctggtgcctggtccatgcgacccacgccgaccccgccgaggtggcggcgatggcgcgtagcggcgcggtggccggcctgtgcctgagcaccgaggccaacctcggcgacggcatcttcccggcgacggacttcctcgcccagggcgggcgcctgggcatcggctcggacagccacgtctcgctcagcgtggtcgaggaactccgctggctggaatacggccagcgcctgcgcgaccggaaacgcaaccggctgtaccgcgacgaccagccgatgatcggccgcacgctctacgacgctgcgctggctggcggcgcccaggcccttgggcagccgatcggtagcctcgccgtgggccgtcgcgccgacctgctggtgctcgacggcaacgacccctacctggccagcgccgagggcgacgccctgctcaaccgctggctgttcgccggcggcgaccgccaggtgcgcgacgtgatggtggccggcagatgggtggtgcgcgacggccggcatgccggggaagaacgcagcgcccgggcattcgtccaggtgctgggagaactgctcgactga

SEQ ID NO: 339875 - DNA, 570 bp, Pseudomonas aeruginosa
gtgatcggtctgccgatccgggtgctctgcaccctgtggctgggcttgctgctggtcggttgcgcgggctcgccgaagaatccgccggccaccgagcaggtcgacctccagcgctaccagggcacctggtacgaactggcgcgcttgccgatgttcttccagcgcaactgcgcgcaatcggaggcgcattaccgcttgcaggaagaccagagcatccaggtgatcaatcgctgcctgaccctggatggcgagtgggagcaggtggaggggcgggcggtcgcccagcagccgggacgcaccgacaagttgtgggtgcgcttcgacaactggttcgccaatctcttccccaacgtggcgcgcggcgactattgggtgctggcggtggacgacgactaccgcaccgcgctggtgggcaatccgaaccgtgaatacctgtggctgctgtcgcgtaccccgcaggtttcgcagcagacccgcgagcgtctgctggaagaagcgcgcagccgcggttacgcggtggacgagctgatctggcgggtacccgacggccagttgaagcggagccagtga

SEQ ID NO: 339876 - DNA, 258 bp, Pseudomonas aeruginosa; identical to SEQ ID NO: 322140

SEQ ID NO: 339877 - DNA, 603 bp, Pseudomonas aeruginosa
atgagcgcgccctgggagaccttgctcgactggtggttcggcacctccagcgatgccgccgaggtggttgcccagcgcaacggcctgtggttcggcaagaacgtctgccaggacgccgatgccggcggccgtttcggcgacctggtgaaccaggcgctggacggcggcttgcaggagtggacggccgaggccgatggctggctggcgctgatcctgttgctcgaccagttgccgcggatgatctaccgcgacacgccgcgcgcctacgccggcgacgcccgggcgcaacgggtggtgcgcgagggcctggaaaaaggcttcgaccgccagttgccgccggtgcgccgggtgttcgcctacctggtcctggagcacgccgaggacctgcccagccaggagcgggcggtagcctgcttccgcgacctgcgcgatcaggtcggtggcagcgtgcgcaagcccttcgacgatttctacgactatgccgagcggcatcatgcggtagtcgcccgcttcggtcgctttccccatcgcaacgccattctcggccgcccctccagcgaggaggagacggcgttcctcagggaacccggttcgcgtttctga

SEQ ID NO: 339878 - DNA, 1011 bp, Pseudomonas aeruginosa
atgtcccgcgttaccctgagccgctatctgatcgagcagacccgcagccacaacaccccggccgacctgcgcttcctcatcgaggtcgtggcgcgtgcctgcaaggaaatcagccatgcggtgtccaagggcgcgctgggcggcgtactcggcagcatgggcaccgagaacgtgcagggcgaggtgcagaagaagctggacgtgatgtccaacgagatcctgctggaagccaacgaatgggccggcaacctggccggcatggcctccgaggagatggaccacccctaccagattccggggcgctacccgaaaggcgcctacctgctggtcttcgacccgctggacggctccagcaacatcgacgtcaacgtctcggtcggcaccatcttctcggtgctgcgctgccccagcgagtacctgaaccagaacgataccctgcgcgaggaggccttcctccagccgggcaccacccaggtcgccgccggctacgccatctacggcccgcagaccatgctgatgctgaccctcggcaacggcgtcaagggcttcaccctggaccgcgagctgggcagcttcgtcctcacccacgacaacatcagcgtgccggaaagcaccgccgagttcgccatcaacatgtccaaccagcgccactgggaagcgccggtgaaacgctacgtggaagaactgctggccggcaaggaaggcccgctgggcaagaactacaacatgcgctggatcgcctcgatggtcgccgacgtccaccgcatcctgacccgtggtggcgtcttcatgtacccgcgcgacgcccgcgagccggagaagcccggcaagctgcgcctgatgtacgaagccaacccgatgtcgttcatcatcgagcaggccggcggcgccgccaccaacggcacccagcgcatcctcgacatcaagccggagaacctgcaccagcgtgtcgcggtgttcctcggctcgaagcaggaagtcgagcgcatcaccggctaccacgcggagtag

SEQ ID NO: 339879 - DNA, 531 bp, Pseudomonas aeruginosa
atgagtttcaacaccgaagtacagcccggcatctgcatggagccggacgccattacccaggaatacgtgttcaaccacaccatgttgcgggtcaaggatccgaagcgctcgctcgacttctactcgcgggtgctcggcatgcgcctgctgcgtcgcctggatttcgaggaaggccgcttctccctgtatttcctcgccatgacccgtggcgaagaggtgcccgacgcgctcgacgaacgccagcgctacaccttcggacgccagtcggtcctcgaactgacccacaactggggcagcgagagcgacgacagccagtaccacaacggcaaccaggacccgcgcgggttcggccacatctgcttctcggtgcccgacctggtggcggcctgcgagcgtttcgagacgctcggggtgaacttcgtcaagccgctggaccgaggcatgaagaacgtggccttcatcagcgatcccgacggctactgggtggaaatcgtccaggccagcctgaacggcgagatgggacgcggctga

SEQ ID NO: 339880 - DNA, 1941 bp, Pseudomonas aeruginosa
atgatcagaatggcgctcaagccactggtagcggcctgcctgctggcttcgctgtccaccgccccgcaggctgctccttcgccctattcgacgctggtggtgttcggcgacagcctcagcgatgccgggcagttccccgatcctgccggccccgccggaagcacctcgcgtttcaccaaccgggtcggcccgacctaccagaacggcagcggcgagatcttcggaccgaccgcgcccatgctgctcggcaatcagctcggcatcgccccgggcgacctggctgcctcgacctcgccggtcaacgcccagcagggcatcgccgacggcaacaactgggcggtgggcggctaccggaccgatcagatctacgactcgatcaccgcggccaacggctcgctgatcgagcgcgacaataccctcctgcgcagccgcgatggctacctggtggaccgtgcccgccagggcctgggtgccgatccgaacgcgttgtactacatcaccggcggcggcaacgacttcctccaggggcgcatcctcaacgacgtccaggcccaacaggccgccggtcgcctggtggatagcgtgcaggccctgcagcaggccggcgcgcgctacatcgtggtctggctgttgcccgacctgggcctgaccccggctaccttcggtggtcccttgcagcctttcgccagccaactcagcggcacgttcaacgccgagctgaccgcccagttgagccaggccggcgccaacgtcattccgttgaacatcccgctgctgctcaaggaaggcatggccaacccggcttccttcggcctggccgccgaccagaacctgatcggcacctgtttcagcggcaacggctgcaccatgaacccgacctacgggatcaacggcagcacgcccgacccgagcaaattgctgttcaacgacagcgtgcacccgaccatcaccggccagcgcctgatcgccgactacacctattcgctgctgtcggcgccctgggagctgaccctgctgccggaaatggcccacggcaccctgcgtgcctaccaggatgaactgcgcagccagtggcaggcggactgggagaactggcagaacgtcggccagtggcgcggcttcgtcggcggcggtggccagcgcctggacttcgactcccaggacagcgccgccagcggcgacggcaacggctacaacctgacccttggcggcagctaccgcatcgacgaggcctggcgggccggggtcgccgccggcttctaccggcagaagctggaagccggcgccaaggattccgactaccggatgaacagctacatggccagcgccttcgtgcagtaccaggaaaaccgctggtgggctgacgcggcgctgaccggcggctacctcgactacgacgacctgaagcgcaagttcgccctgggcggcggcgagcgcagcgagaaaggcgacaccaacggccacctttgggcgttcagcgcgcgcctgggctacgacatcgcccagcaggccgacagtccctggcacctgtcgccgttcgtcagcgccgactacgcgcgggtcgaggtcgacggctattccgagaagggcgccagcgccaccgcgctcgactacgacgaccagaagcgcagctcgaagcgcctgggcgccggcctgcaaggcaagtacgcgttcggcagcgatacccagctgttcgccgagtacgcccacgaacgcgagtacgaggacgacacccaggacctgaccatgtccctcaacagcctgccgggcaatcgcttcaccctcgaaggctacaccccgcaggaccacctcaaccgcgtctccctcggcttcagccagaagctggcgccggagctgtcgctgcgcggcggctacaactggcgcaagggcgaggacgatacccagcagagcgtcagcctggcgctgagcctggacttctga

SEQ ID NO: 339881 - DNA, 3606 bp, Pseudomonas aeruginosa
atgcaatggattttcatgctggtgggcctgatcctcggcggcttcgccggggaatcgctggtcggcgcactcctcggcggcctctccggcctggccctgggacaggccgtctcgctgcagaacctggcgcaacagaacgagcgcctgcgcaagcagatgagcgaattcgccgaacgcttcgagcgcggcaccgaggtcatccaccagcgcttgctgcgtgtggagcgccaggcgcaggaccttcccgaaagcgttcccgagccggccgccggcatcgaccagccgctcgcagacacgcctcccgctcctcccgccgaggttgccccgccgctggactgggacatcgagctgccgcccgtcgaggctgcgccgcctccgcctcgtccccccgagcccgtccagcccatcgagcgtcagccggcgttccagcctgacgcccagccagcgccgcgccgccccgcccctccggcgcctccacgcgaaccctcgctggtcgagcgtggcttcgccgcggccaagggctggctgttcggcggcaacacggtattgcgcatcggcgtggtgctgctgttcatcggcctggccttcctcctgcgctacgcctcggaacgggtggcggtgccggtggagtaccgctacgccggggtggcgctggcagcgatggcgctgctcggcgtcggctggtggttgcgcgagcggcgcgccgcctacggcctgatcctgcaaggcaccggtatcgcggtgctgtacctgaccatcttcgccgccatgcgcctgcatccgctgatctctcccggcgcggcgctggccctgctggtggtggtgacgatctgctcggcgatcctcgccgtgctgcagaacgccatgggcctggcggtggtggcggcgctcggcggcttcgccgcgccgatcctgacctccaccggcagcggcaaccatgtagcgctgttcagctacttcgccctgctcaacgccggcatcttcgccatcgcctggttccgcgcctggcggccgctcaacctggtcggcttcgtcggcaccttcggcatcggtttcgcctggggactgcgctcctatacaccggagctgttcgccagcaccgagccgttcctggccctgttcttcctgatgtacgtcgggatcggcctgctctttgcccgccgcaagctgctggaggccgcgcaggcgcctgccgagcgcggcgaactgctgcgctggtcggcgcgacaggccgactacatcgacgccaccgtgctgttcggcccgccactggtggggttcggcctgcaatgcgcggtgatcggccacatcgattttggcatggccttcagcgccctggccctgggcctcttctacatggtcctggcgcgggcgctgcgtggccatgcttcggccggacgcaccagcctgctggtggaaatctgcctggcgctgggggtggtcttcggcaccctggccattccgctcggcctggacgcgcgctggacctcggccgcctgggcggtcgagggcgccggcatctactggctcggcctgcaccagcaacgccgcctggcgcggatcttcgccctgctgttgcagggcggtgcggcgttggcctacctgaatggcgtgcggccgggtgagacgacgttgctggagggttcgccgctgggcgcgctgatgctcggtgcggcggcgctgttcagcttctggcagctgcgtcgcgcgccggcgaaagcgctggccgactgggagccggcctgccggccgttgctggcggccgccggcctggccttcctctacctggtcgcaccgctctgcctggccgtcgacggcaccgccatcgcctgggccgtggccggcctggcgagcttgttcgccggcttgcgcctgggctcgcgtaccttcctgttctgcgccttcgccgtgcaactgctgggcggtgcgctgttcctcctgcatttgcagggcggcgatggccagggtggggtattcgactcgggctggcgtggcttgatgaccgcctcgctgattggcctggcgctgatcggcggcatgctgctggcggcgcgcgacccgctggtgaaggacgacagtcggctgctcatgggcttgagcctggtgctgctggccggtctggcgttcgtcaacctggcagtgctgttcgtcctgccttggcgcagcgccagcgcggtatgggccggtagcgggctgctgatcatctggctgagcctggtgctgcgccagcgcctgagcttctacttcggcctcgccttgcaggtagtgggcggcctggcgttcctcctcgccgggccgtcgctgttcggctcgctgagcggcgaaggcctgcggcccctggcccattccgggttctggacgccggcagtgctggccctggcggcgctggtcggcgcctggcggctgcgccgcgccggcgagcgcgagcgggcgctgggtatcggtaccctcggcctggccgagctgtcgcacctgctgctgctctggggagccggctggtgggcgctgaccgcgctgtgcgaaaccgtccgcttcgtgccttatggcctgcgcgagcatgcgttgctgctggtggccgcggcgacagtggcgtcgtggatgctgctggcgctgcgcgagcgctggcgcgaactggccctgctgtgcctggcgctggtcccggtggcgctgttggccctggccagtgcctggcgtttcgattaccagccgttcggcgaattcggctggctggcctggccgctgctgttcgccacgcacctgctgtcgctgcgacgccttgccccgttgctgccggcgaaggccctgagcgttgcccatgtgctcggttgctggctgttgctaggggtgctggcgctggagctgcgctacctgttcgccctgctcgccgaacagtacaacgcctggcgttggctgggctgggcgctggtcccgagcgcctacctgctgctggtggctggcgggcggagcctgccctggccgctgcgcgacttcccgcgggagtatcggctgctcgccgctgcgccggtggcgctgttgctgctcggctggttctggagcgccaacctgctcagcgacggcgccgccgagccgctgccttacctgccgctggccaacccgctggaactggggctgctgatcgtgctgttcgccctctaccgctggagcgacgccagcctggcctcgctcgtcgatggcaatgccagcgcgcgcctggggcgccaggcgttggccggcgcctcgctgttcgccctgctgaccctggcggtgtgccgcgccgcgaaccacctggccggcgtgccgttccaggccgaggcgctggccgcgtcgatgctggtgcaggcggggctgtcgctggtctggacgctctgcgcgctgggcctgaccatcgccggtacccgtctcggccggcgcgacctgtggatggtcggcgcggcgctggtcggcgtcgtggtggtcaagctgttcttcgtcgagctgggcaacagcggcagcctggagcgaatcatctccttcatcggggtcggcgtcctgttgctggtcgtcggctacttctcacccttgcctccgcgtcgtgccgaggtcgcatcggaggccgagcagccatga

SEQ ID NO: 339882 - DNA, 585 bp, Pseudomonas aeruginosa
atgtgggacgaacgctatgccgccgaagagtatgtctacggaaccgaacccaacgctttcctgaaggaaaatgcgcagcggctggccgggccggtgttgagcgtcgccgagggcgaggggcgcaacgcggtgttcctcgcttcgctggggctggaggtgcttggcgtggatggctccgccgttggcctggccaaggcgcgccggctggccgaggcgaaaggcgtgtcgatcgacaccctggtggtcgacctggcggactacgaaccgccggcagcggcgttcggcgcggtggtgtcgatcttcgcgcacctgcccagtcgcgtgcgcggcagactcaaccgcctgctggagcgttcgctgcgaccgggcggtctcttcctgctggaggcctatcggccggaacagctcggccgcggcaccggcggcccggcggacgtcgacatgctggtgagccgcgcggcgctggaggcggagctgccggagtgcgaggtgctgctggcgcgggaaatcgagcgcgaggtggtcgagggccgtttccacaccggcgcggcctgtgtggtccagttcatcgccaggaagaggtag

SEQ ID NO: 339883 - DNA, 426 bp, Pseudomonas aeruginosa
atgcggcaactggacataggcgaggtcgcgcgacgatccggggtaccggcctcgaccctgcgctactacgaggaaaagggactgatcgcctccagcggccggcacggcctgcgccggctgttcgatgcaggcgtgctggagcggctggcgctgatcgggctgggccgcgccgccgggttgtcgctggacgagattgccggcatgggcgcagccgacggcgcgttgcggatcgaccgcgcggcgctggcggccaaggccgacgaactggaccggacgatccgccgcctcgccgccatgcgcgacggcctgcggcatgccgcggcctgtccggcgcgcgaacacatggactgcccgacgttccgccgcctgctgcgggccgctgccgcgggggccatcaagccacgccggaaagcgcccggcgcatag

SEQ ID NO: 339884 - DNA, 1818 bp, Pseudomonas aeruginosa
gtgatcgaaaatctgcgcaacatcgccatcatcgcccacgtcgaccatggcaagaccaccctggtggacaagctgctgaagctgtccggcaccctcgaccgcaaagaagcggaaagcgagcgggtgatggactccaacgaccaggaaaaagagcgtggcatcaccatcctggcgaagaacaccgcgatcaagtggaacggctacaacatcaacatcgtcgacacccccggtcacgccgacttcggcggcgaggtggagcgcgtgatgtcgatggtcgactccgtgctgctggtggtcgacgcccaggacggccccatgccgcagacccgcttcgtgacccagaaggccttcaaggccggcctgcgtccgatcgtggtggtgaacaagatcgaccgcccgggcgcgcgtccggattgggtcatcgaccagatcttcgacctgttcgacaacctcggcgccaccgacgagcaactcgacttcccgatcgtctacgccagcgccctgaacggtatcgccggcctcgaccacgagaagatggacgacaacatggacgcgctgttccaggcgatcatcgaccacgtcccggccccggtggtggacaccgagggtccgttccagatgcagatctcgcagctggactacaacagcttcctcggcgtgatcggtatcggccgcatcacccgcggcaaggtcaagtccaacaccccggtggtggccatcagcgacgacggcagcaagcgcaacggccgcatcctgaagatcatgggccaccacggcctgcagcgcgtcgaggtggccgaggcggaagccggcgacatcgtctgcgtcagcggcatggaggagctgttcatctccgataccctgtgcgacccgcagaacgtcgaggcgctgccgccgctgaccgtcgaccagccgaccgtgagcatgaccttccaggtcaacgattcgccgttcgccggccgcgaaggcaagttcgtcaccagccgcaacatcaaggagcgcctggagaaggaactgctgcataacgtggcgctgcgcgtcgagccgggcgacagcccggagaagttcaaggtttccggccgtggcgaactgcacctgtcggtactgatcgagaccatgcgccgcgaaggcttcgagctggccgtgggccgcccggaagtggtgatcatcgagaaggacggcgagaagcaggagccctacgagaacgtcaccatcgacatcgaggagcagcaccagggctcggtgatggagcagatgggcctgcgcaagggcgacctgagcaacatgattcccgacggcaagggccgagtgcgcctggagtacaccattccggcgcgcggcctgatcggcttccgcaacaacttcctgaccctgacctcgggcaccggcatcctgacctcgaccttcagccactacggtccgatcaaggccggcgaagtcagcaaccgccagaacggcgtactggtctccatggccaccggcaccgcgctgacctactcgctggagaccctgcagagccgcggcaagctgttcctcggcccgggcgacgaaatctacgaaggccagttggccggcatcaacagccgtgacaacgacctggtgatcaacccgaccaagggcaagaagctcgacaacatgcgcgcttccggcaaggacgaagtcatcgccctggttccgccgatccgcttcaccctcgagcaggcgctggagttcatcgccgacgacgagctggtggaagtgacgccgaagtcgatccgcctgcgcaagaagatgctcaacgagaacgaccgcaagcgctacgagcgcagcaaggtctaa

SEQ ID NO: 339885 - DNA, 1455 bp, Pseudomonas aeruginosa
atgaaactcatcgtcaagaccttccaggaaatcaccatcaagagccggccggtgcgcaagcgcttcatccggcagttggcgaagaacatccgcgcggtgctgcgcgacctggacccggagctgaaggtcgagggcgagtgggacaacctggaggtagagaccgccgtgctcgacgccaaggtcaggcgcgagatgatcgagcgcctgacctgcaccccgggcatcggtcatttcctcgaggtccacgagtatccgctgggcgatttcgacgacatcctcgccaagtgcaaggcgcacttcggcgaccagttggccggcaagaccttcgccgtgcgctgcaagcgcgccggcaagcacgcgttcacctcgatggaggtggaacgttacgtcggcagcggcctgcgccgcgaatgcggggctgccgggatcgacctgaagcagccggaagtcgaggtgcggatggaaatccgcctcgaccgcctgttcgtcatccatcgccagcatccgggcctgggcggctatccgctgggcgcgctggagcaggtgctggtgctgatgtccggcggcttcgactcgaccgtggcggcctaccagatgatgcgtcgcgggatgatcagccacttcgtgttcttcaacctcggcgggcgcgcccacgaattgggggtgatggaagtcgcccactacctgtgggagaagtacggccgctcgcagcgcgtgctgttcgtcagcgtgccgttcgaggaagtggtcggcgagatccttaccaaggtcgacgacagctatatgggcgtgaccctcaagcgcatgatgctgcgcgccgccagccgcgtggccgagcgcctggagctggacgcgctggtgaccggcgaggcgatctcccaggtgtccagccagaccctgccgaacctctcggtgatcgaccgggttaccgacaccctggtgctgcgcccgctgatcgtcagccacaagcaggacatcatcgacaccgcccggcagatcggcaccgccgagttcgcccggcacatgccggaatactgcggggtgatctcggtgaacccgaccacccaggccaagccctaccgcgtcgagcacgaagagtcgaaattcgacatggcggtgctcgagcgcgccctggagcgcgccacccagcgcaccgtcgaccgggtgatcgacgaactcggccaggacctgcaggtggaagaggtcggcgaggtgctgcccggtcagattgtcatcgatatccgccatcctgatgcccaggaagacgaacccctggccctggaaggcgtcgaagtccaggcgctgccgttctacgcgatcaacagccgcttcaaggaactggacgccaaccgccagtacctcctgtattgcgacaaaggggtgatgagccgcctgcatgcccatcacctgctcaacgaggggcacaccaatgtgcgtgtttatcgtccggcttaa

SEQ ID NO: 339886 - DNA, 1410 bp, Pseudomonas aeruginosa
atgtcgtacaagtcgcaccaactgatcaaagaccatgacgtgaagtgggtagacctgcgcttcaccgataccaagggcaagcagcaacacgtcaccatgccggctcgcgacgcgctggacgatgagttcttcgaagccggcaagatgttcgacggctcctccatcgccggctggaaaggcatcgaagcctccgacatgatcctgatgccggacgacagcaccgccgtcctcgatccgttcaccgaagagccgaccctgatcctggtctgcgacatcatcgagccgagcaccatgcaaggctacgagcgcgacccgcgcaacatcgccaagcgcgccgaggagtacctgaagtccaccggcatcggcgacaccgtgttcgtcggcccggagccggagttcttcatcttcgacgaagtgaagttcaagtccgacatctccggctcgatgttcaagatcttctccgagcaggcttcctggaacaccgacgccgacatcgagtccggcaacaagggccatcgcccgggcgtgaagggcggctacttcccggtaccgccggtcgaccacgaccatgaaatccgcaccgccatgtgcaacgccctggaagaaatgggcctggtggtcgaagtccaccaccacgaagtggcaaccgccggccagaacgagatcggcgtgaagttcaacaccctggtcgccaaggccgacgaagtgcagaccctgaagtactgcgtgcacaacgtcgccgacgcctacggcaagaccgtgaccttcatgccgaagccgctgtacggcgacaacggctcgggcatgcacgtgcacatgtcgatctccaaggacggcaagaacaccttcgccggcgaaggctatgccggcctgtccgagaccgccctgtacttcatcggcggcatcatcaagcacggcaaggccctgaacggcttcaccaacccctcgaccaactcctacaagcgcctggtcccgggcttcgaagctccggtgatgctggcctactcggcgcgcaaccgctccgcctcgatccgtatcccctacgtatccagcccgaaggcccgccgtatcgaagcgcgcttcccggacccggcagccaacccctacctggccttcgccgcgctgctgatggccggcctggacggcatccagaacaagatccaccccggcgatgccgccgacaagaacctgtacgacctgccgccggaagaggcgaaggaaatcccgcaggtttgcggcagcctgaaagaggcgctggaagaactcgacaagggccgcgcgttcctgaccaagggcggcgtgttcaccgacgagttcatcgatgcctacatcgagctgaagagcgaagaagagatcaaggtgcgcaccttcgtgcacccgctggaatacgacctgtactacagcgtctga

SEQ ID NO: 339887 - DNA, 405 bp, Pseudomonas aeruginosa
atgcgtcactctctctggctcctgctcgccgtcgtcctcagcctgcccgcccaggccgccaccgaatgccgcgatatccacgaccgcgacctgcggcgcatgtgcaacgccctggagcgcggcgacagcggggattgcggcgacatcgacagccgcgacctgcggcgttactgcggcgcgctgctggcgccgggacagcgctacgactgcgacgacatccgcgacggcgacacgcgccgccagtgccgcgccatcgtccgcggcgaccgcaagcgctgcgacgacatcgacagccgcgacctgcgccgccagtgccgagccgtggtatcgcgtgcgccgtggcagtgcgacggcatcgacgaccgcgacatgcgccgcatctgccgggtcatcctgtcgcgctag

SEQ ID NO: 339888 - DNA, 2208 bp, Pseudomonas aeruginosa
gtgccgatcttcgcccgcttcacccttcgctcccgcgtcctggcggccctgctgctgtgcctctgcgcggccctgttctactcgccgccgggcgccgcggcgctgccgaacccgttggcggggagttcctccggtggcgagaaggtcagcgatgcgcagttggaacaatcgctgaaccaggtcatccagaccctggagaacgacaggcagcgcgccgacctgctgaaaaagctgaaacagctgcgcgacgtgaccaagaaaggcaaggaaagcgagggtggggtgctggggctgatcggcgataccctgaccagcctggaaaagcagttccagggcgcgaacagcccggtcgcgttatggggcaaccagttccagctggcgcgtgccgaactcgaggagcgttttcccagttggcgcgacctgccggcgatggtcttcgatttttcggtggtgatcctcctctgggcctgcctggccagcgcgctgctctggctcagccggcgcatgcgcgagcgcttcggcctgtcggcggagttgccgcagcatccgaagacccgcgacctgctgctgttttccctgcgcaagctggggccctggctggtggccttcctcatcaccctgtacctgtcggtggtgctgccggactccctgagcaagaccctggcgatggtcatggcctatgtgctggtctgcggcacgctgttctccgcgctgtgcgtgatttccctctcgctgctcagtggcccgcaccgccagcgcgccctggatatcctgcggcgccaggcgttccgcccgttgtggctgatcggcagcctcgccgcgctgggcgaggtcgcccacgatccgcggctgatcgccggcctcggcgagcacacctcgatctgcctgagtaccctggccaacgccagcgccgcgctgttcaccgcgctattcgtgatgcgtttccgccggccgatcgcccacctgatccgcaaccagccgctggagcgccgcctcaagcgccgtagcctgcacgacctggtgcaactggtcggctcgctgtggttcgtgccggtgctggtgctggtggggatttccctgttcgccaccttcgtttccgccggcgacagcagttcggcgttgcgccgggcgctggtctgcgcggtgctggcggtggtggcgatgaccgtgatcgggctgatccgccgccgttccagtcgggtcggcgccggcccgcgccgcagcgcgccgtacatcgagcagttgcaaagcttcggctacaccctgctgcacatcttcgtggtgctgttcttcatcgaggtcgccttgcgcgtctggggcatgtcgctgattcgctatgcggaaggcgagggcgagcagatcagcatgaaggtggtcagcttcggcaccaccctgctggtcgcctggctgatctggatcctcaccgataccgcgatccagcacagcctcggcctgggcggcaagagccggccgaacacccgcgcgctgaccatgctgccgctgatccgcaacgtgctgttcgccaccatcgcggtgatcgccctgatcgtcgccctggccaacatgggcatgaacgtcaccccgctgctggccggtgccggcgtgatcggcctggccatcggcttcggtgcgcagtcgctggtggcggacctgatcaccggcctgttcatcatcatcgaggactcgctgtcgatcgacgactacgtcgacgtcggcggccaccttggcacggtcgagggcctgactatccgtaccgtgcgcctgcgcgacctggacggcgtggtgcataccatcccgttcagcgagatcaagagcatcaagaactactcgcgccagttcggctacgcgatgttccgctggccggtgccggcgagcatgccgatcgacgacgcggtggcgctggtgcgcgaggtcgcgatggagctgcgcagcgacccggcggtctaccgcaacctgtggtcgccgatggaattgcagggcgtggagagtttcgacaacggccaggcgatcctgcgcttccgcttcaagaccgcgccgatcaagcagtgggaggtccagcgggcgttcaacctgcgcctgcgtcggcgcctcgaccaggccggcctcgaactgtccatgccgcgtctcaacgtacagttgagccgggcgcccaaggcgaaatccgcggaaccggacgagcagggcacgccggcggacggcggcatctag

SEQ ID NO: 339889 - DNA, 522 bp, Pseudomonas aeruginosa
atgcgcctgatcaccagctgcctgctcctggccgccgccctgccggccatggcgcagatctaccaatacaccgacgccaacggcaacaaggtattcaccaaccagccgccagacggggtgcaggcgcagaccgtcgaactgcagccgaccaataccgtaggaatcgacacgccggaaaagtcctccgcgggcaatgccccggccgccgatagcgaggctgccacctacgagatccttgccctcagcgacctccccacggaagaggcgctgcgcgccaacaacggcaccttcaacgtcagcgtcagcatccgcccggccctgcacagcggccaccagttgcaactggtgctggacggcaaaccctacggcacgcccagcggcggcacccgcttcaccctgcacgagatcgaccgcggcgaccacagcctcgcggtacaggtactcaacggcgaacgggtgctgcaatccagcccgccggtgaccttcaccgtgcagcgcgtgcacctcgggaagaagcgatga

SEQ ID NO: 339890 - DNA, 573 bp, Pseudomonas aeruginosa
atgatcccgcgcattctcggcgccctcctgctgtgcctggcctgcgccgcgcaagcgggggtctacacctacatcgacgccgagggcaaccgcgtctacaccgaccagccccccagcgggcgcaaggcccaacgcgtcgaactggcgccgggcaacagcgtggcgccgccgggcatacgctatcgtccgcccgccgcgccgctggaggtgaagccgccggcctaccagctactgcgcatcctcttccccgaaccggacgcaaccctgcgcgccaacagcggcgacgtcatcgtcaccgtcaccagcgagccggcgctgctgcccggccatcgctatcgcctgctgctcgacggcaagcctgccggagcgccgggacgcagcccggtgttcccgttgaagaacctcgatcgcggcacccaccaggtcgcagtggaaatcatcgatggcgacggcatgaccgtcgaaagcaccccgagccagcccttccacctgcatcgagtgagcatcgccgggcaacccctgccggaggtcgatacgccgctggtcagcgcggtacagccgagcgagcgctag

SEQ ID NO: 339891 - DNA, 1077 bp, Pseudomonas aeruginosa
atgccgaccgataccctgcaccgactgttgctcgacaatctgaccaccgcggtgatcctgctcaacggcgaactgcgcctggagtacatgaacccggcagcggagatgctcctggccgtgagcggccagcgcagccacgggcaattcatcagcgagctgttcaccgaatcgccggaagccttgaactcgctgcgccaggcggtggaacaggcgcatccgttcaccaagcgcgaagcgaccctgacctctatcaccggcgtcagcatcacggtcgactatgcggtgacgcccatcctcaaccgcaacgagacgctgctgctgctcgaggtccatccgcgcgaccggctgatgcggatcacccgcgaagaagcacagctgtccaaacaggagaccaccaagctgctggtgcgcgggctcgcccacgagatcaagaacccgctcggcggcatccgcggcgcagcgcaactactatcccgcgagctgccggaagagtcgctgaaggactacaccaacgtcatcatcgaagaagccgaccggttgcggaacctggtggaccgcatgctcggctcgaacaaactgccgaacctggcgccgaccaacatccatgaagtgctggagcgggtcagcagcctggtggaagcggagagccagggcagcatcaccctggtccgcgactacgacccgagcatccccgacctgctgctcgaccgcgagcaaatgatccaggccgtgctcaacatggtacgcaacgccatgcaggcgatcgccgggcagaacgacctgcgcctcggtcgcatcaccctgcgcagccgtaccctgcgccagttcaccatcggccacacgcgtcaccgcctggtgtgcaaggtggagatcatcgacaacggcccgggcattccggccgagctccaggaaaccatcttctaccccatggtcagcggccgtccggacggtaccggactcggcctggccatcgcccagaacatcatcagccagcaccaggggctgattgaatgcgagagccaccccggccataccgtgttcagtctgttcctgcccctggaacaaggagtgcattga

SEQ ID NO: 339892 - DNA, 1431 bp, Pseudomonas aeruginosa
atgagccgatcagagaccgtctggatcgtcgacgacgaccgctccatccgctgggtactggaaaaggccctgcaacaggaaggcatgaccacggtgagcttcgacagcgccgacagcgtgatcggccgcctcggccggcagcagccggacgtgatcatctccgatatccgcatgcccggcgccagcggcctcgacctgctggcgcagatccgcgaactgcatccgcgcctgccggtgatcatcatgaccgcgcattccgacctcgacagcgcggtggcctcctaccagggcggcgccttcgaatacctgcccaagccgttcgacgtcgacgaggcggtctccctggtcaagcgcgccaaccagcacgcccaggagcagcagggcctggagctgccggcgaaccaggcgcgcacgccggagatcatcggcgaggcgccggcgatgcaggaggtattccgcgccatcggccgcctcagccattccaacatcaccgtgctgatcaacggcgaatcgggtaccggcaaggagctggtcgcccatgccctgcatcgccacagcccgcgcgcagcctcgccattcatcgcgctgaacatggcggcgatccccaaggacctgatggagtccgagctgttcggccatgagaagggcgccttcaccggggccgccgcccagcgccgcggacgcttcgagcaggccgatggcggcaccctgttcctcgacgagatcggcgacatgccggccgacacccagacccgcctgctgcgcgtcctggccgacggcgagttctaccgggtcggcgggcacacgccggtgaaggtcgacgtgaggatcatcgccgccacccaccagaacctggaaagcctggtgcgcgacggcaagttccgcgaggacctgttccatcgcctgaacgtgatccgcatccacatcccgcggctggccgaccgccgcgaggacatcccggcgctggcccggcacttcctcagccgcgccgcccaggagctggcggtggaacccaagctgctgaaggcggaaaccgaggagtacctgaagaacctcggctggccgggcaacgtccgacaactggagaacacctgccgctggatcaccgtgatggcctccggccgcgaggtgcacatcgacgacctgccgccggagctgctgacccagccgcaggacagcgcgccggcggcgaactgggaacaggctctgcgccagtgggccgaccaggcgctgggccgcggccagtcgaacctgctggacagcgccgtgccggccttcgaacggatcatgatagaaaccgccctcaagcacaccgccggccgccgccgcgatgccgccgtgctgctcggctggggccgcaataccctcacccgcaagatcaaggagctggggatgaacgtcgatggagccgacgacgaaggcgacgactga

SEQ ID NO: 339893 - DNA, 351 bp, Pseudomonas aeruginosa
atgctcggcaggttgttcggtcccgcttcgctgccgacgtctgcgccgcaactgctggcggtcggggagagcgagcagggcctggtcctgcgcttcgatcgccaggctgcggttacggcggcacgggtggagggtgccctgacgttgcgcatcgtcgcccggggcgcggcgcagcagggagacgggcgatggctgggccagccgttgcgctggcgcgtccgcgaggagggaaaggcgctgctgttgagcctggtctcgacccgccccttgcaggggcgctggcagtggtcggaggacggcgagggctggcgcctggtcgtcgaactgcaggagcgcgacggccgggaataa

SEQ ID NO: 339894 - DNA, 462 bp, Pseudomonas aeruginosa
atgttccacgtcatcctgtttcaaccggagattcctccgaataccggcaacattatcaggctctgcgccaacaccggatgcagtctgcacctgatcgagccgctcggtttcgaactggacgacaagcgcttgcgccgtgccggcctcgactaccacgaatacgccagcgtacgccgctacccggatctgcagagctgcctcgaggccctcggccagccacgcctgttcgccttcaccaccaaggggtcgcgggccttccacgaagtggcctaccagcgcggcgatgccttcctcttcggcccggaaagccgcggactgccggaggacgtgcgcaacgccctgccaaccgatcggcgcctgcgcctgccgatgcgcgaaggctgccgtagcctgaacctgtccaacacggtggcggtgaccgtctacgaagcctggcgccagctcggcttcgccatggactga

SEQ ID NO: 339895 - DNA, 492 bp, Pseudomonas aeruginosa
atgaccgagcaagctaccaacggcgctgccgacgagcagcaaccccagttctccctgcagcgcatctacctgcgcgacctgtcgttcgagtcgccgaagtccccggaaatcttccgccaggaatggaacccgtccatcagcctggacctgaacactcgccagaagcagctggacggcgacttctacgaagtggtcctgaccgtatcggtgaccgtgaagaacggcgaggacaccactgccttcatcgccgaagtgcagcaggccggcatcttcctgatcaagaacctcgatccgtcgagcatgagccataccctcggcgcgttctgcccgaacatcctcttcccgtacgctcgcgaagccctggacaacctggtggtacgcggttcgttcccggcgctgatgctgtcgccggtgaacttcgacgccctctacgcccaggaaatcgcccgcatgcaggcctccggcgagatcccgacgccgtcggtccagtaa

SEQ ID NO: 339896 - DNA, 255 bp, Pseudomonas aeruginosa; identical to SEQ ID NO: 322119

SEQ ID NO: 339897 - DNA, 420 bp, Pseudomonas aeruginosa
atgcaattcgtttcccgtctgatcgagttcgccaccaaccactacctgctggtcgcggcgctgctggtcctgctggtcctgctgttgctgcacgagctgcgcaagggcggcaagagcctgtcgacccgcgagctgaccgcgctggtcaatgccgaccaggcggtggtcctggatatccgtccggccaaggagttcgccagcgggcacatcgtcgacgcgctgaacatcccggccgacaagctgaacagccgcatgaccgagctggaaaagtacaagggcaagaccatcatcctggtcgacgccatgggccagcactccggtacctggggcggcgtcctgaagaaggccggcttcaacgccgccaagctgtccggcgggatcggcagttggcgcggcgacaacctgccgctggtgaagtga

SEQ ID NO: 339898 - DNA, 1548 bp, Pseudomonas aeruginosa
atgactgccacgcccaaacccctggtcctgatcatcctggacggcttcggccacagcgaaagccctgactacaacgccatctacgccgcgaagaagccggtctgggatcgcctcctggcgacccagccgcacggcctgatctccggctccggcatggacgtcggcctgcccgacggccagatgggcaactccgaggtcggccacatgaacctcggcgcaggccgcgtggtgtaccaggacttcacccgcgtcaccaaggccatccgcgacggcgaattcttcgaaaacccggtgatcgccggggcggtcgacaaggccgtcgccgccgacaaggcggtgcacatcctcggcctgctctctccgggcggcgtacacagccatgaagaccacctggtggcgatggcgcagatggccgccaggcgcggcgccggcaagatctacctgcatgccttcctggatggccgcgataccccgccgaaaagcgcgcaaccgtcgctggagcgtctcgacgccaccttcgccgggctcggcaagggccgcatcgcctcgatcatcggccgctatttcgcgatggaccgcgacaaccgctgggaccgcgtccaggccgcctatgaactgatcgtcgacggcaaggccgagttcaccgccgactcctcggtggcagccctcgaggccgcctacgcccgcggcgagagcgacgaattcgtcaaggccaccgcggtggtcccggccggcgccgaagcggtgcgggtcgaggatggcgacgcggtgatcttcatgaacttccgcgccgaccgcgcccgcgagctgagccgcgccttcgtcgagccggcattcaatgagttcccccgcgaacgagccccgcaactggcaggtttcgtcatgctgacccagtacgcggcgagcatcccggcgccctgtgccttcccgccggagccgctgaccaacgtcctcggcgaatacctggccaagcatggcaagacccagctgcgcatcgccgagaccgagaagtacgcccacgtgaccttcttcttctccggcggccgcgaggaaccctacgaaggcgaggagcgcatcctgatcccctcgccgaaggtcgccacctacgacctgcagcccgagatgagcgcgccggaagtcaccgaccgtatcgtcgaggccatcgagcaacaacgctacgatgtgatcgtggtcaactacgccaacggcgacatggtcggccacaccggcgtgttcgaggccgcggtcaaggccgtggagtgcctggacacctgcatggggcgcatcgtcgaggcgctggacaaggtcggcggcgaagccctgatcaccgccgaccacggcaatgtcgagcagatggaagacgagtccaccggccaggcgcacaccgcgcacacctgcgaaccggtgcccttcgtctacgtcggcaagcgcaagctgagcatccgcgaaggcggcgtgctggccgacgtggcgccgaccatgctgaccctcatggggctggagcagccggcggaaatgaccggtcgcagcatcgtcatcctcggctga

SEQ ID NO: 339899 - DNA, 819 bp, Pseudomonas aeruginosa
atgtggttcctcctcgccacctcgctcctcgccctgtccttccagcgcctgctggctctcgccttgctgctcgcgacctgctgcctcgccttctacgacggagttctcgctccgcctgcggtcgccgccctggctgtactgggcgtcctcgccctgttgcgccggcgcctggcggcacgccgcgcctgggccctgggcctggagctgctgctggtcgccggcgcggtgggcctgttcctgcacctgctacccggcttcgccaaccccaaggtcctggacaaggcggtggtcggcccgcagagcctgccgttcaccatgtacttcaacttcgacaaggcactggtgccgttcctgctactggcctgcctgccgagcctgttccgcgacgaagcccgcgctcccggccgcccctggcactggctgctgctcgtggcggcggtgccggcgctgcttctgctggctgtcggcgtcggcctgctgcggccggaactccacgcgccggcctggctctggcagttcgtcctggccaacctgttcttcgtttcccttgccgaggaagcgctgttccgcggctacctgcagcaacgcctgggccaatggctgggcccctggcccgccctggcgctagcctcggcgctgttcggcctggcgcacttcgccggcggcccgctgctgatgctgttcgccggcctcgccgggctgatctacgggttggcctggctgtggagcggccgcctgtgggtggcgacgctgttccacttcgggctgaacctgacgcatctgctgctgttcacctacccgctctacagacccgcctga

SEQ ID NO: 339900 - DNA, 1437 bp, Pseudomonas aeruginosa
atgtccgtggccttcgtcgtcgacgacatccgccgctgccatccggctgaaatacgtggaagcgccccacagcgcgcggtgcggggcgttttttttaacggcggccacgggcatactaggccggtccaattcccaggtgcccgccaccccatgctccgcctccttcctctcctgctatccctcgcctgtctcgctccggccttcgccgacgagcgcgccgacacccaacgccagctggaacagacgcagaaggacatcggcgagctgaagaagctgctggacggcatccagcaggaaaagagcggcgtgcagaagcagctgaagtccaccgagaccgagatgggcgacctggaaaaacagatcaaggccctgcaggacgagctggacaagagcgaagccgagctgaaacggctggatggggagaaaaaaaaactccaggacgcgcgcattgagcagcagcgcctcctcgccatccaggcccgcgcggcctaccagagtggacgcgaggagtacctgaagctgctgctgaaccaggaacacccggaaaaattcagccgcaccctcacctactacgactacatcaacaaagcccgtctcgaacagctcgccagcttcaacgaaaccctccgccagttggccaacgtcgagcaggacatctctgcgcagaaagccgaacaactgagcaagcaaggcgagctggacagccgccgcgaggcgctggcagcgacccgcaaggagcgccagcaagccctggccaagctgaacagcgactaccgcgaacgcgaccagaagctcaagtcccgccaacaggaccaggccgagctggccaaggtgctgcggaccatcgaggaaaccctggcccgccaggcccgcgaagccgccgccgcggcggagcgcgagcgccagcgcgcgctggccgccgaacgcgagcgtgcgcgccagcagcaggcctcccccggacgagtcaccagcccgccgcgcgaacctgcgccgggcccgctggtctcaagcactggcgcggtctacggcggcgcgttcggctcggcccgcggcaagctgccgtggccggtgaatggccgcgtcgtggcgcgcttcggcagccagcgcggcgacgatccgcgggcgaaatgggacggcgtactgatttcggcgagcgccggcagcaccgtccgcgcggtgcacggcggacgcgtggtattcgccgactggttgcgcggagccggcctgttggtcatcctcgaccacggtggcggctacctcagcctttatggccataatcaaagcctgctgaaagacgccggcgacaccgtgaaggccggagacccgatcgccaccgttggaaccagcggcggccagagtagcccggccgtgtacttcgccattcgccatcagggccgcccggcggaccctactacctggtgccgcgcgcagggatag

SEQ ID NO: 339901 - DNA, 1311 bp, Pseudomonas aeruginosa
atgctgcattgcttccgtcccaccaccctggcgctggccctgctgctcggcgcgggcgcggcccaggctgccgacgccccggccgacgccgcgccactggccaacggtagcagtgccccgctgcccctcgacgagctgcgtaccttcgccgaggttctcgaccgggtgaaggccgcctacgtcgagccagtggacgacaagaccctgctggagaacgccatcaagggcatgctcagcaacctcgacccgcactccgcctacctcggcccggaggacttcgccgagctgcaggaaagcaccagcggcgagttcggcggtctgggcatcgaggtcggcagcgaagacggcttcatcaaggtggtctcgccgatcgacgacacccccgcggcccgcgccggcatccagcccggcgacctgatcgtgcagatcgacggcaagccgaccaagggccagtcgatgaccgaagcggtcgacagcatgcgcggcaaggccggctccccgatcaccctgaccatcgtccgcgatggcggcagaccgttcgacgtcgaactcaagcgcgccatcatcaaggtcaagagcgtcaagagccaggtcctagaacccggctacgcctacctgcgcatcacccagttccaggtcaacaccggcgaggaagtggtcaaggcgctgaaccagctgcgcaaggacaacaagggccgtctcaagggcctggtcctggacctgcgcaacaaccccggcggcgtgctgcagtccgccgtcgaggtagccgacgccttcctcaccaagggcctgatcgtctacaccaagggccgcatcgccaactccgagctgcgcttcagcgccgacccggccgatcccagcgacaaggttccgctggtggtgctgatcaacggtggcagcgcctcggcggcggaaatcgtcgccggtgccctgcaggaccagaagcgcgcgatcctgatgggcaccgacagcttcggcaagggctcggtgcagaccgtgctgccgctgaacaacgaccgcgccctgaagctcaccaccgcgctctactacacccccaacgggcgctccatccaggcccagggcatcgttccggacatcgaggtcggacgcgccaaggtgacccaggagcggagcagcttcgagggcttcaaggaagccgacctgcagggccacctggccaacggcaacggcggcgccgaccgccccaccggcaagcgtgccgcgccgagcgagcgcccgcaggattccgactaccagctcagccaggcccttagtctgctgaaaggcctgagcgtcacccgcggcaactga

SEQ ID NO: 339902 - DNA, 774 bp, Pseudomonas aeruginosa
atgtcggcgttccgcgttgccctgctgggcctgtgcctgctgttcaaccaggcccaggcccgccaggaccccgtcccctaccagcgcccgccgctgctgaccgtggtcatcgatgacctcgggcaaaacctggcgcgcgaccgccgggtcctcgacctgccccccggcgtaaccctggcgatcatcccggaaaccccgcatgccgccgaactggcccgcgaggcgcaccagcgcgggcgcacggtgatcctgcacatgccgatggacccagccggcggtccctacgcctggcggccggagctgacccaggaagagcgtgcgcggcggctggacgcggcgctggccaaggtgccgttcgtgcagggcctgaacaaccacgagggcagccgcatgaccgcggtgcgcccggcgatggcctggctcgccgaggaactccagcgtcgcggcctgtacctggtcgacagccgcaccagcgccgccaccgtggccgccagcgaggcgcagcggatcggcctggcgagcgtctcgcgcgatgtgttcctcgacaacgaagccacaccggaagcggtctccgcacaactgcaggccggcgtcgccctggcccgcaagcagggttcggcgttgctcatcggccacccgcacaaggccaccctcgacgtgctggcgcgggagctgccgaagctgcgcgcccagggcatcgagctggtaccgccgcagatgctcatcggcgagcgcggcaaccgcaacgtcaacccacgccaggcgccgcactga

SEQ ID NO: 339903 - DNA, 1482 bp, Pseudomonas aeruginosa
atggcccgcccctcccctcccatgcccctgctcgccgccgccctgctggtcgctggcgcgattcccctcggtttcatctggatcctcaccagcgccaagttcgagataggcggcgccagccccggcgagagcaccgtcggcaaggtcgagaacatcgaccagcgcgccatggagcaattctgcaccggcgtgcgggcgacgcccgccggcacctggctggtaggccggcgcgaggtcggccgcgacgagcaggcactgcccgagggcgtcatcgacctggacctggtggcggccgcccagcccagggaagaagagtccgaaccccacctcttcaacttcctcaacggcatgctgctatccggcggcgatccggaaaccacctatgtctcgcgcctgggcgcggacggcgtgttccacgaagtggcgcggctcggcgagaccgcctgcctggaagtcacgccggacggttccagcgtcttcctgctcaccggcctgcggcgcccgggcaaggacaacggtcagcgcgagcagacagtggtgctgcgcagcgacgaccagggcaagagctggcggcggctcgaggaaggcttcatggccgaggcgaatcgactgggctgggctctcgcaccgcgcttccacggcaaggacgaagtctgggtctggggtgatttcgaatacggcggtgccgatggcggccgggaacccggccagccgagcgggctgttctattcgcccgaccgcggcgccagcgtcgagtcgatcgccacctccgcgccgctgctggtcgacctcgcctacgcccgcgagttggcgccgaacggcgtcagctggggcgattacaacggcaagcacgggcagatcaaggcacacgtcgcccaactggacgcggagcgcgccgcgatctgggtaagccagaccttccgctatggcccgcccgaagggcgctacctgaccagctcggtattggtcaccacccaggccgaactgcgccgcgagggcggacgctggcagatgggcgcgatccggcgcaccgacggcgtggccgtcgagcgcctggaacagaacacggacggtcgggtgatcgcagtgctcgaccacccggacgaatcgcgctcgctgatcgccgagctcgatcgcgacgcgctcgaatggaagatcaccggcaagctgcccagcccgttctggcccctgccgtccagttccgggctgcgcgagttctacatgggcaggaatgtgctgctggccaacaccatgagccactacgaagtgccgctgtggctgtatcccgacgaggagccggcgagcgtctccgccaacgcggtgtactactcggacgactggggatcatcctggcgccgcctggacatcgccggctacctcggcgtgctcggtttcgacgaggcgcacgaccgggtgttctgggcccgcggcaactggtacgacagccgcgacctcggcgtccaggcctacgacctggactga

SEQ ID NO: 339904 - DNA, 756 bp, Pseudomonas aeruginosa
atgctgaaagtcctgatccagaccctgatcctgggggtgttgctgggggcctccgcggcccgtgccgaattgcccgccgactacaaggtggtgctgctgaccgagaacttcccgcccttcaacatggcggtggatgacaagaacttcgcccgcgacgacggcatcgacggcatcagtgccgacatcgtccgggagatgttcaggcgcgccggcatcggctattccctgagcctgcgcttcccctgggaccgcctgtaccggttgaccctggacaagcccggctacgggctgttctccatgacctacacccccgagcgggtgccgcagttcaagtgggtcggcccgctggccgacaccagttgggtgttgctggcgccggccggcagcaagatcgccgtgaagaatctcaaggacgccgcccgctacaagctcggcgcctacaagaacgacgcggtcagccagcacctggaagcccagggcatcccggtgatcaacgccctgcgcgaccaggaaaacgtgaagaagcttaccggcgggcagatcgacctgtgggccaccaccgatccggtcggtcgctacctggccaagcaggaaggcgtgtccggcctgcagacggtgctgcgtttcaacgaggccaagctctacctggcgttgaacaaggacactccggacgaggtggtggagcgcctgcaaaaggccctggagcagatgcgccaggaaggcttcgtcgacgaagccgtcgccaactacctctga

SEQ ID NO: 339905 - DNA, 753 bp, Pseudomonas aeruginosa
atgcaaagaagcctgctcttcgcgctgctcgcaaccctgctgctggtcggcggcgcgcgcgccgaaaccgatcccgactacagcatggtcctgctcacggagaacttcccgccgtacaacatggcgatcaacggcaagaacttcgcccaggaagacaacatcgacggcatcgccgtggatatcgtccgcgagatgttcaagcgcgccggcatcaagtacagcctgaccctgcgtttcccctgggaccgcatctacaagctggcgctggagaagcccggctacggggtgttcgtcaccgcccgcctggccgagcgcgaggacaagttcaagtgggtcggtccgatcggcccggacgactgggtgctgctggccaagggcgacagcccgatcaccctgggcagcctggacgaggcgaagaaataccggatcggcgcctacaagggcgatgccatcgccgagttcctcggcaagaacggtttcgaggccgacctggcgctacgcgaccaggaaaacgcgcagaagctggtcaagggccagatcgacctctgggccagcggcgatcccgccgggcgctacctggccaagcaggaaggcgtgaccggcctgaagacggtgctgcgcttcaacagcgaccagctgtacctggcgctcaaccgcgagactcccgacgaagtggtgcagaagctccaggcagccctggacggcatgcgcaaggaaggcttcgtcgaggacatcctcaacagctatctctga

SEQ ID NO: 339906 - DNA, 747 bp, Pseudomonas aeruginosa
atgtccatcttccgtctggctctcggctgcgtcggcagcctggccctgctatgcgctagcgccctggcgcgcgccgaaaccctggtcctgctgaccgagaacctggtgccgttcaacatggcggtgaacggcggcaactacgccaagaacgatggcatcagcggcatcagcaccgataccgtgcgcgccgcctgcgagcgcgcgcagatcgagtgccagctgatcctgcgtttcccctgggaccgggtctaccagcaggcgctgagcgagcccggctatggcgtgttttccaccgcccgtacgccggagcgcgaggacaagttcaagtgggtcggcccgctggcggtcaacgactgggtactgatggcccgcggcgacagcagcatccacctgaacagcctggaagacgccgcgcgctatcgcatcggcggctacaagaacgacgccatcagccagcacctggtcgaccgcggcctgcaggtgcaattggcgctgcgcgacaacgagaacgtcgacaagctggccagcgggcagatcgatctctgggtcaccgccgatccgagcgggcgctacgtcgcccagcgcgagggcctcaaggaggtgaaggtggtccagcgtttccataccgccgagctgttcctggcgctgaacaaggacaccccggacgagctggtgcagaagttgcaaacggcggtcgacgcgctgcgcagcgaaggcttgttgaagcagatccgcgagcgctactga

SEQ ID NO: 339907 - DNA, 771 bp, Pseudomonas aeruginosa
atggcactggcaaaacgcatcatcccctgcctcgacgtggacaatggtcgagtggtcaagggcgtcaagttcgagaacatccgcgacgccggcgacccggtcgagatcgcccgccgttacgacgagcagggtgccgacgagatcaccttcctcgatatcaccgccagcgtcgacgggcgcgacaccaccctgcataccgtcgagcgcatggcaagccaggtgttcattccgctgaccgtgggcggcggcgtacgcagcgtgcaggacatccgcaacctgttgaatgccggcgcggacaaggtctcgatcaacaccgccgcggtgttcaaccccgagttcgtcggtgaggccgccgaccgcttcggctcgcagtgcatcgtggtcgccatcgatgcgaagaaggtttccgccccgggcgaggcgccgcgctgggaaatcttcacccatggcgggcgcaagcccaccgggctggatgccgtgctctgggcgaagaagatggaagacctgggcgccggcgagattctcctgaccagcatggaccaggacggcgtgaagagcggttacgacctgggcgtgacccgcgccatcagcgaggcggtgaacgtaccggtgatcgcttccggcggcgtcggcaacctggagcacctggccgccggcatcctcgagggcaaggccgacgcggtgctcgcggcgagcatcttccacttcggcgagtacaccgtgccggaagccaaggcctacctcgccagccgcggtatcgtggtgcgctga

SEQ ID NO: 339908 - DNA, 738 bp, Pseudomonas aeruginosa
atgctgatcattcccgcgatcgacttgaaagacggcgcctgcgtgcgtctgcgccagggcctgatggaagacgccacggtcttctccgacgatccggtggcgatggccgccaaatgggtcgatggcggttgccgccgcttgcacctggtggacctgaacggcgctttcgaaggcaagccggtcaacggcgaggtggtcaccgccatcgcccgtcgctacccggacctgccgatccagatcggtggcggcatccgctcgctggaaaccatcgagcattacgttcgcgccggcgtcagctacgtcatcattggcaccaaggcggtcaagcagcctgagttcgtcggcgaggcctgccgcgccttcccgggcaaggtcatcgtcggcctggatgccaaggacggtttcgtcgccaccgacggctgggccgaggtcagcgaagtccaggtgatcgacctggctcgtcgcttcgaggccgacggggtgtccgccatcgtctacacggatatttccaaggacggcatgatgcagggctgcaacgtcgaggctaccgccgcgctggccaatgccacgcggatcccggtgatcgcctccggcggcatccacaatctcggcgacatccagaagctgctggacgcccgcaccccggggatcatcggcgccatcaccggccgggcgatctacgaaggcaccctggacgtggccgaagcccaggcgctgtgcgacaacttcaaggcctga

SEQ ID NO: 339909 - DNA, 261 bp, Pseudomonas aeruginosa
atggccagggcgaagagcaagacgccgatcctccagctggacgccgcgcagacccaggacgcggcactggcgatcaagcgcttcatggaggaccgcttcgaactggagctgggctccttcgaagccgaggaactgctcgatttcttcgcccgcgagttcgccccgtacttctacaacaaggccatcctcgacgtgcagtcgtacctgaaggaacggttcgacagcatcgagagcgatgtctgggcgctggaaaagagttga

SEQ ID NO: 339910 - DNA, 639 bp, Pseudomonas aeruginosa
atgcagacggtagccgtgatcgactacggcatgggcaacctgcactcggtggccaaggccctcgagcacgtcggtgccggccgggtgctggtgagcagcgacgcggcagtgatccgcgaggccgaccgggtggtgttccccggggtcggcgcgatccgcgactgcatggccgagatccgccgcctgggcttcgacgccctggtccgcgaggtcagccaggaccgcccgttcctcggcatctgcgtcggcatgcaggcattgctggagtgcagcgaggagaacgacggggtcgactgcatcggtctgttccccggccaggtgcgcttcttcggcaaggacctgcacgaagccggcgagcacctgaaggtgccgcacatgggctggaaccaggtgagccaggcggtggagcacccgctgtggcacgagattcccgaccaggcgcgcttctacttcgtgcacagctactacatcgaggccggcaatccgcgccaggtggtggggcacgggcactacggcgtcgatttcgccgccgcgctggccgaaggctcgcgtttcgccgtgcagttccacccggaaaagagccatacccacggcctgcaactgctgcagaacttcgtggcctgggacgggcgctggtag

SEQ ID NO: 339911 - DNA, 594 bp, Pseudomonas aeruginosa
atggccgaacgcaaggcatccgtcgcgcgcgacaccctggagacccagatcaaggtctccatcgacctggatgggaccggcaaggcccggttcgataccggggttcccttccttgaccacatgatggaccagattgcccgccacggcctgatcgacctggacatcgagtgcaagggcgacctgcatatcgacgatcaccacaccgtcgaggacatcggcatcaccctcggccaggccttcgccaaggccatcggcgacaagaagggcatccgccgctacggccacgcctacgtgcccctcgatgaggcgctgtcgcgggtggtcatcgacttctccgggcggcccggcctgcagatgcacgttccctttacccgtgccagcgtcggcggcttcgacgtcgacctgttcatggagttcttccagggcttcgtcaaccacgcccaggtgaccctgcacatcgacaacctgcgcgggcacaacacccaccaccagatcgagaccgtgttcaaggccttcggccgcgcgctgcgcatggccatcgagctggacgagcggatggccgggcagatgccgtcgaccaaagggtgcctgtga

SEQ ID NO: 339912 - DNA, 399 bp, Pseudomonas aeruginosa
atgcccgtgatcgtcgaaaccctcgcccaacccagcgcccaggatcgcctggacctggcgaagatctacgccgacgcaccggactggctgttcgccccgcatgccgacggcgcggcgctggtcgcggccgggctggccgccggcgagctgatcgccgggcgcttcaacgaccgcctgctgggtgccgccctgctgcggcgcggcggcgacgcctggcagctgtcgcacctctgcgtgcgcggcatcacccgcggccgcggggtcggccgacgcctcctcgacgaagcccgacgcctggccgccgaagccggcaagccgctgcgcctggtcgccccggacgggcacctggaatcccgcgccctcgccgcgcgccacgggctgccgctggacagcctctga

SEQ ID NO: 339913 - DNA, 237 bp, Pseudomonas aeruginosa
atgtccttttcctccgccgaacgcgccgccctgcttgccctcaagggagtcggcccgaccgtgctgcaacgcctggaacagatgggcctggacagtttcgtccggctgcgcgattgcgatgccgcaagtatcctcgcccaaggcgcggtcctgaccggctccagttgctggaagaacagcccgcaggcgcgggcagcgatcgtcaccgtgctgcagcgcgcagccagcgacgcatga

SEQ ID NO: 339914 - DNA, 1107 bp, Pseudomonas aeruginosa
atgaacgacgtcgacgtactggtagtcggcgccggcgccctcggcctggcctgcgccgcgcgcctggccgaagccggccacggcgtactggtggcggagcgcgaacggctggtcggtagccacacctccagtcgcaattccgaagtgatccacgccggcctctactacccgcccggctcgctcaaggccgatctctgcctggaaggccgcgaacgcctgtacgcctggtgcgcccgccacggcgtcggccaccggcgcatcggcaagctgctggtggcggtggaggaaaacgagcgcgagaagctccaggccctggcggccaacgcccgcgcctgcggggtcgacgacctgatgccgctggacggcaccacgctgcgcgcgctggagccccaggtccgcggggtcgccgccctgctctcgccgagcacgggaatcatcgacagccacgcctacctgcaatcgctgcaggccgtcgccgagcgccacggcgcacaactggcgctggacacccgggtcgaccgcctggagcgccacgccggcggctggcgcgccgaaggacagagcgtcggcgaagcgttccggttgcgcgcgggctgggtggtcaatgccggcggcctgttcgcccaggcgctggcgcaacgcaccgaaggcctcgatccgcgcctggtgccggcgctgcacctgtgccaggggcgctatttctcctacagcggccgctcgccgttccgccacctggtctacccgatgcccgaggcgcgcaccgccgggctcggcatccacgccaccctcgacctcggcggccagttgcgcttcggtcccgacgtgaattacgtggacaacctcgactaccgcgtcgacgaatccctcggccccgccttcgcccaggccatctcgcgctacttccccggcatcgaccctcggcgcctggccgccggctacgccggcatccggcccaagctcggcgggccgggggaacccgccgccgacttcatcatccaaacccctgccgaacacggcctgcccggcctggtcaacctgttcggcatcgagtcgcccggcctcaccgccagcctggcgctcgccgaacgggtcgcccgagcactctga

SEQ ID NO: 339915 - DNA, 2253 bp, Pseudomonas aeruginosa
atgaaagcattcggcaaggtcctggggctgttcttcctgggactcttactgctcgtcgtggccctgggcttcgccctgacccacctgttcgatcccaatgactacaaggacgaaatccgccagatcgcccgcgacaaggccaacctggagctggacctgaagggcgacatcggctggagcctgttcccctggctgggcctggaactgcacgacaccagcatcgccagcgccgccacgccgaccaagccgttcgccgacctgcagatgctcggcctgtcggtgcgggtcctgccgctgctgcgcaaggacgtacagatgagcgcgatccgcgtcgaaggcctgagcctggacctggtccgcgacaaacagggcaagggcaactgggaaaacatcggcaagccggcccagccccaggcctcggtcgctccttccgccaccccgccggcagcggacggcaagggcgcccaggcgcaggcaccggagcaggcgccgcagaacgacagcccgcgcaccccgatcaagctcgacatcgacagcctcaacgtcaacaacgcccgcgtcacctacaccgacgaagccagcggcaagcagtacaacgtcgagggcatcgagctgagtaccggcgccattcgcgaaggcagcagcattccgctgaagctcaacgcctacctcggcaccaaccagccggtggtgcgggtcaagaccgagctgaccggcaacctgcgcttcgacaccgcgctcagacgctaccagttggaagacgccaggctctccggcgaggcctcgggcgagccgctgcaaggcaagaccgccaccttctccgcccagggccagttgctgctcgaccagtcggcgcagatcgccgagtggaacggcctgaagctgagcgtcaaccagttgcgcgccctcggcgaactgaaggcccgcgagctggacaaggacgccaaattcagcggcggcctgtcgatcgcgccgatgaacctgcgcgagttcctcgccggcatcggtgtgaccctgccggccatggccgacgccaacaccctcggcaagttcgagctgaacacccgcctggccggcagccgcaacagcctgaatctcgaagacctcaagctgggcctggacgacaccgccttcagcggccgcttcggcatcgccgatttcgccaggcaatcgctgcgcgcccagctcaagggcgacaagctcgacctcgaccgctacctgccggccaaggccaagcaggcccaggatgccgccagcgccacgcgcaaggcggaagtcgacgccaccgtggccagtgccgcccagggcaacacgccgctaccggaaaaaccgaccaggcaggcctggagcgacgcgccgttgctgcccatggcgaccctgcgcaagctcgacctggacgtggcgctgaacttcggtcggctgaccgtcgagaagctgccgatcgacgacgccagcctgaagctgcgtggccagggcggcgtgatcagcctcgacgacatgcgcggcgggctgtacaacggccgcttcaacgccaaggccaacctcgacgtacgccaggacagcgccgtgttgaccgccaccaagcacatcgccaacgtgccggtggagcgcttgctcgaagcccagggcaagaaaccgccggtgaaggggctgctcgacctcgacgccgacatccgcaccagcggcaacagcgagaagtcctggatcgaccatctcaacggcagcgcacgcttcagcctgatcaacggcgtgctgctcgacgccaacctggagcaacagctctgccagggcatcgctaccctcaaccgcaaggcccttgccggtacccacggcggcaaggacacgcctttccgcgagctcaagggcagcctgaacttcaccaacggcgtggccagcaaccctgacctgaaggtcgccattcccggcctggcggtcagcggccacggcgatatcgacctgcgcgtgctgggcatggactatcgcatcggcgtggagatccagggcgacaagagcgacatgccggacccggcctgccaggtcaaccagcgctacgccggcatcgaatggcctctgctctgccgcggcccgctggaactcggcgccaaggcctgccgcctggacaaggaaggcctgggcaaggtcgccgcgaaactggccggcaatcgcctcaacgaaaaactcgaagagaagctcggcgacaaggtcagtccggagctgaaagacgcactcaaagggctgttcaaccgcaaatga

SEQ ID NO: 339916 - DNA, 1068 bp, Pseudomonas aeruginosa
atgacacctgaaggcttcaacggcgcggtcctcgactggtacgaccgtcacggtcgcaaggacctgccctggcagcagggcatcaccccctaccgggtgtgggtctcggaaatcatgctgcaacagacccaggtcagcaccgtgctcggttacttcgaccgtttcatggcagcgttgcccgacgtcgaggcactggccgcggcggccgaggacgaagtcctgcacctgtggaccgggctcggctactacagccgtgcgcgcaacctgcacaagaccgcgcagatcgtggtcgagcggcatgccggggagttcccccgcgacgtcgagcaactcgccgaactgcccggcatcggccgctccaccgctggagccatcgccagcctgtcgatgggcctgcgcgcaccgatcctcgacggcaacgtcaagcgcgtactggcgcgctacctggcgcaggacggctatcccggcgaaccgaaggtggccagggcgctgtgggaggccgccgaacgcttcaccccgcacgcacgggtcaaccactacacccaggcgatgatggacctcggcgccaccctctgcacgcgcagcaagcccagttgcctgctttgcccgctggtctccggctgccgcgcgcacctgctcggccgcgaagccgattatccgcagcccaagccgcgcaaggcgttgccgcagaagcgcacgctgatgccgatcctggccaaccgcgacggcgccatactgctctaccggcggccttccagcggactctggggcgggctctggagcctccccgaactggacgacctcgacggcctcgaaccgctcgccgcgcgccattccctggccctcggcgagcgccgcgaactgagcggcctgacccataccttcagtcatttccagctcgccatcgagccctggctggtggcggtggaaggcgctccgcgcgccgtggccgagggcgactggctctggtataacctcgccaccccgccgcgcctgggtctcgccgctccggtgaagaagctgctcaagcgcgcagaacaggaactcggacgcggcacgaccgcgtga

SEQ ID NO: 339917 - DNA, 273 bp, Pseudomonas aeruginosa
atgagccgcaccgtgatgtgccgcaagtaccacgaagagctgcccggcctcgaccgcccgccgtatcctggcgcgaagggcgaggacatctacaacaacgtgtcgcgcaaggcctgggacgagtggcagaagcaccagaccatgctgatcaacgagcgtcgcctgaacatgatgaacgccgaggaccgcaagttcctccagcaggagatggacaagttcctctccggcgaggactacgccaaggccgacggctacgtgccgccatccgcctga

SEQ ID NO: 339918 - DNA, 1083 bp, Pseudomonas aeruginosa
atgaccccatccctctctggcctgcctccgatccgcaccgcgctgatcggctacggcttcgccggcaagaccttccacgccccgctgatccgcgcggtaccggcgttgtgcctggagcacgtggtctcccgcgaccctgggcgggtgcacgccgacctgcccgaagcccgggtcagcgccgatccggatgaggccatcgaggccgccgacatcgacctggtggtcatcgcctcgcccaatgccacccacgccagcctcgccgaacgggccttgcgcgccggcaagcacgtggtggtggacaagccgttcaccgtcaccctggccgaagcccggcgcctcgccgacctcgcccgcgaacggcctggccaggtcctctcggtgttccagaaccggcgcttcgacagcgacttcctcgccgtggaggccgccctgcaggccggcagcatcggcccggtgcgctacttcgagtcggccatcgagcgcttccgtccgcaggtccgcgaccgctggcgcgaacacgacctacccggctccgggctgtggttcgacctcggcccgcacctgctcgaccaggcactgtgcctgttcggcataccgcagcgtatgcacggacacctgcgccggctgcgcgagggcgcgctgaccgacgactggttcgaggtcctgctcgactatccgcactgccaggtggcgctgcgcgccagcatgctcgctgccaatccggcgccacgcttcaatgtgcacggcgaccacggcagcctgctaaaggccggcgccgacatccaggaagcgcaactgctccagggactgcaccccggttccgccggctggggccgcgatcccgacctgctgcagcatatcgacggccagggcctgcgccagtcgctggtcaccccggctggcgaccagagccgctactaccaggcgctagccgccgccatccgcggtcagtcgcgcaacccggtgtcggcgcaacaggcctgcgcgctgatggccctgctggagttggcacgacgctccgccgaggaaggccggagcctgccggtggagctgcgcgacgaggaacgccaggcctggaactga

SEQ ID NO: 339919 - DNA, 738 bp, Pseudomonas aeruginosa
atggcggagagaaagaccctgttgctgaccggggcgagccgcggtatcgggcatgccacggtgaagtacttcaatgccgcgggttggcgggtgttcaccgcgtcgcggcagagctgggccagcgaatgtccctgggcggacggcgaggaaaaccacatccacctggacctggaggacattcccggcgtcgaggccagcctggaactgatccgcgagaagctcggcgacggccggctccacgcgctggtggacaatgccggcatctcgcccaagggcgaaggcggcgagcgcctcggtgtgctggaaaccgactacgccacctggctgcgggtgttcaacgtcaacctgttctccaccgcgctgctggcgcgcggcctgttcgccgagctgaaggcggcgcagggaacggtgataaacgtgacctccatcgctggctcgaaggtgcatccgttcgccggggtggcctacgccacttccaaggcggcgttgtccgcgctgacccgcgagatggcccacgacttcggcccgcatggggtgcgggtgaacgccatcgcgccgggggagatcgacacctcgatcctgtcgccgggcaccgaggagatcgtcgagcgcagcatcccgctgcaccgcctcggccggccggaggagatcgcttcgctgatctacttcctctgcaccagcggcgcatcctacgtgaatggcgcggaaatccacgtcaacggcgggcagcatgtctag

SEQ ID NO: 339920 - DNA, 690 bp, Pseudomonas aeruginosa
atgctgaagaaaagcttcaactccctgctcgccacctggctcgccggcctgctggtgatgctgccgctggtactcaccctggccttgctggcctgggtggtcagcttgctgaaccgcttcgtcggtccatccagcctgatcggtcgcggcttcgccgccatcggccagccgctcgccggcgactcgccactggcctacctgctcggtaccgcgctactgctggtagccatctacctgcttggcctcggcgtacagctaggcctgaagcggccgctggccaacctgttcgacctgaccctgcggcgcaccccgctgatcggcaacctgtacaacctggccgaccgtttcgtcggcctgctggacaagaagcaggacgccgacatcgccgcgatgagtccggtgtggtgtttcttcggcggcgacggcgccgccgtgctggcgctgatgcccaaccccgaagcggtggaactggacggccgcgcgcactacgcgatcctggtgccgaccgcgccgatcccggtgggcggcggcctgctctacgttccggtggaatgggtgaaaccggcacagatcggcatggacaccttcaccagcatctatgtgtcgatgggcatcaccccaccgccgccgctggccgccgccaaggtgctggcggagccgtgcgcggagcagccgccggcggctccatag

SEQ ID NO: 339921 - DNA, 774 bp, Pseudomonas aeruginosa; identical to SEQ ID NO: 323134

SEQ ID NO: 339922 - DNA, 753 bp, Pseudomonas aeruginosa
atgaagaactataagaagatcctgctggccgccgctgcaaccctggccttcgccctcgacgccagcgccgccgacaagctgcgcatcggcaccgaaggcgcctacccgcccttcaacggcatcgatgccagcggccaggcggtcggcttcgacctcgacatcggcaaggcgctgtgcgccaagatgaagaccgagtgcgaggtggtgacctccgactgggacggcatcatcccggcgttgaacgccaagaagttcgacttcatcgtcgcgtccatgtcgatcaccgacgagcgcaagcaggcggtcgacttcaccgatccctactacaccaacaagctgcagttcgtcgcgccgaagagcgtcgacttcaagaccgacaaggactccctgaagggcaaggtgatcggcgcccagcgcgccaccatcgccggcacctggctggaagacaacatggccgacgtggtcaccatcaagctctacgacacccaggagaacgcctacctcgacctctcctcggggcgcctggacggcgtgctggccgacaagttcgtgcagtacgactggctgaagagcgacgccggcaaggagttcgagttcaagggcgaaccggtgttcgacaacgacaagatcggtatcgccgtgcgcaagggcgacccgctgcgcgagaagctcaacgccgcgctgaaggaaatcgtcgccgacggtacctacaagaagatcaacgacaagtacttccccttcagcatctattga

SEQ ID NO: 339923 - DNA, 696 bp, Pseudomonas aeruginosa
atgattctcgacctgcatgggttcggcgagcaactgctcgccggtacctggatgaccctcaagctgtcgctggcggcggtctgcgtggggctgttgctcggcctcctcggcgccatcgcgaagacttcgaagtacgcggccctgcgcttcctcggcggcacctacaccaccatcgtccgtggcgtgccggaaacgctctgggtactgatgatctatttcggcacggtgagcggcctgaacgccctcggcgaccttttcggcaagccggacctggcactctcgccgttcgccgccggcaccctggccctcggcctgtgcttcggcgcctacgccaccgaggtgttccgcggcgcgctgttgtccattccgcgcggccatcgcgaggccggccaggcgctcggcctgtcgcccggacggatcttctggcgcatcgtcctgccgcagatctggcgggtcgccctgcccggcctcggcaacctgtacctgatcctgctgaaggacaccgcgctggtgtcgctgatcaccctcgacgagatcatgcgcaaggcgcaggtcgcctccaacgcgaccaaggaacccttcaccttctacatgaccgcggccgccatctacctgagcctcacggtcgtcatcatggtcgccctgcacttcctcgaacgtcgcgccggccgtggtttcgtgaggaacgagctatga

SEQ ID NO: 339924 - DNA, 693 bp, Pseudomonas aeruginosa; identical to SEQ ID NO: 323137

SEQ ID NO: 339925 - DNA, 1221 bp, Pseudomonas aeruginosa
gtgtccgaaaccttcccgttcctcactggcgacgccctgtcgcagcgcttcctcgcgctggacgcgttcctcctcgaacaccagcggctctggcgaccccgcccgttcagcgaaccgaccctggcgtgggaagccgaacacgccgagctggcgtcctggctgcgcgggcgcagcctcgaacaggccgacgcggagcacaaccagcccacccgcctggccgcgcccgcgccttatccgcagctcgccgcccaggccgcagcgctgggcgcggtcggcgaactgccattggcggaacgcccgcaggcaccgaaccgcttcaatgtcgacgtaccgggacgcaagtggcagcagatcggcctgttcgccgggcgcctgcagttcgccaggccggtcgtccactggctcgactggtgctccggcaagggccatctgggccgcctgctggcccatgcggggcaaccgctgacctgcctcgaacacgatcccgcgctggtcgccgacggacagcgcctgagcgaccgcctggggctctccgcccaccacctccgccaggatgtgctggccgcggactgcgccgagcgcctgcttcccgggcatacgccagtggccctgcacgcttgcggcgaactgcacctgcgcctgctgcgcctggccagccaggccggctgtcgccaactggcggtggcgccatgctgctacaaccgcattccggggcctttctaccagccactctcgcaagcagcaggccgatcgctgctcgcgctatcgcttgacgacctgcgcctgcccctgagcgagaccgtcaccgccagccaacgggtccgtcgccagcgcgaccagtcgatggcccggcgcctgggtttcgacctgctgcagcgcgagctacgcggaatcgaccagtacctcagcgtgccttcccttccggtggcctggctggaacgtccatacgccgactactgtcgcgaactcgccgccctcaagggacttcccgaaccggccgcgcgcgactggcaggcgctggaagcggccggctggaagcgcctggcgatggttcgcaacctggaactggtgcgcgccctgttccgccgcccgctggaactctggctgctgctggaccgctgcctgtatctggtcgaacagggctatagcgtccgcctgggcgagttctgtccgacctccctgtctccgcgaaacctgctgatccttgcggagcgcagctga

SEQ ID NO: 339926 - DNA, 471 bp, Pseudomonas aeruginosa
atgggtcactacagcgcttccgactttcccttcaagggctccattggccagctcatcggcgtcagtgccgcgaccaaggaccgcatcctcgagaagcacctcgccgcgctggacataaccgccgcccagttcaaggtgctgatcttcgtcggtctcaaccgtgccaacagtccggtcgaactgtgtcgcgagctgtcggtggacagcggctcgatgactcgcatgctggcgcgcctggagaaaaaagggctgctgctgcgtggtcgctgtcccgaagaccgccgttgcctgcgcctggatctcagcgaagcgggacggaaggtccaggagcagcttccgcttatcgcctcggcggcgatgaacgagctggtcgcctgcctgagcacggaagaattgcagacgctgacccatctgctgaccaaggttctgctacacgccggctgcccgcgggccagcctgcaggagtcctga

SEQ ID NO: 339927 - DNA, 1479 bp, Pseudomonas aeruginosa
atgccgttccctcttctccatccctggccgcagcgattggcgctggcctcggcgatactgctggccgccggctgcgtcacttccgaaggcctggaaccgaacgcccgactgcaaccggcaggcgccctccaggcgggcaggagcctggacggcgtagccctttcaccagcggcctggccgcgccaggactggtggaccgggctcggcgaccggcagctcgaccaactgatcggcgaagccctgcaaggcacccccgacctgcagatcgccgaggcgcgtgcgcgccaggcggcggcaacggcccaggcgcaagatgccgcgcgccagccgacgctggacgccaaggccagctactccggcatccgcgcgccgaccagcgtggccccggcaccgctcggcggccgctattcggcgatcaagtacctgtcgctcggcttcaattacgacttcgacctctggggcggcgagcgcgccgcctgggaagccgccctcggccaggccaatgccgcgcggatcgacagccaggccgcgcgcatcggcctctcggcgagcatcgcccgcgcctacagcgacctcgcccacgcctttaccgtgcgcgatctcgccgaggaagaactgaagcgctcgcagcgcatgaccgagctgagccagaagcgcatgagcgccggactcgacagcaaggtccagctgcaacagacgcagacccagctggccaccgcccgccagcagctcagcgccgccgagcaggacatcgccagcgcccgcatcgccctcgccgtgctgctgggcaaggggcccgatcgcggtctcgaactgcagcgcccgcaaccgctgaacccggccagcctgagcctgccctcggtgctcccggcggaactgctcggccgccgcgccgacatcgttgccgcgcgctggcgggtcgaggcggcgcgccgcaacatcgactcggcgaagaccgagttctatcccaacctcaatctcggcgcgatggccggcctcgccgccctgcacaccaacgacgtgttgcaggcgccgagccgcttcttccaggtggcgccggcgatctccctgccgatcttcgacggtggccgccgccgcgccaacctggccgaacgcgacgccgactacgacctggccgtcggccagtacaacaagacgctggtccaggccctcggcgaggtcagcgacgacctcggcaagttgcgctcgctggcgcagcaggtgatcgaccagcgccaggcccgcgatatcgccaggtccaacttcgacctggccatgcgtcgctacggcgaaggcgtcggcagctacctcgacgccctcagcgtgcaacagcaactgctggtcgccgaacgccagctggccagcctggagagccagcagatcgatctttccgtccagctggtccaggccctgggcggcggtttccaacccgattcccgctccgctgcgctcgctaccgcgaaagcgccggcagaatga

SEQ ID NO: 339928 - DNA, 1185 bp, Pseudomonas aeruginosa
atgactaccgccaacagcgaaacccccgccggcaacccgaagcgcaagcgctggttgctgatcctgctcgccgtgatcgtcctcgccaccctggccagcgtggcctgggagttcttctacggccgctggcacgaggacaccgacgacgcctacatcaacggcaacgtggtacagatcaccccgcagatcgtcggcaccgtggtcagcatcggcgccgacgacggcgacctggtgcgcaagggccaggaactggtcaggttcgatcccagcgacgccgacatcgccctccagcgcgccgaggccaacctggcccacaccgtgcgccaggtacgcgggctgttcagcaacgtcgacggctatcgcgccgaggtcgccacccgcaaggtcgcgctggccaaggccgaggccgactacaagcggcgcaagaacctcgcagacgacggcgccatttcccaggaggaactggcccacgcccgcgacgccctggacagcgcgaaagcctcgctgaccagctcggaacagcagttgaacaccaatcgcgcgctggtcgacgacacccagatcacctcccatccggacgtcaaggccgccgccgcgcaactgcgccaggcctacctggacgacgcccgctcgaccatcgtcgcgccggtcaccggctacgtcgccaagcgcagcgtacaggtcggccagcgcgtgcaaccgggcaatgcgctgatggccgtggtcccgctggaccagatctggatcgacgccaacttcaaggaaacccagctcaagcacatgcgtatcggccagccggtggagatccgctccgacctctacggcagcgacgtgcgctacagcggcaccgtcgacagcctcggcgtgggcacgggcagcgcgttctccctgctgccggcgcagaacgccaccggcaactggatcaagatcgtccagcgggtgccggtgcgcatccatatcgatccgcaagaattgcagaagcatccgctgcgcatcggcctgtcgatggacgtcaaggtcgacctgcacgaccagagcggcccggccctggcccagcagccaccgcgcgaagcgctgttctccaccgatgtctaccagcagcaactggcctcggccgacaagctgatcgaacgcctgatcgaagccaacctcgccgaagaccacggcaagaccgcccagcgttga

SEQ ID NO: 339929 - DNA, 1530 bp, Pseudomonas aeruginosa
atgagcgaaagcagcagcttctccccgcccagcctggtgatggcgaccatcggcctgtccctggcgactttcatgcaggtgctcgacaccaccatcgccaacgtcgccctgccgaccatctccggtaacctcggggtgagttcggaacagggcacctgggtgatcacctcgttcgccgtgagcaacgccatcgccctgccgctgaccggctggctggcccggcgggtcggcgaggtgcgcctgttcatcgccgccgcgctgctgttcgtactcgcctcgttcctctgcggcatcgcccagtcgatgccttctctggtcggcttccgcgccttgcagggcttcgtcgccgggccgctgtatccgatcacccagaccctgctgatctccatctacccaccggcgaagcgcggcatggccctggccctgctggcgatggtcacggtggtggcgccgatcgccgggccgatcctcggcggctggatcaccgacgactacagctggccgtggattttcttcatcaacgtgccggtcggcctgttcgccgctttcgtcgtctaccagcaactgaaggcacgcccggtggtgatcaagaaggcgccgatggactacgtcggcctgatcgccctggtgatcggcgtcggcgccctgcagatcgtcctcgacaagggcaacgacctggactggttcgagtcgaacttcatcgtcggcggcgcgctgatcgcggcgatcgccctggccttcttcatcatctgggaattcaccgaccgccatccgatcgtcaacctgcgcctgttcgcccaccgcaacttcgccgccggcaccctggcgctggtgctgggctatgccgcgttcttcggcatcaacctgctgctcccgcaatggctacagacccagatgggctacaccgccacctgggccgggctggccgccgcgccaatcggcatcctcccggtgttcctctcgccgctggtcggccgctacgccaaccatttcgacctgcgcatgctcgccggcctgtcgttcctggcgatggccatcacctgcttcatgcgcgccaacttcaccaccgaggtcgactaccagcacatcgccatcgtgcagttgatcatggggctcggcgtggcgttcttcttcatgccgatcctgagcatcctgctctccgacctgccccccgaccagatcgccgacggctccggcctggccaccttcctgcgcaccctcggcggcagcttcgccgcctcgctgaccacctggatctggaaccgccgcgccacccaacaccacgcctatctcagcgaaaacatcagtctctacgacccggccacccacgaaaccctcgcccagctcggcggcaacacccaggcgaacgcggcgctgctcgaccggatggtgcagagccaggcctacatgatgtccaccatcgactacttcaccatgctcggctggctgttcctcgccctgctggtgatcatctggctggcccgcccgccgttcggcgccaagcccggcgcggccgcctccgggcactga

SEQ ID NO: 339930 - DNA, 141 bp, Pseudomonas aeruginosa
atggcccgcaccactgccccgcttacagacaccacctgtcgcacggcaaagcccagagagcgcgagtacaagctcttcgacggcaacggtctttacctgcttgtgcaacccaacggccgcaaaggctggcgactcaggtaa

SEQ ID NO: 339931 - DNA, 1104 bp, Pseudomonas aeruginosa
gtgaaacccgatggccgcgaaggcctgaccgccctcggcagctatccggtggtcgggctgggcgacgcacgccgcaagcgcttcgagatcaagcagcagctcgccaatggcatagaccccatccagtacaagcaacaaaccaagacccaagccgtgatcaacggccacaccttcgaaagcgttgcgctcgactggcatgcgagcatggtgccgaagtgggcgcccggccacgccaagactgtgctcagccggttgaagactcacgtattccctttgcttggtgccagggcaatcgttgagttggacacccacgatctcatgcagccactggaagccgtgacgaagcgcggcaccatcgacgtggcgctcaggatcaagaactacctgcaaagcatcatgcgtgaagccaaacggctgcgactgatcacggcgaacccggctcacgacctcgatggctcgatcaagacaccacgggtaactcaccgactcgcactacccttatcgcggctgccagagctactggcatgcattgaggactacagaggtcgcccgctcacgcgcctcacggtgatgctgtcgttgcatgtattcgtacgctccagcgaactgcgcttcgcccgctggaatgaattcgacctaaagcgaggtatctgggagatccccgatacccgcccggcgctggacggcgtgcccttttccacaaggggtacaaagatggccggggacattcacgttgtacctttatcgccgcaggccgtggacttgcttgagcagatccacgcgatcaccggcaaattcgagctggtgttcgcgggagatgccaaaccgtggaaaccgatgtccgagaacacggtgaatgccgcgctcaggacgatgggctacgacaccaaggtggatatctgcggccacgggttccgagccatggcgtgcagtgcgctggtcgagtccgggctgtggtcagagatagcgatcgaacgccagatgagccacaaggaacgcaacaacgtgcgcgccgcctatacccacaaggccgagttcctcgaagagcgcacgcagacaggcgagaacgtcacgcgccttcgcagtgccaaaaggaccgagtag

SEQ ID NO: 339932 - DNA, 981 bp, Pseudomonas aeruginosa; identical to SEQ ID NO: 339553

SEQ ID NO: 339933 - DNA, 222 bp, Pseudomonas aeruginosa; identical to SEQ ID NO: 339552

SEQ ID NO: 339934 - DNA, 1230 bp, Pseudomonas aeruginosa; identical to SEQ ID NO: 339551

SEQ ID NO: 339935 - DNA, 1059 bp, Pseudomonas aeruginosa
atgacgattctcgtgaccggcagcgccggcttcatcggcgccaatttcgtgctcgactggctggccctgcatgacgagccggtggtcagcctcgacaagctcacctacgccggcaaccggcagaacctcgccagcctcgacggcgacgcccggcacaccttcgtcgccggcgatatcggcgatagccagctggtagcccgcctgctcgccgagcaccagccgcgggcgatcctcaacttcgccgcggaatctcatgtggaccgctcgatccacggccccgaggacttcatccagaccaacatcgtcggcaccttccgcctgctggaagaagtgcgcgcctactggggcgcgctggagccggaagcgaaggcggcattccgcttcctccacgtctccaccgacgaagtctatggctcgctggcaccgagcgatccggccttcaccgagaacaaccgctacgagccgaacagtccctactcggcgtccaaggcggcctccgaccacctggtgcgggcctatcaccacacctacgggctgccggtgctgaccaccaactgctcgaacaactacggcccgtaccacttcccggaaaagctcatcccactggtgatccacaacgccctggccggcaagccgctgccgatctacggcgacggccagcagatccgcgactggctctacgtcaaggaccattgcagcgccatccgccgggtcctcgaagccgggcaactgggcgagacctacaatgtcggcggctggaacgaaaaggccaacctcgacgtggtcgagaccctctgcgccatcctcgaccaggagcagccgcgcgccgacggccgcagctatcgcgagcagatcaccttcgtcaaggatcgtccgggccatgatcgccgctacgccatcgatgccacgcgcctggagcgcgagctgggctggaagccggcggaaaccttcgagaccggcatccgcaagaccgtgcgctggtacctggacaaccaggactgggtggccaacgtaaccagcggtgcctaccgcgagtgggtgggtaagcagtacgcatga

SEQ ID NO: 339936 - DNA, 909 bp, Pseudomonas aeruginosa
atgaaccggatccttctcctcggcgccaacggccaggtcggctgggagctgcagcgcgccctggcgccgctgggcgaactgctggtctgtgaccgccggcgcgccgatctcgccgaccccgaaggcctggcgcgactgattcgcgccgagcggccgcagttcatcgtcaacgccggcgcctacaccgcggtggacaaggccgagagcgatgccgacaacgcccgcctgatcaatgcccgcgccgtcgcggtactggccgaggaggccgcggcctgcggcgcctggctggtgcattactccaccgactacgtgttcgacggcgcgggcagcgcgcctttcgccgaggacgcgccgaccggcccgctgagcgtctacgggcagaccaagctggaaggcgagcaggccatccgcgccagcggctgccgccacctgatcttccgcaccagctgggtctacgccgcgcgcggcgggaacttcgccaagaccatgctgcgcctggccgggcaacgcgacgaactcaaggtcgtggccgaccagttcggcgcgccgaccagcgccgagctgatcgccgacgtcaccgcccaggccctgcagcgtctgcgctgggatgccgagctggcagcacgggccagcggcacctaccacctggtcgccagcggcgagacgtcctggcacctctatgcgcgcttcgtcatcgaacaggcgctggagcggggctgggagttgcaggcgacgccgcagcgggtcctgccgattgccaccgaggattacccggtgccggcgaagcgcccggccaattcgcgcctcgacaaccacaagctgcaacaggtcttcggcctggtactgcccgactggcgctaccatgccggacgcatgatccaggaactgagcgagcagggaccactatga

SEQ ID NO: 339937 - DNA, 882 bp, Pseudomonas aeruginosa
atgaaacgcaagggcatcatcctcgccggaggctcgggcacccgcctgcacccggcaacgctggccatctccaagcagctgctgccggtgtacgacaagccgatgatctactacccgctcagtaccctgatgctggcgggcatccgcgagatactgatcatctcgaccccacaggacaccccacgcttccagcagttgctgggcgacggttcgaactggggcctggacctgcaatatgccgtgcaaccgtcgccggacggcctggcccaggccttcctgatcggcgagtcgttcatcggcaacgacctcagcgcgctggtcctgggcgacaacctctattacggccacgacttccacgagttgctcggcagcgcttcgcagcgccagaccggcgccagcgtcttcgcctaccacgtgctggacccggagcgctacggcgtggtcgagttcgaccagggcggcaaggccatcagcctggaagagaagccactgaagccgaagtcgaactacgcggtcaccggcctgtatttctacgaccagcaggtggtggacatcgccagggacctgaagccttcaccgcgcggcgagctggagatcaccgacgtcaaccgcgcctacctggagcgcggccagctcagcgtggagatcatgggccgcggctacgcctggctggataccggcacccacgattcgctgctcgaggccggccagttcatcgccaccctggagaaccgccagggactcaaggtggcctgcccggaagagatcgcctaccggcagaagtggatcgacgccgcgcaactggaaaaactcgccgcgccgctggccaagaacggctacggccaatacctcaagcgcctgctgaccgagaccgtgtactga

SEQ ID NO: 339938 - DNA, 546 bp, Pseudomonas aeruginosa
atgaaagcgacccgcctggcaatccccgacgtcatcctcttcgaaccccgggtgttcggcgacgatcgcggattcttcttcgaaagctacaaccagcgcgccttcgaggaggcctgcggtcatccggtcagcttcgtccaggacaaccattcgcgttccgcccgtggcgtcctccgcggcctgcactaccagatccggcaagcccagggaaaactggtgcgcgccaccctcggcgaggtattcgacgtggccgtcgacctgcgtcgcggctcgccgaccttcggccactgggtaggcgaacgcctgagcgcggagaacaagcgccagatgtggattccggccggcttcgcgcacggcttcgtggtgctcagcgaatacgccgagttcctctacaagaccaccgacttctgggcgccggaacacgaacgctgcatcgtctggaacgatcccgagctgaagatcgactggccgctgcaggatgcccccctgctttcggagaaggaccgccagggcaaggcattcgccgacgccgactgcttcccctga

SEQ ID NO: 339939 - DNA, 1800 bp, Pseudomonas aeruginosa
ttgaaagcctatttccatcgctggcgctcgctggtcatcctcgccctgcttctcgcgccgctgctctggcccctgcaatatttcgccgagcgctactacagcgagcagttggccgagcagaaccgccagacgctcgacctctacgtcgccaacctgctcggcacgctgcgccgctacgaagaactgccgcagatcctcggcggcctgccggtgctgcgccaggccctgcaacaacctggcgacccgctgctgcagaagatcgccaacgaggcgctggccgacatccgccgacgcaccggcgccgacgtgatctacctgctgcaaccggacggcaccacccaggtcgcctccaactgggcccaggcggacagtttcgtccaccgcaacttcgccttccgcccctattatcgcgaggccatgcagggccgcctggcgcgcttcttcggcctgggcaccacctcgatcaagcgcggctactacttcgccagtgcggtgaaggaaggctcgcggatcatcggcgtgctggtggtgaaggtcgatctcgaacacatcgaacggctctggggcaattccccggagcaactgctggtgatagacaactacggcgtggtgatcctctcctcgcgcgaggattggcgcttccatgccagtcggccgctgagcgcggcggagcgcgacgagatccacgccaacatcccctacccggtgcaggacccgaagcccctgcgcctgcaacagagcgcctggctcagccagagccggacgctgccggaaaccggctggacggtgagcatctacgccccccgcaccctcatcgaacggccggtgcgcagcgtcctgctgatcggcggcgcgaccctgctcgccctgctcctgctgcttaccctgctgaccctcagccgccgtcactacttggaccgcatcgctctcgaggcccaggccaagcgccagttggaagagcgcgtactggaacgcacccgcgagctggagaacgccaacgcgcagttgcagcaggaagtccacgaacgcgagcaggcccagcgcgagctgatgcgcgcccaggacgaagtggtccaggccggcaagctcacggccctcggcaccatgtcggcgagcatcagccacgaactcaaccagccgctggcggcgatccgcagctacgccgacaacgcccgggtgctgctcgaccaccagcgcaccgaggacgcccgcggcaatctcgagcagatcagcgacctcaccacccgcatggcctcgatcatcgcccacctcaaggcctatgcccgcggtgcgcgccgggcgccggagaacgtgcagttgcagccggcgatcgaggacgccctgtcgatgctcgccagtcggcggcgggcgatgaacgtcgaactgctgcgcgacgtgccggacgccccgctgtgggtccaggccggcgagacccgcttgcggcagatcctcggcaacctgctcaccaatgccctcgacgcgctcgccgagaaagctccgccgcggcgcctgtgggtgatcgccagccaggaccagcacggcgtgatcctgaccctgcgcgacaacggcccggggttttccgaggacgccctggcccacgcccacgaacccttcttcaccaccaagaccaccgccaaagggctcggcctcggcctggccatctgcgataacctattgcgcgccctcggcggccgcctggaaatgggcaaccatctcgaaggcggcgccgtggtgcgcctgcacttgctgccgggagttcccggcgtcgccgccatgccccaggaggaaacccgcgcatga

SEQ ID NO: 339940 - DNA, 1389 bp, Pseudomonas aeruginosa
atgagtcccttcgcgccattcgatgcccagacccaggtcctgctgatcgacgacgatccgcacctgcgccaggccctgcgccagacgctcgacctcgccgggctcaaggtcgcgaccctggacgacgcgcgccagctggataccgcgcagtgcaaggactggcccggggtggtggtcagcgacatccgcatgcccggcatcgatggcatggaactgctccgccaattgcacgaacaggacgccgacctgccggtgatcctgatcaccggccacggcgacgtgccgctggcggtccaggccatgcgcggcggcgcctatgacttcctggaaaagcccttccccagcgacgccctgctcgacagcgtgcgccgcgccctggaggtgcgccggctggtcctggagaaccgcaccctgcgcctggccctggccgaacgccacgaactgcatgggcgcctgatcggacgctcggccggcatgcagcgcctgcgcgagcaggtcggctcgctggcggcgatccaggccgacgtgctggtccttggcgaaaccggcgccggcaaggaggtggtcgcgcgggccctgcatgacctgtcgagccggcgcgacggaccgttcgtcgcgatcaacgccggcgctctcgccgaatcggtggtggagagcgaactgttcggccacgaggccggcgccttcaccggcgcgcagaagcgccgcatcggcaagttcgagtacgccaatggcggcaccctgttcctcgacgagatcgagagcatgagcctggacgtgcaggtcaagctgttgcgcctgctgcaggaacgggtagtcgagcggctcggctccaaccagctgatcccgctggatatccgcatcatcgcggcaaccaaggaagacctgcgccaggccgccgaccagggccgcttccgcgccgacctctattaccgcctcaacgtcgccagcttgcgcatcccaccgctgcgcgagcgcggcgaggacatcccgctgctgttccgccatttcgccgaagccggcgccatgcgccatggcctgacgccacgcgaactggacgccggccagtcggcgcggctgctggcctacgactggccgggcaacgtgcgcgaattgcagaacgccgccgagcgcttcgccctgggcctcggcctgagcctggacgacggagtcctgcccgacgccgccgacgagccgcacaacctcagcgccaaggtcgaggccttcgaacgctcgctgatcgccgccgagctggaacgcccgcacaattcgctgcgcagcgtcgccgaggccctcggtatcccgcgcaagaccctgcacgacaagctgcgcaagcacggcctgccgttcaacacgcctggcgagaatccgccagatgatggcgaatga

SEQ ID NO: 339941 - DNA, 996 bp, Pseudomonas aeruginosa
atgctcaagcacaccgcgaaggcgctcgtctgcgcactttccctgaccgtcgccggaatcgtccaggcggccgacccgatcgtcatcaagttctcccacgtcgtcgccgagcacacgcccaagggccagggcgcgctgctgttcaagaaactggtggaggaacgcctgccgggcaaggtcaaggtggaggtctacccgaactcgtcgctgttcggcgacggcaaggaaatggaggccctgctgctgggcgacgtgcagatcatcgcgccgtcgctggccaagttcgagcagtacaccaagaaactgcagatcttcgacctgccgttcctgttcgacaacatccaggcggtcgaccgcttccagcagagcccgcagggcaaggagttgctgacctcgatgcaggacaagggcatcaccggcctcggctactggcacaacgggatgaagcaactgtccgccaacaagcccctgcgcgagccgaaggacgcccgcggcctgaagttccgcgtgcaggcctccaaggtgctcgaggaacagttcaaggcggtgcgcgccaacccgcgcaagatgagcttcgccgaggtctaccagggcctgcagaccggcgtggtcaacggtaccgagaacccctggtcgaacatctactcgcagaagatgcacgaagtgcagaagtacatcaccgaatccgaccacggcgtgctggactacatggtgatcaccaacaccaagttctggaacggcctgccggaagacgtgcgcggcgttctggccaagaccatggacgaggtgaccgtggaggtgaacaagcaggccgaggcgctcaaccagggcgacaagcagcgcatcgtcgaggccaagaccagcgagatcatcgaactcactcccgaacagcgggccgaatggcgcaaggccatgcagccggtgtggaagaagttcgaaggtgagatcggcgccgacctgatcaaggccgccgaagccgccaaccaggctcaataa

SEQ ID NO: 339942 - DNA, 633 bp, Pseudomonas aeruginosa
atgcacgcgctcgcgcgcgtctgggcgcgcctggaggaaggcctgatcgccttcctcctcgccgccatgacgctggttaccttcgtttatgtagtcctcaataacctctacacgctgttctacgatctcgccgacctctgggagggcggcaacgagacgctgctcgccatcggcgacgccatcctcagcctggcccaggagatgacctggagcaacgccctgaccaaggccctgttcgcctggctgatcttcctcggcatcgcctacggcgtacgcaccgccgggcacctcggcgtggacgtgctggtgaagctggcttcgcggccggtacagcgggtcctcggcgtgatcgcctgcctggcctgcctcggctacgccggcctgctctgcgtggccagctacgactgggtgaagaccctgttcatcgccggcatcggcgccgaggacctcgaccacttcggcatccgccaatggcacatcggcctgatcgtgccggtcggtttcgccctggtgttcatccgtttcgccgagatcctcgtgcgcatcctgcgcaaccgtcagaccggcctgggcctggccgacgaggccgccgacgcgctgaagctgaccgagcacgaggagccgaaagcatga

SEQ ID NO: 339943 - DNA, 1284 bp, Pseudomonas aeruginosa
atgaccatcctgttcctcttcctgctgctgttcctgctgatgttcatcggcgtgccgatcgccgtctccctggggctctccggtgcgctgacgatcctcctgttcagcccggactcggtacgctcgctggcgatcaagctgttcgagacctccgagcactacaccctgctggcgatcccgttcttcctgctctccggcgcgttcatgaccaccggcggggtggcgcggcgcctgatcgacttcgccaacgcctgcgtcgggcatattcgcggcggccttgcgatcgccgcggtgctcgcctgcatgctcttcgccgcgctgtccggttcctcgccggcgacggtggcggcggtcggctcgatcgccatcgccggcatggtccgttcgggctacccacaggcgttcggcgccgggatcgtctgcaacgccggcaccctgggcatcctcatcccaccgtcgatcgtcatggtggtctatgccgcggcgaccgaaacctcggtcggcaagctgttcatggccggcgtggtccccggactattgctgggcctgatcctgatggtggtgatctacatcgtcgcccgggtcaagaagctgccagccatgccgagagtcagccttcgcgaatggatcgccagcgcgcgcaaggcgctctggggcctgctgctgatggtgatcattctcggcggcatctattcgggcgccttcaccccaaccgaggctgccgccgtcgcggccgtgtactcggcgttcgtggcgctgttcgtgtacaaggacatgcgcctgaaagagtgcccgaaggtgctgctggagtccggcaagctgaccatcatgctgatgttcatcatcgccaacgccatgctcttcgcccatgtgctgaccaccgagcagattccgcagagtatcgccgcctgggtcaccgacctcgggctgtcgccgtggatgttcctgctggtggtgaacatcgtgctgctgatcgccggcaacttcatggagccctcggcgatcatcctgatcctggcaccgatcttcttccccatcgccatggagctgggtatcgatccgatccacctcggcatcatcatggtggtgaacatggagatcggcctgatcaccccgccggtcggcctcaacctgttcgtcacctcggcggtcaccggcatgccgctgggcgcgaccatccgcgcggcgctgccgtggctgatgatcctgctggtgttcctgatcatcgtgacctacatcccggcggtatccatggcattgccgaactggctggggatgagctga

SEQ ID NO: 339944 - DNA, 1449 bp, Pseudomonas aeruginosa
atgtcccaagaatccagccaaaaactccgactaggagcgctaacggctctggttgtcggctcgatgatcggagggggcatcttctcccttccgcaaaacatggcagccagcgccgacgtcggcgccgtcctgatcggatgggcgatcaccgccgtcggcatgctcaccctcgctttcgtcttccagaccctcgccaaccgcaagcccgaactcgacggcggcgtgtacgcctacgccaaggccggcttcggcgactacatgggtttctcctcggcctggggctactggatcagcgcctggctgggcaacgtcggctacttcgtcctgttgttcagcaccctcggctacttcttcccgatcttcggcaagggcgacaccgtcgccgcgatcgtctgcgcctcggtcctgctctgggccctgcacttcctggtgctgcgcgggatcaaggaagcggcgttcatcaacaccgtcaccaccgtggccaagatcgtgccgctgttcctgttcatcctgatctgcctgttcgccttcaagctggacatcttcaccgccgacatctggggcaagagcaacccggacctgggcagcgtgatgaaccaggtgcgcaacatgatgctggtcaccgtctgggtgttcatcggcatcgagggcgcgagcatcttctcctcccgcgcggaaaaacgttccgacgtcggcaaggccaccgtgatcggcttcatcaccgtcctgctcctgctggtgctggtcaacgtgctgtccatgggcgtgatgacccagccggaactggccaagctgcagaacccgtcgatggcgctggtactcgagcatgtggtcggccactggggcgccgtgctgatcagcgtcggcctgctgatctcgctgctgggcgcgctgctctcctgggtgctgctgtgcgccgagatcatgttcgccgcggccaaggaccacaccatgccggagttcctgcgccgcgagaacgccaaccaggtgccggccaacgccctgtggctgaccaacatctgcgtacaggtgttcctggtggtggtgttcttcacctcgggcgacccggacggcatggacccgtacaccaagatgctgctcctggccacctcgatgatcctgatcccgtacttctggtccgccgcctatggcctgctgctgaccctgaagggcgagacctacgagaacgatgcccgcgaacgcagcaaggacctggtcatcgccggcatcgctgtggtctacgcggtctggctgctctacgccggtggcctgaagtacctgctgctgtccgccctgctgtatgcgcccggcgcgatcctcttcgccaaggccaagcacgaggtcggccagccgatcttcaccggaatcgaaaaactgatcttcgccgcagtcgtcattggcgccctggtggctgcctacggcctctacgacggtttcctcaccctctga

SEQ ID NO: 339945 - DNA, 1257 bp, Pseudomonas aeruginosa
atgagcacggaaaaaaccaaacttggcgtccactccgaagccggcaaactgcgcaaagtgatggtctgctcgcccggactcgcccaccagcgcctgacccctagcaactgcgacgagttgctgttcgacgacgtgatctgggtgaaccaggccaagcgcgaccacttcgacttcgtcaccaagatgcgcgagcgcggcatcgacgtcctcgagatgcacaacctgctgaccgagaccatccagaacccggaagcgctgaagtggatcctcgatcgcaagatcaccgccgacagcgtcggcctgggcctgaccagcgagctgcgctcctggctggagagcctggagccgcgcaagctggccgagtacctgatcggcggcgtcgccgctgacgacctgcccgccagcgaaggcgccaacatcctcaagatgtaccgcgagtacctgggccattccagcttcctgctgccgccgttgccgaacacccagttcacccgcgacaccacttgctggatctacggcggcgtgaccctgaacccgatgtactggccggcgcgacgacaggaaaccctgctgaccaccgccatctacaagttccaccccgagttcgccaacgccgagttcgagatctggtacggcgacccggacaaggaccacggctcctcgaccctggaaggcggcgacgtgatgccgatcggcaacggcgtggtcctgatcggcatgggcgagcgctcctcgcgccaggccatcggtcaggtcgcccagtcgctgttcgccaagggcgccgccgagcgggtgatcgtcgccggcctgccgaagtcccgcgccgcgatgcacctggacaccgtgttcagcttctgcgaccgcgacctggtcacggtcttcccggaagtggtcaaggaaatcgtgcccttcagcctgcgccccgatccgagcagcccctacggcatgaacatccgccgcgaggagaaaaccttcctcgaagtggtcgccgaatccctcggcctgaagaaactgcgcgtggtcgagaccggcggcaacagcttcgccgccgagcgcgagcaatgggacgacggtaacaacgtggtctgcctggagccgggcgtggtggtcggctacgaccgcaacacctacaccaacaccctgctgcgcaaggccggcgtcgaggtcatcaccatcagcgccagcgaactgggtcgcggtcgcggcggcggccactgcatgacctgcccgatcgtccgcgacccgatcgactactga

SEQ ID NO: 339946 - DNA, 1011 bp, Pseudomonas aeruginosa
atggctttcaacatgcacaaccgtaacctgctcagcctgatgcaccacagcacccgcgagctgcgttacctgctcgacctgtcccgcgacctcaagcgcgccaagtacaccggcaccgagcagcagcacctgcaacgcaagaacatcgccctgatcttcgagaagacctccacccgcacccgctgcgccttcgaggtggccgcctacgaccagggcgccaacgtcacctacatcgacccgaactcctcgcagatcggccacaaggagagcatgaaggacaccgcgcgggtcctcggccggatgtacgacgccatcgagtaccgcggcttcaagcaggaaatcgtcgaggaactcgcgaagttcgccggcgttccggtgttcaacggcctgaccgacgaataccacccgacccagatgctcgccgacgtgctgaccatgcgcgagcacagcgacaagccgctgcacgacatcagctacgcctacctgggcgacgcgcgcaacaacatgggcaactccctgctgctgatcggcgccaagctcggcatggacgtacgcatcgccgcaccgaaggcgctctggccgcacgacgagttcgtcgcccagtgcaagaaattcgccgaggaaagcggcgccaagctgaccctcaccgaggatccgaaggaagccgtgaagggcgtggacttcgtccacaccgacgtctgggtgtcgatgggcgagccggtggaagcctggggcgagcggatcaaggaactgctgccctaccaggtcaacatggagatcatgaaggccaccggcaacccgcgggccaagttcatgcactgcctgccggcgttccacaacagcgagaccaaggtcggcaagcagatcgccgagcagtatccgaacctggccaacggcatcgaggtgaccgaggacgtcttcgagtcgccctacaacatcgccttcgagcaggccgagaaccgcatgcataccatcaaggcgatcctcgtctcgaccctcgccgacatctga

SEQ ID NO: 339947 - DNA, 933 bp, Pseudomonas aeruginosa
atgcgtatcgtcgtcgcattgggcggtaatgccctgctacgccgtggcgaacccatgaccgcggacaaccagcgggaaaacgtgcggatcgccgccgaacagatcgccaaggtggcgcccggcaacgagctggtgatcgcccacggcaacggcccccaggtcggcctgctggccctccagggtgccgcctacgacaaggtctcgccctacccgctggacgtcctcggcgcggaaaccgagggcatgatcggctacatgatcgaacaggaaatgggcaacctgctgccgttcgaagtgccgttcgccaccatcctcacccaggtcgaggtggacggtaaggatccggcgttccagaacccgaccaagccgatcggcccggtctactccagggaagaagccgagcgcctggccgccgagaagggctggagcatcgccccggacggcgacaagttccgccgcgtggtgcccagcccgcggccgaagcggatcttcgagatccgcccggtgaagtggctgctggagaaaggcaccatcgtcatctgcgctggcggcggcggtatcccgaccatgtacgacgaggccgggaagaagctcagcggcgtcgaggcggtgatcgacaaggacctctgctcctcgctgctggcccaggagctggtggccgacatcctgatcatcgccaccgacgtcgacgcggcctacgtcgactggggcaagccgacccagaaggccatcgcccaggcccacccggacgaactggagcgcctcggcttcgccgccggctccatgggtccgaaggtccaggccgccatcgagttcgcccgcgccaccggcaaggacgcggtgatcggttcgctcgcggacatcgtcgcaatcaccgagggcaaggcgggaacacgggtcagcacgcgcaaggcgggcatcgagtaccgctga

SEQ ID NO: 339948 - DNA, 1905 bp, Pseudomonas aeruginosa
atgtctcgactaccggtcattgttggtttcggtggctacaacgcagcaggccgtagttccttccaccacggcttccgtcgcatggtcatcgaatcgatggacccgcaggcgcgccaggaaaccctagccggcctggcggtcatgatgaaactggtcaaggccgaaggcggccgctacctggccgaagacggcacgccgctgtccccggaggacatcgagcggcgctacgccgaacgcatcttcgcctctaccctggtgcgacgcatcgaaccgcagtacctcgacccggatgcagtccactggcacaaggtcctcgagctgtcccctgccgaaggccaggcgctgaccttcaaggcctcgcccaagcaactgcccgagccgctgccggccaactggtcgatcgctcccgcggaggacggcgaggtgctggtgagcatccacgagcgctgcgagttcaaggtggacagctaccgtgcgctgacggtgaagtccgccggccagttgcccaccggtttcgaaccgggcgagctgtacaactcgcgcttccacccgcgaggcctgcagatgtcggtggtcgccgcgaccgacgcgatccgctccaccggcatcgactggaagaccatcgtcgacaacgtccagcccgacgagatcgcggtattctccggcagcatcatgagccagctcgacgacaacggtttcggcggcctgatgcaatcccgcctgaagggccaccgggtctcggccaagcaactgccgctgggcttcaacagcatgcccaccgatttcatcaatgcctacgtgctcggcagcgtcggcatgaccggcagcatcacaggcgcctgcgccaccttcctctacaacctgcagaagggtatcgacgtcatcaccagcggccaggcccgggtggtcatcgtcggcaacagcgaggcgccgatcctgccggagtgcatcgagggctacagtgccatgggcgcgctggccaccgaagaaggcctgcgcctgatcgaaggccgcgacgacgtggacttccgccgcgccagccggccgttcggcgagaactgcggcttcaccctggccgagtccagccagtacgtagtgctgatggacgacgaactggccctgcgtctgggcgcggatatccacggcgcggtaaccgacgtgttcatcaacgccgacggtttcaagaagtccatctccgcccccggcccgggcaactacctgacggtagccaaggcggtggccagcgcggtgcagatcgtcggcctggacaccgtgcgccacgccagcttcgtccacgcccacggctccagcacgccggccaaccgggtcaccgaatcggaaatcctcgaccgcgtggccagcgccttcggcatcgacggctggccggtcaccgcggtgaaggcctacgtcggccactccctggccaccgccagcgccgaccagctgatctccgccctaggcacgttcaagtacggcatcctccctgggatcaagaccatcgacaaggtcgccgacgacgtccaccagcagcgcctgagcatctccaatcgcgacatgcgccaggacaagccgctggaggtatgcttcatcaactccaagggcttcggcggcaacaacgccagcggcgtggtgctgtcgccgcgaatcgccgagaagatgctgcgcaagcgccatggccaagcggccttcgccgcctacgtcgagaagcgcgagcagacccgcgccgccgcccgcgcctacgaccagcgcgcgctgcagggcgacctggagatcatctacaacttcggccaggacctgatcgacgagcacgccatcgaggtcagcgccgaacaggtgacggtgcccggcttcagccagccgctggtatacaagaaggacgcgcgtttcagcgacatgctcgactga

SEQ ID NO: 339949 - DNA, 822 bp, Pseudomonas aeruginosa
atgaggccggtgccttggggcgaattggtggcgttggtgcggcgcgccggcgaggcgatcctgccgcactggcgcgccaacgtggcggtgcgctcgaaggccgacgaatcgccggtgactgccgccgacctggccgcgcaccatatattggaggcgggattgcgggcgctggcgccggacattccggtgctttccgaagaggattgcgagataccgctgagcgagcgcggccactggcggcgctggtggctggtggacccgctggacggcaccaaggagttcatctccggtagcgaggagttcaccgtcaacgtggccctggtcgaggatggccgggtgctgttcggcctggtcggcgtgccggtgagcggccgctgctactacggtggcgccggtcttggtgcctggcgcgaggaggccgatggcggcgcgcaaccgatcagtgtgcgcctggagcccgaggaggccttcaccgtggtggccagcaagcgccacggcagcccggcccaggagcgcctgctggatggcttgagcgagcgcttcggcgacctgcggcgagccagcatcggcagttcgctgaagttctgcctgctggccgagggcgctgccgactgctatccgcgcctgacgccaacctcgcaatgggacacggccgccgcccagggtgtgctggaaggcgccggcggcgaggtgctcgacctgcatggcgcgccattcacctacgagccgcgcgaggactacctcaacggctccttcctggccctgccgcgcgctgccgagtggcgcagcgaactgatccaactggcgcgcgcgctgcactga

SEQ ID NO: 339950 - DNA, 567 bp, Pseudomonas aeruginosa
atgcgtcagaaacccaccgtactcgccagcgagatcgtcgcgaagagccgactgttcgctgtcgaggagttgcaactgcgcttcagcaatggcgtcgagcgcacctacgagcgtctggtcggcaagggccagggctacggtgcggtgatggtggtggccatgctcgatgccgagcacgcggtgctggtggaggaatattgcgccggggtcgacgaataccagttgtcgctgcccaagggcctggtcgagccgggcgaggacatcctcgcggcggccaaccgcgaactcaaggaggaagcgggctacggggcccggcaactggagcacatcaccgaactgtcgctgtcgccgggctacatgagccagcgcatccaggtggtgctggcgcgcgatctctacgaggagcgcctgccgggcgacgagccggagccgatgggcgtcgatcgcatcagcctgcgcgaactctcgagcctggcccagcacgcccagttcagcgaaggccgcgccctggccgcgctgtacctggtgcgcgacctgctcagccagcgcggcgagtaccaggcatga

SEQ ID NO: 339951 - DNA, 666 bp, Pseudomonas aeruginosa
atgcccaccctgccctggtccgccatcgacaccgtgctgctcgacatggacggcaccctgctcgacctgcacttcgacaaccacttctggctggaacacctgccccagcgctatgccgaacgcaacggcctgagtcgcgccgaagccgatgccgtgctcgagccgctgttccgcgaacacgctggccagctcaactggtactgcctggatttctggagccgggagctggacctgtcgatccgcgaactcaagcacgaggtggcgcacctgatctcgctgcgtccgcacgccgataccttcctcgccgccctgcgccaggccggcaagcgcgtggcgctgatcaccaacgcgcaccgcgactcgctgtcgctgaagctggaacggatcgaactggcgccctatttcgaccgactgatcagctcccacgactacggctacccgaaggaggacgcgcgcttctggagcgccctgcaagccgatttcggcttcgacccgcagcgcagcctgttcatcgacgacagcctgccgatcctgcgcagcgcccgcgcctatggtgtcgcccacctgttggcggtacgccacccggacagccgtggccaggtccgggacaccgaggagttcgctgcccaggaggactaccggcggctgctcgaaggactgccgtag

SEQ ID NO: 339952 - DNA, 438 bp, Pseudomonas aeruginosa; identical to SEQ ID NO: 323417

SEQ ID NO: 339953 - DNA, 921 bp, Pseudomonas aeruginosa
atggacatcaagcaactgaaattcctctgcgccctcgacgaaacccgccacttcggccaggccgccgcacgctgccacgtcacccagccgaccctgtccatgcgcctgcgcagcctggaggaagaactcggcctggaactggtgcgacgcagccagcgcttcgaaggcttcaccgaggccggcgagcgcgtactggcctgggcacgtagcctgctggcggcccaggaagggctgtacgcggaagccgccgcctgccgcgggcaactggtcgggaccctgcgcctgggtgtggtgccgctggccagcttcgacccgatgcgcctggtccagcacatggccgggcgccacccggagttgcgtttccagctctattccctgagttcggaacaggtactcgaaggcctggcgcgcaaccagttcgatctcggcgtctcttatctggaccgtctggaccgcagccatttcgagggcatcgaactggcggagacccgcatgggcctgctccatcaccccagccatttcccgctcgacgccgcgctgctgaactgggatgcgctggctggcctgccgctgggcctgctctcggcgggcatgcacttccgccaatccatcgaccacaacttccgcagccgcgggctgagccccatcgcgcgcctggaaaccgactcggtgcagcaactgctgcaggcggtgcagcgtggcttgtgctgcgcgatcatgccgttgggcagcgaagtcgacgacgagttgcgcctggtccccatcgaggacgcccataccctggcagcgctcggcctgatcattcgcagcggacagccgcgctcggcgctggccgaagcctgcttcgaggaggcccggacctggctggcgcccgccggcttgatagaccctgtcgatcagggtatcggcacaaccgattag

SEQ ID NO: 339954 - DNA, 840 bp, Pseudomonas aeruginosa
atgccttgccagcctgcatgcccggtatccgccgatacctgggcgccttccgccgttcccgacgtttaccgctacgccgacctgcacctgccgcagcagatcggccaggcctcccttgccgccgagtgtgccctggcgatcagttacaacggactgaaccaggcggtgatgatggcctcgcccgaggacatcgaggatttcgtccgcggcttcagcctcagcagtggcttcgtacaggccatcgacgaaatctatgaaatccgcgtcagcggccagggcgaatccctccacgccgaggtcgagatcagcagccgcgcattctggaacctcaagcgccagcgccggcaactggccggcacgtcaggctgcggcctgtgcggcgtcgaagccctggagcaggcgctgccgcaactgccggagcggtcgtcgcaggcgctgcctcccgccgtccatctcggcgccctgcgccagcgtatcgagcaggcccagcgactggcgcgccatagcggcgccctgcatgccgcgctgtatttcgacgagcatggcgagctgcgcctgtgtcgcgaggacatcggccgccacaacgccctcgacaagctgatcggcgccctgcatggacagggactggatgctgcgcagggcttcgccgtggtcaccagccgctgcagcctggagcttatccacaaggccgtacgcgccgggatcggcaccctggtcagcctctccgcgccaaccgccctgaccgtgcaatgggcgcgccgccaccaactgaacctgatccaccagccccatcacagtgccccgcgggtctacagcccggcgccggccgcaaccgagtga

SEQ ID NO: 339955 - DNA, 2322 bp, Pseudomonas aeruginosa
atgagcctgcaacctctccaaccccgctacaagccctacgccggtgccgccgccggctggggcgcgctgcgcagcgtggcgcacttctggctggacagcaaacagccgttcaagaacctccgcgccctgctcaagaccaaccagaacggcggtttcgactgccccggctgcgcctggggcgactcgccggaagacggccgggtgaagttctgcgagaacggtgccaaggcagtcaactgggaagccaccaagcgccgcgtcgacacggcgttcttcgcccgttacagcgtcagcgccctgcgcgaacagagcgactactggctggaataccagggccgcctcaccggaccgatgcgctacgacccgctcagcgaccactaccagccgatcacctgggacgccgccttcgccctggtcgccgagcacctgcgacgcctggatagccccgaccaggcggagttctatacctctgggcgggccagcaacgaggcggcctacctctaccagttgttcgtccgcgcgttcggcaccaacaacttccccgactgctcgaacatgtgccacgaggccagcggcgtggcactgggccgcagcgtcggggtcggcaagggcagcgtgaccttcgacgacttcgaacacgccgacgcgatcttcatccttgggcagaaccccggcaccaaccacccgcgcatgctcgagccgctgcgcgaagcagtgaagcgcggcgcccaggtggtctgcttcaaccctctcaaggagcgcggcctggagcgcttccagcatccgcagaatgcgctggaaatgctgaccaacggctcctcgccgctgaacaccgcgttcttccgtccggcactgggcggcgacatggcggcgatccgcgggatcgccaagttcctcctcgcctgggagcgcgacgcccaggccgagggcggcgagccggtattcgaccacgccttcatcgccgagcacaccgacggcctcgaggcctacctggccgaactggatgccaccccctgggaacacctggagcgccagtccgggctgagcctggcggaaatcgagcaggctgcgcggatgtaccggcgggcgaacagggtcatcgtctgctgggcgatgggcatcacccagcaccatcattcggtggcgatcatccaggaaatcgtcaacctgcaactcctgcgcggcaacctgggccgcccgggcgccggtctctgcccggtccgcggccacagcaacgtgcagggcgaccgcaccatgggcatcaacgagcggccgccggcggcgctgctcgacgcactggaacggcgcttcggcttcgaagtgccacgccacaacgggcacaacgccgtcgaggcgatcgccgcgatgctcgccggcaagtcgaaggtcttcatcggcctgggcggcaatttcgcccaggccaccccggacagtctgcgcacccacgccgccctggcgtcatgcgacctgaccgtgcacatcagcaccaagctcaaccgcagccacctgaccaccggccgcgacgcactgatcctgccctgcctggggcgcaccgacatcgaccgccaggccgaaggcccgcaggcggtcacggtggaagactcgttcagcatgatccacgcgtcctacgggcaactggagccgctctcgcagcagatgcgttcggagccggcgatcatcgccggcatcgccaaggcaaccctgggcaaccatccggtggactgggacgcgctgatcgccaactacgagcgcatccgcgagctgatcgccgacaccatccccggtttcgccgacttcaaccgccgcgtccggcatcccggcggcttctacctcggcaacgccgccggcgaacggcgctggaacaccgccagcggcaaggccaacttcgtcgccaacccgctgccccgcgacctgttgccggcacaggtacgcgacagcggcctcgaacccgacctgatcctgcagaccctgcgctcccatgaccagtacaacaccaccatctacggcctggacgatcgctatcgcggagtgaagggccagcgcgaagtggtattcgccaacgaggcggatatccgccgcctgggctaccagccgggcgacaaggtcgacctggtctcgctgtggagcgatggcatcgaacgccgggtacgccgcttcaccctgctcgccttcgacatcccggccggccaggcagccgcctactacccggaaaccaatcccctggtgccgctggagagcgtcggcgtcggcagccatacgccgacttcgaagttcatcgcggtacgcctggaaaaggccacgggcgacgggcgcattatctga

SEQ ID NO: 339956 - DNA, 516 bp, Pseudomonas aeruginosa
atgaagtattcctcgatactcctgttgtccctgagtctggtcggtggtaccgccttcgcaggcgacaacacccgcgcggccatcggcggcgccttgggcggggtgttgggttcggtcgtcggcgatgcggtcggcggcagcactggcgccgcgatcggtagcggcatcggtggcgctgcgggcggtgcagtcggcgccggacgcggtaacaagaccgaagcggcgatcggcggcggcctcggtgccgcaggcggtaacgtcatcggccggcagatcggtggcagcaccggtggcctgatcggcgcggccctcggcggcgccggcggcggcgcgctgggcaaccattatggcgacggcaaccgccgctacgacgacgatgacgactaccgcgaccgtcgctactaccgccgcgccggctatcgcgatggctattaccggcatgacaacggccatcactatggccggtacaagaagtggaagcgccataagcatcatcgtcgctactacgacgactga

SEQ ID NO: 339957 - DNA, 408 bp, Pseudomonas aeruginosa; identical to SEQ ID NO: 325148

SEQ ID NO: 339958 - DNA, 216 bp, Pseudomonas aeruginosa
atgggtttcctgatactctcccgccgagaaggcgaaggcatcaccctgtccctcaaggccgactacccggcggaggaactgattcggcaattgcgcgaaggcggcatccggatcctggtcaccgatatcatcggcaaccaggcccgggtcgggatcgaggcgccgcgtggcgtcctgatcgttcgcgacgagttgaagacggcaccgaaaggctga

SEQ ID NO: 339959 - DNA, 558 bp, Pseudomonas aeruginosa
atgcgcccgtcgttcgccagttggggcctgcttgccctcctgctcctgcaaggcccgttgctccaggcccagccgctgtcaccggctctccagcaactgttgagcctgagcagccagcgtttgcaactagccgatcaggtagcccagagcaaggcccagtcgggcaaggcggtacaggacagcccgcgggaagaacaacagttgcagatgctcgccggacaagccgggagccacggggtcggcgccgagcaggtgcgcctgctgttcgccgcgcagatcgaggcgaacaagctggtccagtaccgcctgctcagccggccgctaccggacgctggccaggcggtcgacctggagcgcatccgcagccgcctcaatcagctcaacctggagctgctgcgcggctacgccccggcgctcgccgaactgcgcgtcgacgactgccggccgaggctaaaccaggcgctgcaacggcaggtacgcgacgatcgcctgaacgaactgcacgccatcgccctgtcacgggcggtgggcgatctctgtcactgggccgcgctctga

SEQ ID NO: 339960 - DNA, 444 bp, Pseudomonas aeruginosa
atggcgaccgccccgcgaccgctgcgcgagcagtaccttcatttccagccgatcaccacgcgctggcacgacaacgacatctacggacacgtgaacaacgtgacctactatgcgttcttcgacacggcggtgaatacctacctggtcgagcgcggcggcctggatatccagggcggcgaagtgatcggcctggtggtcagttccagctgcgactatttcgcgccggtggccttcccccagcggatcgagatgggcttgcgggtggcgcgcctgggcaacagctcggtgcagtacgaactggccttgttcctcgaagggcagcgggaggcctgcgcggccgggcgtttcgtgcatgtcttcgtggagcgccgaagcagccgcccggtggccattccgcagggactacgcgatgcgctggccgcgcttcagagcgcggcccagtga

SEQ ID NO: 339961 - DNA, 1164 bp, Pseudomonas aeruginosa
atgcaagctttcagtttcgccactaccgcgcagatcctctgcgaggtcggctccgccatccgcctggctgaactctgccgcgagcgaagggcgcgccgcgtgttgatcgtgaccgacccggggatcacccggctcggcttgctggatgcgatcctgcccggcttcccgcgcctgggcctggccgtcgaggtgtacgaccaggtgctcgccgatccgcctgaatcggtggtcgaggccgcgctcgggcgggcgcggggcatggctgccgagctggtggtcggtttcggcggtggcagttccatggacgtggccaagctggtcgcgctgctcgcccatgcagaggcagggcaggggctcggcgaggtcttcggggtcggcaacgcacgcgggccgcgcctgccgctgatccaggtgccgaccaccgccgggaccggctccgaggtgacgccgatcgccatcgtcaccactggcgagaccaccaagatgggtgtggtctcgccctacctgctgcccgatctggcgttgctcgatgccgacctgaccctcgggctgccgccggcggtcaccgcggcgaccggtatcgacgcgatggtgcatgcgatcgagagctataccagcaagctgaagaagaatccgctgtccgatctgctggcgcgggaggcgttgcgcctgctggcggccaacctggaacgcgcggtaggcgacggcggcgaccgcgaggcgcgccaggccatgctgctgggcgcctgcctggccgggcaggccttcgccaatgcgccggtggcggcggtacatgccctggcctatccgctgggagggcatttccacattccccacggcctgagcaacgcgctggtgttaccggaggtgatccgtttcaacgctcccgctgccgctggactctatgccgagctggcgccgctgctgctgggcgaccgcttgcgtccgggcgatcgcgacgcgcttaccgcgcagctgatcgacgaactggcccagctcagtccgcgcaacggcctgccgagccgcttgcgcgacgccggggtggacgaggcgatgctgccgcgcctggccgccgacgcgatgctccagcagcgtctgctggtcaacaacccacgtgaggtcggcgaggcggacgccctggcgatctatcgcgcggcatactga

SEQ ID NO: 339962 - DNA, 1791 bp, Pseudomonas aeruginosa
atggattaccaggcccccttgcgcgacatgcgcttcgttctccatgaactgttcgatgtcggcgcgcattgcgaactgctgggcaacggcatcgatcgcgaactgatcgacggcgtgctcgaggaaggcgcgcgctacaccggccaggtggtggcgccgctcaatcgcaacagcgacgaggaaggcgcgaagctgaaggacggcgtggtgaccacccccaccggctttcgcgaagcctaccggcagtacagcgagaacggctgggcgagcatgaccggacccaccgagtacggcggccagggcttcccgcagatggtctccgcgtgcttccacgagatgctgatggccgccagcctgtccttccgcgtctattcggggctgaccgagggcgccgtgctggcgctttacaagcatggcgacgaggcgttgcggcgcgactacctggccaagctggtgagcggtgaatgggccggcaccatgtgcctgaccgaaccccaggccggcaccgacctcgctctcctgcgcacccgcgccgaggcgcaggccgacggcagctacgcgatcagcggcagcaagatcttcatcagcggtggcgagcaggacctcaccgagaacatcgtccacctggtgctggcgcgcctggcggacgcgccggccggggtgaagggcatcagtctgttcctggtgccgaagttcgtcgccaatcccgatggctccctgggcgagcgcaatagcctggggtgcggcgccatcgagcacaagatggggatcaagggcgcttccacctgcgtgatgaacttcgacggcgccaggggctggctgctgggccaggcgaaccagggcctggcctgcatgttcacgatgatgaacgacgcgcgcttccaggtcggcctgcagggcctgggtatcgccgaacgggccttccagggcgccctcggctacgcccgcgagcgcctgcagtcgcgcgccctggtcggcccgcaggcaccggacaaggccgccgacccgatcatcgtgcaccccgacgtacggcgcatgctgctgacccagaagaccctggtcgaaggctgccgcatgctggcggcctgctgtgcacgccagctcgacctggaacacggccatccggatgccgacggccggcgcgcggcgacgcgccgtgcagcgctgctgatccccatcgtcaaggccttccttactgatgtcggccaggaagtcgccagcctcggcgtacaggtctatggcggtcacggcttcatccgcgaatggggcatggagcaattgatgcgcgacagtcgcatcacccagatctacgaaggcaccaatggcatccaggcgctcgatctggtccgccgcaagctgctcggcgaccagggcggcgaactgctggcgctgcaaggcgaactggcggtggccagcgaggcgctgcaagggcgtgctgcgctggcgccgctggtcgagccggtgctgcaacgcctggaagagtggcggcagctcaccggccaggtactcgaggcctgcgcccgcgatccccaggagatcggcgccacttccgtggacttcctccagtacagcgcctacgtattgctcgcggccctctggttgcaagccgcggcacgagcccaggaagcgctggacggcggctccggcgagggcgatttctatcgggccaagctgcgcagcgccgatttctacctgcggcgcatcctgccgcgggcgagcatgcaccgcgaagccttgctcggtggcgccgactgcctgatggccctgcccgaagagcatttctcgttctga

SEQ ID NO: 339963 - DNA, 1236 bp, Pseudomonas aeruginosa
atgagccagaacttttccttccgccaggccgcggtgatcggcgccggcaccatgggtcgcggtatcgtcatgtgcctggccaacgccggtctcgacgtgcagtggctggacagcaacccgcagatgctcaaccaggcgctcggcgccgtggccgacacctacgcgcacaacgtgcgtcaggggcgtatcggcgaagaggaagcggccgcgcgccgcgcccgcatcacgccggtccagcacctcgccgcgatacgcgaggcggacctggtgatcgaggcggtctacgagaacctggaactcaagcaatcgatcttccgcgagctggacgcggcgctgaagccctccgcggtgctggccagcaatacttcctacctggacatcgacgccatcgccgcggtcaccgcgcgtccgggtcaggtgctcggcctgcacttcttcagcccggcgcacatcatgcggctgctggagatcgtgcgcggcgcgcagaccgcgccggcggtgctggaggcggccctggcgctgggcgagcggatgggcaaggtcagcgtggtggccggcaactgccacggcttcatcggcaaccgcatgctcgaaccctacgccaccgaggcccgcctgatgctgctggaaggcgccctgccgtaccaggtggaccgggctctccaggcgttcggtttcgccatggggccgttccgcatgtacgacgtggtcggtatcgacctggagtggcgcgcccgcgagttggccggggtcggccaggaccagccggccgtgcaggtagacaaccgcctttgcgagctgggccgcttcggccagaagagcggtgccggttactaccgctacgcgccgggcagccgccaggcggagcacgataccgaggtggatgccctggtgctccgggtcgccgagacgctgggctacccgcggcgcgatttcgccgacgaggaaatcctcgagcgttgcctgctggcgctggtcaacgagggcgcgaagatcctcgacgagggtatcgccgcccgtagcgccgacatcgacactgtctacctgaacggctacggcttccccgccgcggagggcggtcccatggcctgggccgatcgcctcggcgtggccgagctgctgcaacgcctgcgtttcctcgaacagcgccacggcgcgcgctggaagccggcgtccctggtcgagcgcctggccgccgagggcggagccttcgccgacctgcaggaggcgcgctga

SEQ ID NO: 339964 - DNA, 909 bp, Pseudomonas aeruginosa
gtgaatatccaaaccttcgacctcaacctgctacgcgtcctcgacgccctgctgcgcgaacgcaacgtctcgcgcgcggcggagcgcctggcgctgagccagccggcagtgagcaatgcactgaaccgcctgcgcgagctgctcgacgacccgctgctggtccgcgccggtcgtgcgatgcagccgacgccccgggcgctggcgctggaagcgccgatccgcgcggcgctgcggcagatcgaacaaagcctgggcgacggcgagggcttcgatcccgggcgcagccggcagcgcttcaccgtagcggtgaccgactacgtcgaactgatctgcatgcccgccctgatgcgccgcctgagcgagcgtgcgccgggaatctccatcgccatccagcacctgaccccgaccttgccggccgaggcgctggacaaaggcgaactggacctggtgctaggccgcttcgaaaacgtcccggcgcgcttccagcgccgccattgggccagcgagaccctgcaactggtcgcccgacgtcagcacccgctgctggcgcaggctcccgacctggccacctttctggagctacagcacctgtgggtgcacggcgggcagaccaaggggatggtcgaccagtggctgggcagccaggggctcaagcggcaagtggcctacaccacaccgaactacctgcaggcagcgcacatcgccgcgtacagcgacctggtcggcgtcctgccgcgacaactggcgcactacttcgaacgattgctgcccctgcaatcgttcgacctgccgttcgacctcggcccgttccacctggaactggtgttcctggcccagcgcgaacgcgacatcgccctgcaatggctggtcgaacagatccgccaggtcggggccgccggaccggactag

SEQ ID NO: 339965 - DNA, 603 bp, Pseudomonas aeruginosa
atgcatatcgaagacgccgttcgtagtcgccgtgccatcaagggctacgactcatccttcagcctgactcgcgaagagaaggaccatctcctggacctggcgctgcatgcgccttccgccttcaacctgcaacacgtgcggctggtcgaggtcagcgatccgcaattgcgcacgcagttgcgtgaagtggcctgggaccaggcgcaggtcaccgacgcggcgatgctggtggtggtgtgcgcccagctcgacagttgggagcgcaacgcgcagcgggtctgggacggtgctcccgaggcagtacaggcgttcatggcaggcgccatcgacacctactaccgcggcaagccccaggtacagcgcgacgaagccatgcgcagctgcggcctgctggcgcagaccctgatgctggtcgcccgcggccagggcctggattcgtgtccgatggatggtttcgacttcgatgccgtggcccggctgatcaacctgccggacaaccatgtgatcggcctgatggtggcggtcgggaaaaaggccattgaaccctggccgcgcagcggcaagctgccgcgggaagaactggtcatccgcgaccgcttctga

SEQ ID NO: 339966 - DNA, 357 bp, Pseudomonas aeruginosa; identical to SEQ ID NO: 321812

SEQ ID NO: 339967 - DNA, 402 bp, Pseudomonas aeruginosa
atgccagtgagcgagaaagacgacgacaaggtgcgcctggacaagtggctctgggcggcgcgcttcttcaagacccgggcgctggccaaggccgcgatagagggcggcaaggtgcattgccggggcgagcggtgcaagccgagcaaggaacccagggtaggggaggaattgaccattcgtacgggcttcgacgagcgaaccgtgacgattcgcgcgctttccgtagtccggcgtggcgcgccggaggcccaggctctctacgaggaaaccgcggacagcgtggaaagccgcgagcgcgcggcggccatgcgcaaggccggggcgctgggcgtacagaccgaggggcggccgagcaagaagcagcggcggcagatccaccagttgcgcggcggccaggactga

SEQ ID NO: 339968 - DNA, 1269 bp, Pseudomonas aeruginosa
atgtccctgatcgccgaccacggcttcgccttcctcgtactcgcctgcctgttcggtttcttcatggcctggggcgtcggcgccaacgacgtcgccaacgctatgggcacctcggtgggctcacgggcgctgaccatccgccaggcgatcctggtggcgatggtcttcgagttctgcggtgcttacttcgccggcggcgaggtcactgaaacgatcaggagcggcatcgtcgatccgcagtacatgacccccgacctgctggtcttcggcatgctctcggccttgctggccgccggggtctggctgttgctggcgacgatcaagggctggccggtgtcgaccacccactccatcgtcggcgcgatcatcggcttcgcctcggtcggtgtctcggtgcacgcggtgcactggggcgcgatcggcccgatcgtcgccagttgggtggtgacgccggtgctgtccgggctgctcgccttcgccctgttcaggagcgtgcagtggctggtactgcatgccgaggacccgttccgcagcgcgcgccgctacgtgccgctgtacatgttcctggcgggcttcatggtcgcgctgatgaccgtcggcaagggcctgaagcatgtcggcctggagctttccggcctccagacgctgggtctggcgttgctcgccggcggcctggtgatgggcctgggtatcgtcctgctgttgcgtatccgacccactggcggagccgatccgcgtggcggcttcgccagcgtcgagcgggtcttcgcggtgctgatgatcttcaccgcctgctccatggctttcgcccatggtgccaacgacgtggccaacgccatcggcccggtggcggcggtcgtcgcggtggtccaggccggcggcgacctggatctggtgagccgttcgccggtgccgtcctgggtactgctgctgggcgcggtgggcatcgtcatcggcctggctacctatggctaccgggtgatcgcgaccatcggccgggagatcaccgagctgacccccagccgcggcttcgccgccgagctggcgaccgcctccacggtggttggcgcctcggccatcggcctgccggtgtccactacccataccctggtcggcgcggtgctcggcatcggcatggcgcgcggtatcggcgcgctcaacctgcgggtgatcggctcgatcttcctgtcctgggtagtgaccctgccggccggcgcggtgctggcgatcctgttcttcctggtcctgcgcgcgctgttcggcgcctga

SEQ ID NO: 339969 - DNA, 678 bp, Pseudomonas aeruginosa
atgccgaccaatccgttcatcagcctgttcggccgttcgccgatcgggccgatgcagcagcacatcgccaaggcccacgaatgcgcggccggcctgttgccgttcttccgcgcggtgatcgccgaggactgggcgcaggtcgaacaggttcagcaggacatggtgcgactggagcaggaagccgatcggctgaagaagaacgtccggatgcacctgcccaagagcctgttccttccggtgccgcgctccgatctgttggagctgctcagtgtacaggacaaagtcgccaatcgcgccaaggacatcgccgggctgatgctgggccggcgcatgcgcatcccgctgccgctgcagggccagatgctcgcctacgtgcagcgctcggtggacgccagcgcccaggcgttgcgggtagtcaacgaactcaacgaactgctcgagaccggcttcggcgggcgcgagaccagtctggtggaaagcatggtggaggaactcgaggcgatcgagaacgacaccgaccgcatccaggtcgaggtgcgccgcgagctgttccgcctggaaagcgagctgccgccggtggacgtgatgttcctctaccagatcatcgaatggatcggcgatgtcgccgaccgcgcccagcgggtcggcaaccgcctggagcaattgctggcgcgttga

SEQ ID NO: 339970 - DNA, 1365 bp, Pseudomonas aeruginosa
atgcagaaagaaaccgaaatcaaactccgcgtcagccgcgccaccctggaagccttgcaggagcacccgttgctgaagaaacgcaacaaatcgggctgggagcgccgcgaactgtacaaccagtactacgacacccccgaccgcgagctggcccgggccaaggtcgccctgcgcatgcgccgcgacggcgagcagtacatccagacgctgaagagccgcgggcagagcgtggccgggctgtccgaacgcaacgagtgggactggtacctggaaaagaacaagctcgacctgaagaaactcgacgacaagtgctggccggcggccctcaaggacctcgacaagaagcagctcaagccgatcttcagcaccgacttcgtccgccagcgcgccgagatcgcctggggccgcggcaaggccagggtagtcgtggaggcggcgctcgacctgggcaaggtggtcgccggcgacaaccaagaggaaatctgcgaactggagctggaactgcgccagggcgatgccgccgcgctgctcgagctggccgcggaactggccgccgacctgccgctgatgccctgcgacatcagcaaggccgagcgcggctaccgcctgttcgacccgaacagctacgaggtcgatcccccggcccagaaactgctggcggaaaccccgctggacggtgccttcgccgccatcgcctggtacctgctcggcagcagccagcgactggccgaacagtatcgcttcaacggccactggcgcctgctggaggactggctgcaacacttgcaggacctgcgtaccctgctcggcagcctcggccaggcggtgccacgcgccagcagtcgcgagctgcgcgaagcgctggacgctctcctcgccgactgggcgccgcgcatcgagcgcggccgtgacgacgagacgctacgccagcaggcgccacaactgttccgcggcgaactcgacgagacccgctggggcctgttctccctgaatgcctcgcgctggctgctggccaaggcctggaccgagtcgcgcaacgagcgcggcaaccgccagggcgccgccgcgctgggcaaatggctgctgcgcagccttgccgaagaagcccaggccacgccgctggcgcgcgcccaccagcatcccgagctgctcctcgaccaagcgccgcgcctgcagcgcatgcttacctggttgcgcctggcgcgcggcgtgctcgacctgccggaagccgaccgcctctacggcgaactggccaagttgctggagctgctgcggcaacctgtcgatgccgagcgcctggctgcccgcgccacgcaggcccatactgtgctgacgctcaaaccctggaaggcgctgatgaaataa

SEQ ID NO: 339971 - DNA, 1785 bp, Pseudomonas aeruginosa
atgtccgtgttcgccaccgccgcccaggaccgcctgctggacctcggcgacctgctccgcgagctggtcgcccagggccgggtcgggcaggagcaggccgaacagtgcctggcgatccgccgcagcgcggtgcgcaaccagcagcatccgctggagttcctcgccgcgcagcaggtcgaggatctcaagcgccccggacgcaagctcgacctggagaccctcacccagtggctggccgagtatgccggccagccctacctgcgcatcgacccgctgaagatcgacgtcgccgcggtgactccgctgatgtcctacgccttcgcccagcgccatggcatcctcgccgtcgcgctgagtccggaggaagtcaccatcgccagcgcccagcccttcgtacagggctgggaaagcaacctggtgcatgtgctcaagcgaccgatcaagcgggtggtggcgaacccggcggacatccagcgctacaccgtcgagttcttccgcctggcccgctcggtcagcggcgccacctcgccggaccagaagatcagcggcgtcggcaacttcgagcagttgctcaacctcggcgccgccgaccaggagccggacgccaacgacgcgcacatcgtcaccatcgtcgactggctgttccagtacgccttccagcagcgcgccagcgacatccacatcgagccgcgccgcgagcagggcaccgtgcgcttccgtatcgacggcgtgctgcacaacgtctaccagttcccgccgcaggtgaccatggcggtggtcagccgcctgaagtcgctgggacggatgaacgtggcggagaaacgcaagccgcaggacggccgggtcaagaccaagaccccggacggcgccgaggtggagctgcgcctgtcgaccctgcccaccgccttcggcgagaagatggtgatgcgcatcttcgaccccgaggtgctgctcaagagcttcgaccagctcggcttctccgccgacgacctgcgccgctggcagagcatgaccagccaacccaacggcatcatcctggtcaccggccccaccggctcgggcaagaccaccacgctctacaccacgctcaagcaactggccaccgacgaggtgaacgtctgcaccatcgaggacccgatcgagatgatcgagccctcgttcaaccagatgcaggtccagcacaacatcgacctgaccttcgccagcggcgtacgcgccctgctgcggcaggacccggacatcatcatggtcggcgagatccgcgacctggagaccgccgagatggcgatccaggcggcgctcaccgggcacctggtgctctccaccctgcacaccaacgactcgcccacggcgatcacccgcctgctcgaactgggcgtgccctactacctgatccgcgccacggtgctgggggtcatggcccagcgcctggtgcgcacgctctgcccgcactgcaaggcgccgatgcaactggcggacagcgactggcacgaactgacccgcccctggagcgccccgccgcccagcggcgcgcaccaggccgtgggttgcctggagtgccgcgacaccggctatcgcgggcgcgccggcgtctatgaaatcatgctgctcagcgatagcctgaaagaactgatcaccgccgacaccgacctggtcgccctgcgccgccaggcgtacaaagaaggcacccgcagcctgcgcctgtccggcgcgcagaaggtcgccgcgggtatcagtacgctggaggaagtactgcgggtgaccccgcagagcgaacagaagtag

SEQ ID NO: 339972 - DNA, 453 bp, Pseudomonas aeruginosa
atggaaatcctgctgctacgcctggacttctgggactggctggccttcggtaccgtcctcctgctcctggaaatcttcggtgccggcggctatctgctgcgggtcggcctcaccgccgcttgtgtcggtgcgctcggcgcgctcctgccgggactggcctggccctggcaggtagggctgttcgtcctgctctccgggctggtcgccgccttgcatcgacgccgtcgccgcaaggccggtagcgtcgaggaaacgccagggttgcagcgacgcggcgacgacctgttcggccgcacctttcccttgcaccgggcgatcgtcggcgggctcggcgagctgcgcgtcgaggacgcgttatggctggtcagcggtcccgacctgccgcgcggcgccctggtccgggtcaccggccaggacggcgccctgctgcacgtcgagcctgccgcgccctga

SEQ ID NO: 339973 - DNA, 330 bp, Pseudomonas aeruginosa
atgcgttccgtcaaactcgccgccgccaccctggtcatcgccgccctgccgctgggctcggccacggccgataccttctggcgcaacatcatttcctcgggtgccaccacggcctccacctacctgaccttccgccacgaccacaagctgatcgtcgccgcgcaggacgacgccggcagctacatcgccagcgacggcgcgatccgcgggccatacctggaagccgccctgcagaagctgcgcaacgacaacccggacctgcaggccagcgacatggaactggccagcgcgatcctcgccggcggcgagcagtccgccgtccagcagtag

SEQ ID NO: 339974 - DNA, 2967 bp, Pseudomonas aeruginosa
atgcgttttcgccgtcgttgctttctcattcgatatccgttcggcgacgatcgctggcagggcgatgccgcccccaacgagaccgaagccatgtcgcagacgccgtccctcgcccagctccagcccgccgatgccttcctgcgccgccacctcggccccgatccggcggaacagcaggccatgctggatttcctcggagtttccactcgcgccgaactgatcgtgcagacggtgccgccggcgatccgcctcaaccggccgctggaactgcccgccgcgctcgacgaacaggccgccctggcgcgcctgcgcggctacgccgggctcaaccagcgctggaccagcctgatcggcatgggctactacggcaccgtgacgccgccggtgatcctccgcaacgtgctggagaatcccggctggtacaccgcctatacgccctaccagccggaaatcgcccagggccgcctggaagcgctgctgaatttccagcaactgaccatcgacctcaccggactcgacctggccagcgcctcgctgctcgacgaagccaccgccgccgccgaggccatggccctggccaggcgggtggcgaaggccaggagcaaccggttcttcgtcgatgcgcattgccatccgcagaccgtttcggtgttgcgtacccgcgccgaggcgttcggtttcgagctggtcgtcgacgagccggacaatcttgccgcccacgcggtgttcggcgccttgctgcaatacccggacagtcgcggcgagatccgcgacctgcgcccgcttatcgaggcgttgcacggccaacaggcgctggcttgcgtcgccagcgacctgctcgccctgttggtgctgaccccgccgggggaactcggtgccgacgtggtgctcggcagcgcccagcgctttggcgtaccgatgggctacggcgggccgcacgcggcgttcttcgccacccgcgaagggtacaagcgggcaatgccggggcggatcatcggcgtttcccgcgacgcccgcggcaacccggcgttgcgcatggccctgcaaacccgcgagcagcacatccgtcgggaaaaagccaactcgaacatctgcaccgcccaggtgctgctggccaacattgcttcgctgtatgccgtctaccatgggccgcaggagctgaaacgcatcgcccaacgcgtccagcgcctgaccgcgctgctggcggcgggcctggaaagcaagggactgcggcggctcaaccggcacttcttcgacaccctgacctacgaggtcggcgagcgtcaggcggcgatcctcgaacgggcgcgggcggcgcgggtcaacctgcgcgtggtcgacgaccggcggctggccctgagcctcgacgaaacctgtgacgcggcgaccctggcgaccctgttcgagatcttcctcggcgccggccacgggctggatgtcgcgcacctggatggcggggcggtggccgacggcattccggcggtcctgcaacgcacttcggcctacctgcagcatccggtgttcaacgcccaccacagcgagaccgagatgcttcgctacctgcgccagctggaaggcaaggacctggcgctgaaccaggcgatgatcccgctcggctcctgcaccatgaagctcaacgccagcagcgagatgatccccatcacctggccggaattcgccgaactgcatccgttcgtgccgcgcgagcaggccgagggctatcgccggatgatcgacgaactggaagcctggctgcgggcgatcaccggcttcgacgccatctgcatgcagccgaactcgggagcacagggcgaatatgccgggttgctggcgatccgccgctaccaccggagccgcggcgatagccagcgcgacatctgcctgattcccgcatcggcgcatggcaccaacccggcctcggcgatcatggccagcatgcgggtggtgatcgtcgagtgcgatccccgcggcaacgtcgacctcgacgacctgcgcctcaaggcggccgaggcgggcgaccggctgtcctgcctgatgatcacctatccctcgacccacggcgtctacgaggaggggataggcgagatctgcgaagtggtccaccgccacggcggccaggtctacatggacggcgccaacctcaacgcccaggtcggcctggcgcgaccggcggacatcggcgcggacgtctcgcacatgaacctgcacaagaccttctgcatcccccatggtggtggcggaccgggcatggggccgatcggggtcaagcggcacctggcgccgttcgtcgccaaccacccggtgatccgcgtcgaagggccgaacccgctgaacgacgcggtcagcgcggcgccctggggcagcgccagcatcctgccgatcagttggatgtacatcgccatgatgggcccgcagttggccgacgccagcgaggtggcgatcctctccgccaactacctggcgaaccgcctggacggggcgttcccggtgctctaccgcgggcgcaacgagcgcgtcgcccacgaatgcatcctcgacctgcgaccgctcaaggcgcagaccgggatcaccgaggaagacgtggccaagcgcctgatggactacggcttccacgccccgaccatgtccttcccggtaccgggcacgctgatggtggagccgaccgagagcgagtcgaaggcggagctggatcgcttcgtcgaggcgatgctgagcatcagggccgagatcggcaaggtggaaagcggcgactggccggcggaggacaacccgctgaaacgggcgccgcataccctggccgacgttaccgggatctggcagagaccctacgagatcgccgaggcggtgaccccgagcgaacatgcgcgggcgttcaagtactggccggcggttaaccgggtggacaacgtctacggcgaccgcaacctgttctgcgcctgcgtgccgctggacgactaccgcgagtga

SEQ ID NO: 339975 - DNA, 429 bp, Pseudomonas aeruginosa
atggcgaccgccgtcgcccccgacttcgaggaaaacaagatgagcaatattcccgccgaactgcgttacgcccagagccacgaatgggctcgcctggaagccgacggcagcgtcaccgtgggcatttccgaccatgcccaggaagcccttggcgatgtggtcttcatcgagctgccggagctgggcaagaccctcgccgccggccaggaagcgggcgtggtcgagtcggtgaaggccgcctccgacatctattcgccgatcggcggcgaagtcatcgctatcaacgaagccctggccgacaccccggaagacgtcaacaacgacccgtacgcgtcctggttcttcaagctcaagccgagcaatccggccgagctggacaagctgctcgacgccgctggctaccaggccgccgtcgacgcggaaggctga

SEQ ID NO: 339976 - DNA, 1083 bp, Pseudomonas aeruginosa
atgggattgcgcaccccgctttacgagctgcacgtcgcgctcggcgccaagatggtcgatttcggcggttgggacatgccgctgcactacggttcgcaggtcgaggagcaccatcaggttcggcgtgactgcggcgtcttcgacgtgtcccacatgaccgtggtcgacgtctccggcgagcaggccacggcctatctgcagcatctcctggcgaacgacgtggcgcgcctcggcgagaccggcaaggcgctctacagcgcgatgctcaacgaagagggcggggtggtcgacgacctgatcgtctacctgaccgagaacggctaccgggtggtggtcaacgcctccacccgcgacaaggacatcgcctggatgcaggcgcaggccgccggcttcaaggtcgacctgcaggaacgcggcgacctggcgatgctcgccatccagggccccaacgcccgcgtgcacagctccgaactggtatccccggcacgcgccgcgctgatacgcgaactcaagccgttccagggccgtgccgagggcgactggttcatcgcccgcaccggctacaccggcgaggacggcctggaaatcatgctgccggccgccgaggcgccgggtttcctcaacgagctggttggcgccgggatctccccggcgggcctgggtgcgcgcgatacgctgcgcctggaggccgggctcaatctctacggccaggacatggacgaaagcgtttccccgcttgccgccaacatgggctggaccgtagcctgggagccggttgcgcgggacttcgtcggccgccgcgcgctggaagcgcagaaggccgccggcgaccagccgaagctggtcggcctggttctggaggagcgcggcgtgctgcgcgcccaccaggtggtgcgggtagctggcattggtgagggggagatcaccagcggcagcttttcgcctaccctgaacaagtccatcgcgctggcccgcgtgccggccgccaccggcgatcgcgccgaggtggaaatccgcggcaagtggtacccggtacgggtggtccagcccagtttcgtgcgtcacggcaagcccctgatctaa

SEQ ID NO: 339977 - DNA, 1620 bp, Pseudomonas aeruginosa
gtggcccatcccgctccccgccgctggtaccccatcaccttcaccgttgccgcgctggtgctgctgccgctcagcgtgctgctgctgagctggctggagatcgaccgggaaatctggagccacctgtgggatacccagttgccgcgcctgctcggcaacaccctgaccctggtgctcggcgtcggcatcggcgtgactctgctcggggtcagcctggcctggctcaccagcctctgcgaattccccgggcggcgctggctggactgggcgctgatgttgccgttcgcgatcccggcctacgtcctggcgttcgtcttcgtcggcctgctggatttcgccggaccggtgcagagcctgctgcgcgagtggttcggcagcggcctgcggttgccgcgcgtacgctccaccggcggggtgatcctggtactggtgttggtgttctatccctatgtctacctgctcgcgcgcagcgccttcatcgcccagggcaagggcctgatggaagccgcgcgggttctcggcctgtcgccctggcaggcgttcctgcgggtcgccctgccgatggcgcggccggcgatcggcgccggcctggcgctggcggtgatggaaaccctggccgacttcggcgcggtatcggtgttcaacttcgataccttcaccaccgctatctacaagacctggtacggcttctacagcctctccagcgccgcccagctggccagcctgttgttgctcggggtatgcctggtgctgctcggcgaacgccacacgcgaggccgagccaaggccgccagcgagcgtccgcgcggcgcgccgctgtaccgcctgcgcggcgccagggcgctggcggcgagcgcctggtgcgggctggtgttcctctgcgccttcgtgattcccgtggcgcaactggctgtctggttctggcgccagggccgtttcgacctcgacgagcgctactgggacctgatcggccataccctgacgctgggcggcatcgccgcgctggcgacggtcgccgtggccctgctgctggccttcgccgtgcgcctggcgccgacccgcgctatccgcggcgcggtgggcctgggcaacctcggttatgcgctgccgggctcggtcctggcggtctcgatcatgctggccttcagctggctggacaatcactgggtgatcccgctttccagcgccctcggcggtgccggcaagccgctgctgctgggcagtctgttcgccctgctgctggcctacctgatccgtttcatggcggtggcctacgggccgctggaaagcgggctggcgcggatccgcccgtcgctgccggaagcctcgcgcagcctcggcgtgggcggcccgctgctgttcctgcgggtctacctgccgctgttgctgccggcctcgctgagcgccgcgctgctggtcttcgtcgacgtgctcaaggagatgccggcgaccctgctgatgcgtcctttcggttgggacaccctggccgtacggatcttcgagatgaccagcgagggcgaatgggcgcgcgcctcgctgccggccctgaccctggtgctggtcggcctgctaccggtggtcgggttgattcgtcgttctgcccatcattccgatcgttga

SEQ ID NO: 339978 - DNA, 999 bp, Pseudomonas aeruginosa
atgcaggcaagcaaagctctactcgccgccctggccctgggcatcaccggcctggcccaggccgccgacgaagtggtggtgtattcctcgcgcatcgacgagctgatcaagccggtgttcgatgcctacaccagcaagaccggcgtgaaggtcaagttcatcaccgacaaggaagcgccgctgatggcgcggatcaaggccgaaggcgcgaacaccccggccgacctgctgctcaccgtggacgccggcaacctctggcaggccgagcagatgggcctgctgcaaccgttcaagtcggccaccatcgaacggaacattccctcgcagtatcgttccagcaccgatagctggaccgggctgtcgctgcgcgcgcggaccatcgtctactccaccgagcgggtcaagccggaagagctgagcacctacgaagccctggccgacaagcaatgggaaggccgcctgtgcctgcgcacggcgaagaaggtctacaaccagtcgctgaccgggaccctgatcgagacccacggggcgcagaagaccgaggaaatcctccagggctgggtgaacaacctggccaccgacgtattcgccgacgacaacgcggtgatccaggcggtggacgccggccagtgcgacgtcggcatcgtcaatacctactactacggacgcctgcacaagcagaacccgaacctgcgggtcaagctgttctggccgaaccaggccgaccgcggcgtccacgtcaacctgtcgggcatcggcctgactcgccactcgccgcatcccgaggcagccaaggcgctggtggaatggatgaccgggcccgacgcccaggcgctgttcgccgggatcaaccaggaattcccggccaacccgcaggtcgcgccgtcagccgaagtcgccagctggggcagcttcaaggccgacagcatcccggtggaagtcgccggcaagcgccaggccgaggcgattcgcctgatggaccgcgccggctggaactga

SEQ ID NO: 339979 - DNA, 915 bp, Pseudomonas aeruginosa
atgctcgacctacgccgcctgcgctgcttcgcagccgttgccgaaaccctgcatttcggccgcgccgcccagcgcctgcacatggcgcagccgcccttgacccggcagatatccgcgctggaggaagagctgggctttcgcctgtttgaccgctccagccgggcggtgaccctcaccgccgagggcagcctgttcctgccttacgcacgcggcctgctggaccaactggagcgcaccgccggcttcgcccgcaagttggcgcaggggctggccggccacctgaccctcggctacgccagctccatcgccctgtcggacctgttcaccgaggcgatccgactgttccgcgagcgccatccggaggtgcaactggagctgctcgaaggcgcttcggcggcgcaatgggcgcagatcgccgaaggcggcatcgatgtggggctggggcgcctgccgccgccggaaggccaggtcggcatcgaggtgctggccctgggcggcgagccgctggtggtggccgtgcccaacggcgatccgctggcgcggcaagagcggatcggcctgtacgatctgcgtgatcggccgctgatcctgtttccgctggactacggctccggcctcaacgaactgatcgagcgcctctaccggaaggccgggctggcgctgacgaggggaccggccggacgccagatcacctcgatcatcgccctggtcgcggccggccagggcgttgccctggtgccgcgttgcagcaccgcgctggcccgggccggagtcgtctatcgcccgctggccgagcccgaggcgctggccgatttcctcgtcttcacccgccgccatggccgcagcgccgcggtggaggcgtttctcgccatcctcggcggcctggacgcaggcgaaacaccccgacacatttag

SEQ ID NO: 339980 - DNA, 1194 bp, Pseudomonas aeruginosa
atgaattcgtcccagggtttcccccgcctcgcgctgtttctctgcggttgcgctgcgttcctcaatctctataccacccagggcatcttcgacgaactggcggcgagcttccacatcagcgcccatcaatcgaactggagcatcaccgccaccaccctggcggtggccctcgccgcgcccttcgtcggccggctcagcggcggtcgcgagcgcagccgggtgatcgccttcgccgccagcctgctctgcgtgcccatgctgctggccgcccatgccggcagcttcgccgccttcctgctctggcgcttcgccgaggggatgctgattcccctgctgttcgccagcagcgtggcctacatcggcgagcgctggagcggcggcgcggtcatcgagctgaccagcctctatgtcgccgggaccatcctcggcggcttcgccggacgcttcctcaccggcctgctgaccgaggaatgggattggcgcgtcgccttccggatcctcgccgggctgaccctgctcatcgccgtcgccatccgcgcgctgctccctgccaattctggcaggcactcgcccgcacccgggaaacgccccttagtatcccgtgaactgttccgcgctccgctgctgtcgtcctacgcggtggggttctgtgtcctcttttcccaggtcgccatgttcacctatatcggcatccatctcagccgtccgccgtacagcctggacaccgctcagctcggctcgatctacgcggtgttcctcctcgccctgctggtgattcccgccagcggccgcctggcccgcgcccgcccgcaccgccagttgctgctgggcgcatcgctgctgggcgtctgcggctcgctgctgaccctggcgccgggcctgccgacgattctcgtcggcctggctctcagcgccaccggcgtgttcctcgcacagtccacggtcaacgctttcaccgccagcaacgccgggaccgacaaggccggcgccgtcggcctctacctgacctgctactacgccggcggcagcctcggcgcggtgctgccggcgccattctgggaccgctggggctggccaggctgcctgggcctgatcctcctggcccagttgctgccgttgctgctgacccgctacggctggtccgcaccacaggccgaacgcgcggccctgcgcgcgtcgcaaggaagaccgtaa

SEQ ID NO: 339981 - DNA, 822 bp, Pseudomonas aeruginosa
atgaaccatgtcatcaccccccacagcaagctgctcggcgtcatcgagccagtcctcaacgacatgcccgccggaaccctgcgccatgcgctgttccgggccttctgggacgagacggcgtcgttgctggacatcgaggacgccttcgcccgggtcaccgcccggcgccaggcggtcgagccgctgcgcaagttcttcgccagctggtcgaagaccaacaactcggcggccagcgtttccgggctggccaatcgcctgaccctgctggcccgttcggaacagggttcggcagcggcagaccagctctatcgagcctgcggcagcctgcaacggatcaccgacgaagacctcggcgccctcggcaacaccgtgcatgccgatcttttctacaccatggccaccaccctttgcggcgacgaccgctggctgctgcgcgagaactgcctgccttcggcgcaggcgttcaaggactggaccgaccgccagcgcctgcgcgagcgcgacctgatgcagggactgctgaccacgctggtacacgaggtctatacccacggcgaggtggagtacatccacccgctgtacaaggaatggttcagccgcgacatgggcgtacccgccgaacgcgcccgcgccaccgtggcctgggtaacggtgcacaccggcggcaccgagagcaatcacttcgcccacgccacggcggcggtgaacgccttcgtcgaggcgatggaaatcgaggtgaacgaagaagccgcgcgcaacctgttcgggctctacctgcgcaacaaggcgcaggtcatgcgtgactgcgcggcgctgttctga

SEQ ID NO: 339982 - DNA, 1218 bp, Pseudomonas aeruginosa
atgcacgtggatctggtcatcgtcggcgccggcatggtcggtagcgccctggccctggccctggagggcagcggcctggaggtgctgctggtggacggcggctcgctcgacgtggcgccgttcaagccggaggcgccctacgagccgcgggtcagtgcgctgtccgaagccagccggcggattctccagcgcctgcacgcctgggacggcatcgtcgcgcgccgcgccgagccctatcgcgagatgcaggtgtgggatggctccggcaccgggcggatcggcttcagcgccgccagcgtgcacgccgaggtgctcggccatatcgtcgagaaccgggtggtgcaggacgccctgctggaacgcctgcacgattccaccaccggcctgctggccaacgcgcgcctggaacagatgcgccactccggtgacgactggctgctgaccctggccgacggccgtcagctgcgcgcgccgctggtggtcgccgccgacggcgccaactcggcggtacgccgcctggccggctgcgccacccgcgaatgggattacctgcaccacgccatcgtcaccagcgtgcgctgcgagaacgcgcaccgcgcaaccgcctggcagcgcttcaccgacgacggcccgctggccttcctgcccctgccggaccgcggcgacgaacactggtgctcgatcgtctggtcgaccaccccggaacaggcagaacggctgatggcgctggacgaggatggcttccgcgccgccctcggcgaagctttcgaacagcgcctgggcgccatcctgcatgccgaccggcgcctgtgcatcccgctgcgccagcggcacgccaagcgttacgtcgagccgggcctggcgctggtcggcgacgctgcgcacaccatccacccgctggccggacagggcgtgaacctgggtttcctcgatgcggcggtgctgtccgaggtcctgttgcacgccctggagcgcggcgaacggcttgccgacgaacgcgtgctgagtcgcttcgagcggcggcggatgccgcacaacctgggcatgatgacggcaatggaaggcttcgaacgcctgttccaggccgaccggttgccgctgcgctggctgcgcaacgccggcctgcgcctggtcgacggccatcacgaggccaaggcgctgttcgtccgccaggcgcttggcctcagcggcgacctgccggcgctggcacgagtctga

SEQ ID NO: 339983 - DNA, 489 bp, Pseudomonas aeruginosa
atgccggtctggtcgagggcgcgcaaggcccgcctgctgcgcttcgccatgaacctctacccgcccttcctgggggcgggcatccgtgtgcggcacatcgccggcgatttccgcgaggttcgggtgcgcatgggcctgaaccggctcaatcgcaactatgtaggcacccagttcggtggcagcctctacgcgatgaccgacccgttcttcatgctgatgctgatgctgatggagaacctgggccgcgactacgtggtctgggacaaggcggccaacatcgagttcgtcagcccgggcaagggcccggtgcatgcgcatttcagcatcgaccagaagctgctcgacgaggtccgtgagcggaccgccggcggcgagaagtacctgccccggctgcacgccgaagtgcgcgacgacgccggcaccctggtggcgcgggttcagaaaaccctgtacgtgcggctcaagccgcgcctgcggaacgcggcctga

SEQ ID NO: 339984 - DNA, 1185 bp, Pseudomonas aeruginosa
atgagcaaggtcaacctggcgatcatcggcgggggcctggtcggcgcctcgctggcgctggccctgcaggccggcgctcgggagcgcggctggtcgatcgtgctgatcgaacccttcgcccccggcaatgcctaccagcccagctacgacgcccgctcttcggcgctgtcctacggcagccggcagatctacgagcgactcggcctgtggccggcgatcgccgagcgcgccgagccgatcctgcatatccatgtttccgaccgcggccgcttcggcgccacccgcctgaccgccatcgaggaaggcgtgccggcgctgggctacgtggtggagaacgcctggctcggccagtgcctgtggaaggcgctcgaccccgaggtggtgcgctggcactgcccggccgaagtgaagaccctggaagcccgggagggcggttaccggcttaccctcgacgacgagacgcaactcgattgcgagctggcgatcctcgccgatggcggtcgttccgggctgcgcgaacaacttggcatcgccgtggagcagacgccgtaccggcagactgcgctgatcgccaacgtatcgccctccgaggcgcacctcgggcaggccttcgagcgcttcacccccagcggtccgatggccctgctgccgttgccggagaaccgttgcgcgctgatctggacccgcccaggcaaggacgccgaacgtctgcgtggcctcgatgacgcggccttcctcggcgagctgcaggctgccttcggctaccgcctcggcgccttccgccaggtcggcgcacggcactgctaccccttgcacctggtcgaggcccgcgagcaggtgcgtccgcacctggtggtgctgggcaacgctgcgcacagtctgcaccccatcgccggccagggcttcaacctgtcgttgcgcgacaccctggcgctggtcgacgccctgctccacgacgacgcgccgctgggcgagttcgccgtgctgcagcgctacctcgatgggcagcgcctggaccagcagatgaccgtcggcttctccgaccgggtgacccggctgttctccaacgaccgcgcgctgctcggcgccgggcgcaacctcggcctgctcgggctcgacctgctgccgccggccaagcgctggttcgcccgtcaggccatgggcctcggcgcgcggccgctgtag

SEQ ID NO: 339985 - DNA, 1335 bp, Pseudomonas aeruginosa
atgatccgtatccccaagtcggagtacgcccgtcggcgcaaggcgctgatggcgcagatggaacccaacagcatcgccatcctgccggcggcgccgatgtatatccgcaatcgcgacgtcgagcacgtctaccgccaggacagcgacttccagtacctcaccggctttcccgagccggaggcggtgatggcgctgattcccggccgtgcccacggcgaatacgtgctgttctgccgcgagcgggatccggagcgtgaactgtgggacggcctgcgcgccggccaggacggtgcgatcggccagtacggcgccgacgacgcctttcccatcggcgatatcgacgacattctgcccggcctgatcgaaggccgcgaccgggtctactacgcccttggcgccaatcccgacttcgaccgccggctgatggactggatcaacgtgatccgctccaaggcccgccagggcgcgcagccgccgaacgagttcgttgccctcgaccacctgctgcacgaccagcggttgtacaagagcgccaacgaagtgaaggtcatgcgctacgccgccgaggtctccgcccgggcgcacatccgggcgatggaggtgtgccggccggggctgttcgagtaccacctggaagccgaactggaatacgagttccgcaagggcggggcgaagatgccggcctacggctcgatcgtcgccgccggacgcaacgcctgcatcctgcactaccgcgagaacgatgcggcgatcaaggacggcgacctgatcctgatcgatgccggctgcgagatcgactgctacgccagtgacatcacccgtaccttccccgccaatggccgcttcagccccgagcagaaggcgatctacgaactggtgctggaagccaacatggcggcgttcgactacatcgcccccggtcgccactggaacgaggcccatgaggccaccgtacgggtcatcaccgccgggctggtgcgcctgggcctgctggagggcgacgtcgacgagctgatcgcccacgaggcctacaaggctttctacatgcaccgcgccggccactggctggggatggacgtgcacgacgtcggcgagtaccgcgtcggcggcgaatggcgggtgctcgaaccgggcatggcgatgaccgtcgagccgggcatctacatcgccccggacaatacctcggtggcgaagaagtggcgcggtatcggcgtacgcatcgaggacgacgtggtggtcacccgcaatggctgcgaagtgctgaccaacggcgtgccgaagaccgtcgccgagatcgaggcgctgatggccgcggccaagagcgaggccgcctga

SEQ ID NO: 339986 - DNA, 498 bp, Pseudomonas aeruginosa
atgccggtctcgccggccgaactgcacggccatctgctgggtcgggtctgcgccggcgccggcttcgacgaggccgcctggcaacacgccgccgccgaactgctcggcggcgcgccgggcgaacgactcaaggccgcgttgtccggtctgctcggcatggtccggcaggacttttccgccggcgaggtcgccgtcgtcatgctcctgcccgacgacgaaaccccgctcgcccagcgcaccgaggcgctcggccaatggtgccagggtttcctcgccggcttcggcctcaccgcccgcgaaggcagcctgaccggcgaagccgaggaagtgctgcaggacatggccgccatcgcccaggtccagggccagctggaagacagcgaggacggcgagacggactatatggaagtcatggaatacctgcgggtcgctccgctgctgctgttcgccgagtgcggcaagccgctggagcccgctcccaagccttcactgcactga

SEQ ID NO: 339987 - DNA, 210 bp, Pseudomonas aeruginosa; identical to SEQ ID NO: 321777

SEQ ID NO: 339988 - DNA, 315 bp, Pseudomonas aeruginosa; identical to SEQ ID NO: 321776

SEQ ID NO: 339989 - DNA, 612 bp, Pseudomonas aeruginosa
atgatcgaatcgcaagacctcagccgcccggccctgcgccgcaagctccgccaggcgcgccgcgcgctctcccccctgcagcaacgcctcgccgcccgcgccctctatcgacaactggcgcagcatcccctttttcgccgtgcccgccatatcgccctgtacctgcccaacgacggcgagatcgacccgcgtccgctgctgcgtgcggcgcagaagcgcggcaaggccacctacctgccggtgctggcgccctggccgcggacgcgcatggtgttccagcgggtcggcagcggcgaacgctggacccgcaaccgcttccgcatcagcgaaccgctggccgacgccggccgccagcgcaaggcctgggcgctggacctggtactgctgccgctggtggggttcgacgaacagggcgggcgcctgggcatgggcggcggcttctacgaccgcagcctggcctacctggcgaggcgcaaaaatggtcacaaaccgacgctgatcggcctggcccatgaatgtcagaaggtggatcgactggcgctggccagctgggacattcccctggcgggaacggtgaccgatgcgggctggtacgtggcagggaaacgctag

SEQ ID NO: 339990 - DNA, 132 bp, Pseudomonas aeruginosa; identical to SEQ ID NO: 321774

SEQ ID NO: 339991 - DNA, 459 bp, Pseudomonas aeruginosa
atgcctgcctactggctgatgaaatccgagccggacgaactctcgatccgcgacctgcagcgcctcggaaccgcccgctgggatggcgtgcgcaactaccaggcgcgcaacttcatccgcagcatgaaccccggcgacctgttcttcttctaccactccagttgcccgcagcccggcatcgccggtatcgcccgcatcgagggcgaagcctatcccgatcccacggccctggatcccgccagcccttaccacgaccccaaggccagcgccgagaagaatccctggagcgcccgcgacgtcagcttcgtcgaagccttcgccgaggtcgttccactggcccggctgaaggcgcaggacgccctggccaacctcgccctggtgcagaagggcagccgtctctcggtgatgccggtcagcgccgaggaatggcaggcgatcctgccgctggcgaaacgctga

SEQ ID NO: 339992 - DNA, 1125 bp, Pseudomonas aeruginosa
atgcgcagcctggccaacatcttcaacctgggcatcaaggagttccgcagcctcggccgcgactacgcgatgctggcactgatcgtctgggccttcaccctgggcgtctacagttccgctaccggtattccggaaaccttgcatcacgcgccgatcgcggtggtcgacgaggaccgctcgcaactctcgtcgcgtatcgtcaatgccttccagcccccgtacttccggccgccgaaaatgatcgggcatgccgagatggatcgcggcatggacgtcggcctgtataccttcaccctcgatatcccgccggacttccagcgcgacgtgctggccgggcgcaagccctcgatccaggtcaacgtcgacgcgacccagaccgggcaggcgttctccggcgcgggctacatccagaacatcgtcgccaccgaggtgcgcgagttcgtcagccgctaccgcgcggagccgagcatgccggcgcagatcgaggtgcgcatggagttcaacccgaacctgacccaggcctggttcggcggggtgatggaagtgatcaaccagatcaccatgctgtcgatcatcctcaccggcgccgcgctgatccgcgagcgcgagcacggcaccgtcgagcacctgctggtgatgccgctgtcggccttcgagatcatgatggccaaggtctggtcgatggggctggtggtgctggtggcggcggggctctcgttgcagtgggtggtgcgtggctggctggacgtgccgatcagcggctcggtggggctgttcctgctcggcgccggattgcatctgttcgccaccacctccatgggcatattcctcggcacggtggcgcgctcgatgcctcagctcgggctgctgaccatcctcgtgctgttgccgctgaacatcctttcgggcggcagcacgccacgggaaagcatgccggaactggtgcagaacatcatgctggcggctccgaccacgcatttcgtcagcctggcccaggcgatcctgttccgcggcgccggtttcgacatcgtctggccgcagttcgccggcatcgtggcgatcggttcggcgttcttcttcggcgcgctctggcgtttccgccggaccatctcgcagatggcctga

SEQ ID NO: 339993 - DNA, 2751 bp, Pseudomonas aeruginosa
atgaccgctggcgggagcggcgtggcgagcctccggggcgtttcgctgcgctacggcgagacgcgcgcggtggacgacgtcagcctggagatcccggccaaccgcatggtcggcctgatcggtccggacggggtcggcaaatccagcctgctggcgctgctggccggcgcacggaagatgcaggatggcgagatccgcgtgctcgatggcgacatgcgcgaccgccgccaccgccgggcggtctgcccgcgcatcgcctacatgccccaggggctgggcaagaacctctacccgacgctctcggtgttcgagaacgtcgacttcttcggtcggctgttcggccacgacaaggccgagcgcgagcggcgcatcgccgatctgctgcaaagcaccgggttggcgccgttcgccgagcgtcctgcgggcaagctgtccggcggcatgaagcagaagctagggctgtgctgcgcgctgatccacgatcccgacctgctgatcctcgacgagccgaccaccggcgtcgacccgctgtcgcgcaaccagttctgggagctgatcggccgtatccgcgcgggccgcgaaggcatgagcgtgctggtcgccaccgcctacatggaggaagccgagcgcttcgactggctggtggcgatggatgacggaaaggtcctggccaccggtacgccgcaggagctgcgcgagcgtaccgggacgcagagcctcgagtcggcgttcatcgccctgctgccggaaagcaagcgcgccggccaccatcgattggtgatcccgccgcgaccgcagagcgaaggcgcgccgcggatcgccatcgaggccgagggcctgacctgtcgtttcggcgacttcgtcgcggtcgatcacgtcagcttccgtatcgagcgtggggaaatcttcggcttcctcggctccaacggctgcggcaagtccaccaccatgaagatgctcaccggcctgctgccggccagcgaaggcacgtgcgcgctgttcggccaggcggtggacgccagcgacatggcgacccgtcgccgggtcggctacatgtcccaggccttttccctgtatgccgagctgagcgtgcggcagaacctggtgctgcacgcccggctgttccacctgccggcggatggtatcccggcacgggtcggcgaaatgctccggcgcttcgacctggagaaggtggccgacgagctgcccgacgacctgccgctgggcatccgccagcgtctgtcgctggcggtggcggtgatccacaagccggagatcctgatcctcgacgagcccacttcgggggtcgacccggtggctcgcgacggcttctgggaactgatggtcgagctgtcgcgccgcgacggggtgaccatcttcatttccacccacttcatgaacgaggcccagcgctgcgatcgcatctcgctgatgcatgccggcaaggtactggccagcgatactcccgatgagctggtgcgccagcgtggcctgccgaccctggaagcgaccttcatcgcgtacctggaagaagccgccggtgccgccgcgccagcgcaaccggccgaggcgccggccgtcgcggagcagcccggcgatggccaggggcgccaggcgcaacgccaacgcttcagccccctgcggctgttcagctatgcgcgccgcgaagccatggaactgcgccgcgacccgatccgcctgaccctggccctgctcggcaccgcgctgctgatgttcatcatcggctacggcatcaacatggacgtcgaggacctctcctgggcggtcctcgaccgtgaccagaccaccaccagccaggcctacgcgctgaatatcgccggctcgcgctatttcgtcgaacatgcgccgatcaccgacccggacgacctcgaccggcgcctgcgcagcggcgagctgagcctggcggtggagatcccgccgaacttcgggcgcgatctcaagcgtggctccgatcctgccatcggcgtgtggatcgacggagcgatgccgacccgtgccaacaccgtgctcggctacgtgcagggcctgcacaccagctacctggcggacctctcgcggcaggtgggtggggccgaggccagcgcggcggccagcaccgaggtgcgctatcgctacaaccccgacgtggaaagcctgaaggcgatggtgccggcggtgatcccgctgctgctgatcatgatcccggccatgctcaccgccctcggcgtggtgcgcgaaaaggaactgggctcgatcaccaacctctatgtcaccccggtgacgcgcctggagttcctggtcggcaagcagttgccttacgtcgccatgggcatgatcaacttcctgctgatgctggtcctggccatcgtggtatttcgcgtgccgctcaagggcagcttcctggcgttgaccatcggcgctttcctttatgtggtcaccagcaccggcctcgggctgttcctctcgacgttcatgcgcagccagatcgccgctgtattcggcgtggcgatcgccaccatgatcccggcgatccagttctccgggctgatccacccggtgtcctcgctggaaggtgcggcggcctggatcggcaagctctatccgacctcgcatttcctggtggtcagccgcggcgccttttccaaatcgctgggcctgcccgatctctgggcctactacctgccgcttgccgcttccatcgtggtgctgaccctgctcagcgtggcctgcctgaagaagcaggaggactga

SEQ ID NO: 339994 - DNA, 1074 bp, Pseudomonas aeruginosa
atgaaacaggaaagcaaacggtggctgagccgtgccctggtcgtggcggcgctgctcggcgtaggcgtgctggtctggcaggtatcgcgaccgaccggcctgggcgagggattcgccagcggcaacggacgcatcgaggccaccgaggtggacgtggcggccaagcttcccgggcgggtcgccgagatcaaggtcgacgagggcgacttcgtcaaggccggcgaaatcgtcgcgcggatggatacccaggtgctcgaggcgcagttggcccaggcccaggcccaggtgcgccaggcggagaacgccaagctcaccgcgacctcgctggtggcccagcgcgagagcgagaagagcaccgcccaggccgtggtggcgcagcgccaggccgagctgacagcggcgcagaagcgcttcacccgtaccgaggcgctggtcaagcgcaatgccctgccgcaacagcaactcgacgacgatcgggcgaccctgcagagcgcccaggcggcgttgtccgcggcacgctcgcaagtgatttcggcgcaggcggcgatcgaggccgggcgttcccaggtaatcgaggcgcagtcggccatcgaggcggccaaggccagcgtcgcccggctccaggcggatatcgacgacagcctgctcaaggcgccgcgcaacggccgcgtgcagtaccgcgtggcacagccgggggaagtgctgccggccggtggcaagctgctcaacatggtcgacctggccgacgtctacatgactttcttcctgccatccatgcaggccggcagggtcggactgggccaggaagtgcgcttggtgatcgacgcggtgccggactacgtgatcccagccaaggtttcctatgtcgccagcgtcgcccagttcaccccgaaaacggtggaaaccgccaacgagcgggagaagctgatgttccgggtcaaggcgcggctcgatccggcgctgctggaaaaatacatcacctacgtcaagaccggcgtgcccggaatggcctacctgcgactggaccctgaggtcgagtggccggccaacctgcagatcaaggttccgcaatga

SEQ ID NO: 339995 - DNA, 420 bp, Pseudomonas aeruginosa
gtgagaacccccattgccctgtcgctggccctgtgcctgagtctgttcccgtcgttcgcctcggccgaggaggccgcgccggaaggcgagggcgcgaacaagccggtctacgtcgacctgaccccggcgctggtcggcaactacggcggcgggccgcgcctgcagtactacaaggccgacatcgccctgcaggtggccgacaaggacgcggcgaccaaggtcgagcatcacgagcccttgatccgcaaccagttgatcatgctgttcgcccagcagaccgaccagagcctgggtacggtcgaggccaaggaaagcctgcgccaggaggcgctgaagcaggtccagcagaccctcgagcaggaagagggcaagccgctggtgaccgacctgctgttcaacaacctcatcgtccagccctga

SEQ ID NO: 339996 - DNA, 978 bp, Pseudomonas aeruginosa
atgaaagccgtcctctgcaaagccttcggcccggccagcagcctggtcctggaagaaatcgccagcccgagcccggcgaagaacgaaatcctcctcgatgtgcacgccgccggggtcaacttccccgacaccctgatcatcgagggcaagtaccagttcaagccgcccttccccttctccccgggcggcgaggcggccggggtggtcgccgcggtcggcgaaaaggtcgcccacgtcaggcccggcgaccgggtcatggccctgaccggctggggcagcttcgccgagcaggtcaaggtgcccggctataacgtgatgccgattcccgaaggcatggacttcgccagcgccgccgccttcggcatgacctacggcacctcgatgcacgccctgaaacagcgcgccaacctgcaacccggcgagaccctgctggtgctcggcgcttccggcggggtcgggctggctgccgtggagatcggcaaggccatgggcgcccgggtgatcgctgccgccagtacccccgacaagctcgccgtggccaaggccgccggcgccgacgaactgatcaactacagcgaaggtagcctgcgcgagcagctcaaggccttgaccggcggccagggcgtcgatgtgatctacgatccggtgggcggcgaactgttcgaggaggccttccgcagcatcgcctggaacggacggatgctggtggtcggcttcgccagcggcagcatcccttcgctgccggccaacctgaccctgctcaagggcgcctcgctggtcggcgtgttctggggatcgttcgcccaacgccagccgcaggacaacgctgacaacttccgccagctgttcgcctggcacgccgaaggcaagctgaaaccgctggtgtcgcagcgcttcccgctggaacgggccggtgacgccatcgacgccctcggccagcgcaaggcggtcggcaaggtggtggtggaggttcgctga

SEQ ID NO: 339997 - DNA, 1350 bp, Pseudomonas aeruginosa
atgttcggaatctttcgtcccgcgccacaccaggcgccactgcccgatgccgaggtggacagcacctaccggcgcctgcgctggcagatcttcgccggtatcttcatcggctacgcgggttactacctgctgcgcaagaacttctccctggccatgccctacctcatcgaggacggctacagtcgcggccagctgggcgtcgcgatgtcggccatcgccatcgcctacggcctgtcgaaattcatcatgggcctggtctcggaccgttccaacccacgggtcttcctgccgttcggcctgttggtgtcggcggcggtgatgttcattttcggattcgcgcactgggctacctccagcgtcgccatcatgttcgtcctgctcttcattaacggctgggcccagggcatgggctggccgccgagcggacggaccatggtccactggtggtcgcagaaggagcgcggcagcgtggtctcggtgtggaacgtcgcccacaatgtcggcggcggcctgatcggcccgctgttcctgctcggcctggcgctgttcggcgactggcgctcggccttctacgtgccggccatcgtcgccgtgggcgtagccgtgttcgcctatttcgccatgcgcgacaccccgcaatcctgcggcctgccgccgatcgagaagcataaggacgactaccccgaaggctacgacgaacaccacgagcgcgagctgtcgaccaaggagatcttcgtcacctacgtgctgcgcaacaagctgctctggtacatcgccctggccaacgtgttcgtctacctgctgcgctacggtgtgctcgactgggcgccgacctacctcaaggaggccaagcacttcaacgtcgacaagtcgtcctgggcgtacttcttctacgaatgggcggggattcccggccccctgctctgcggctggctgtcggacaagctgttcaagggcaatcgcggcgccaccggcgtggtgttcatgatcctggtgaccgtcggcaccctgatctactggctgaacccggccggcaacccggcgatcgacatggccgcgctgatcatgatcggcttcctgatctacggcccggtgatgctgatcggcttgcaggccctggagctggcgccgaagaaagcggccggcaccgccgccggcttcaccggtctgttcggctacctcggcggttcggtggcggccaacgccctggtcggctacacggtggaccacttcggctgggacggtggcttcaagctgctgatcggcgcctgcctgctggccatcctgttcctctgcctgaccctgcgcaaacccgcggtccaggccgcgacgcagcaagccggcggatga

SEQ ID NO: 339998 - DNA, 969 bp, Pseudomonas aeruginosa
atgcgtatcgtcctgcaaccgtccggcgcctgcctcgagctgctgccgggggaacgcatcctcgatggcgcccggcggctcggctacgactgtccgcagagctgccgcaacggcaactgccatatctgcgcggcgctgctggtggaggggcgggtacgccagaacggcgaggtacgcgatcatggcgaactcttcacctgcctcgccgagccgctggaagactgcgtgctgcattgggacggggtgctggcgccgggtgaactgcctctgcgcaagctgacctgccagttgagcttctgcgaagaggtcggcggcgacgtctaccgggtcggcctgcgcgcgccggccggcaagccgccacgctatcacgccgggcagtacctgttgctggagcgtgacggcggcgacagcgcggcgttttccctggcctccgcgccgcatgcgggacgcgaccttgagttgcacatcctggccaaggaagacagtgccgtcgcgctgatcgcgcagttgcagcgcgagcgcctggcacggatccagctgccgttcggcgacgcgcacctggcggaactgcccgacggtccgctggtgctgatcgctgcgggaaccggcatgtctcagatgcacagcctgatcgagcactgccgcgccgccggcttcgcccatcctgtacatctctactggggcgttcggcgtccggaggatttctaccgactgccgcactggacggagtgggaaggcctgccgaacctgttcctgcaccgggtggtcagcgacctctgtggctgggaggggcgttgcggcttgctgcacgaggcggtgcgcgaggatttcgccgacctgtcgagcctgcatgtatacgccagcggctcgccggcgatggtctacgcgaccctggatgccctggtcgaagcagggatggacgcgcaccagatgcgcgccgacgtgttcgcctacgcgccgcgggactga

SEQ ID NO: 339999 - DNA, 1467 bp, Pseudomonas aeruginosa
atgacgttcaaggatctccgcgatttcatcgcccagctggagcagcgcggtgcgttgaagcgcatccaggtgccgatttcccccgtgctcgagatgaccgaggtgtgcgaccgcacgttgcgcgccaagggcccggcattgctgttcgaaaagccgaccggcttcgacatgccggtacttggcaacctgttcggtacgccggagcgcgtggcgctgggcatgggcgccgaggacgtcggcgcgctgcgcgagatcggcaagctgctggcgcaactcaaggagcccgagccgccgaagggcctcaaggacgcctgggccaagctgccgatgtacaggaaggtcctgtccatggcgccgaaggtgctcaaggacgccccctgccaggaagtggtcgaggagggcgaggacgtcgacctcggccggctgccggtccagacctgctggccgggcgatgtcgggccgctgatcacctggggcctgaccgttacccgcgggccgaacaaggaacggcagaacctgggcatctaccgccagcaggtgatcggccgcaacaaggtgatcatgcgctggctcagccatcgcggcggcgcactggactaccgcgagtggtgccagaagcatccgggccagccctatccggtagccgtggcgctgggcgccgatccggcgaccatcctcggtgcggtgacgccggtgccggacaccctttccgaatacgctttcgccggcctgttgcgcgggcatcgtaccgagctggtcaagtgtcgcggcagcgacttgcaggtgccggccagcgccgagatcgtcctcgaaggggtgatccaccccggcgagatggccgacgaaggtccctatggcgatcacaccggctactacaacgaggtcgatcgcttcccggtgttcaccgtcgagcgcgtcacccgccggcagaaaccgatctaccacagcacctacaccgggcgtccgccggacgagccggcgatcctcggggtggcgctgaacgaagtgttcgtgccgatcctgcagaagcagttcccggaaatcgtcgatttctacctgccgccggaaggttgttcctaccggatggcggtggtgaccatgaagaagcagtacccagggcacgccaagcgcgtgatgctcggggtctggtcgttcctgcggcagttcatgtacaccaagttcgtcatcgtcaccgacgatgacatcgatgcgcgcgactggaacgatgtgatctgggccatcaccacgcggatggaccccaagcgcgacacggtgatgatcgacaacacgcccatcgactacctcgacttcgcctcgccggtctccggcctcggctcgaagatggggcttgatgccacccacaagtggccgggcgagaccagccgcgaatgggggcgcgccatcgtcaaggacgaagcggtgacacggcgcatcgatgcgctctggtcgagcctcgggatcgactga

SEQ ID NO: 340000 - DNA, 1989 bp, Pseudomonas aeruginosa
atgtcgagcctggcctatcgaagggacatcgatggtttgcgagcgttggccattctgccggtggtgttctaccaccttggcttggggggcatcaccggcggctatgtgggcgtcgatgttttcctggtcatttccggctacctgatcacttcgatcatccggcgcgagcagcaggccggacgtttcagcttcgtcgacttctgggcgcgccgggcacgccgcattctccccgcgctgttcgtgatgatggcggcgagcctggtgatcggctggttcctcatggcgccgcgcgactacgaagagttagggcgttcggttcgctaccagacgatgttcgcctcgaacatcctgttctggaagcaggatggctatttcgacgccgcgtccgaattcaagccgctattgcatacctggtcgttgtcggtggaagagcagttctacattctcttccctctactgctggccgcggtctccgggcgtctgctgcgctggcggctcgccatcctcctcgcggtcctggcgctatcgctggcggccagcgtctgggcggtgaaccagcgacctggcagtgcattcttcctcctgccgatgcgcgcctgggaactcctggcgggtgccgcgctggcattgctgccgggcggtagccgcggtcattcgcagtggtccctgcaactggcggccaccctcgggatagcggcgactctcctgccggtgttcttctacgacagcgacactcctttccccggcctcgcggcgctgccggcggtgcttggcaccgccctgctgatctgggccaacggcgccggtgacacctgggctcgccgcctgctgggctggcaaccgctggtctggttcggtctgatctcctattcgctgtacctctggcactggccgctgtacgtcttcgtccagtaccacgcactggagaccctgggcctgccggcacgcctggggttgctggcggcgagcatcggcctggcggcactgtcgctgtactacgtcgaggcaccgttccgcgagcgcaagctgttcgccgggcgccggcagatgcttggcgcggcgctgtgcagcttgctgctgctgggagtcgtcggccagttggtgcggcattacgacggcgtgccgtcgcgtctttccgaggaagccttgcgttatgccaaggcgtccaagtggcgcgatgggcagaccgactgcatgttcgacaagaaggcgctcagtcaggaaagcatctgccgcttcccggcggaactggctgccgaacgaccgctgctggtcagttggggcgacagccattccgcggcgttgagcccgctgctgcgcgaactggctgccagtcgccgggtgccgatctggcaggcttcgctggcgggctgtccgccgttgctggggatgctggaaaaggacaattgcctgcgtttcaaccagcagatgctcgagttcgtcgaacagcagcggccgggcggggtgatcctcgccgggcgctgggacatgtatgtctacggcgactcgcaggacggcacccgcaacattctccgcgagccggacgacacgccggacagctcgatcgccgaggcgctgctgcggcaacgcctgagcgggatgatcgaaaggctgaacgcggccgacgtacatgtctggctggtcaaggacgtaccgctgctgccattcaaggcaccggcgcggctggtgcggctgagtctgagcggggaggatgtcgggcgcgcacgttttcccttcgctgagcacactgcgcgcgtcgcctacgtgaatgcgctgttcgatgcgctggccgaaggcaacccgcgggtgagcgtgatcgacccctccagcgtgctctgcgatggcctggattgtttcgccgaacgtgatggctggtcgctgtacatggataacaaccacctttcgacccagggggcccatgaactcgggcctttgttcgagccgatgctacagagcctcgacgactcgcggatcgccagccagcagtga

SEQ ID NO: 340001 - DNA, 1260 bp, Pseudomonas aeruginosa
atgaatctgaccgaactcaagcaaaagccgattgccgaactgctggaaatgtccgatgccatgggcctggaaaacatggcccgttcgcgcaagcaggacatcatcttcgccctgctgaagaagcacgcgaaaagtggtgaagagatctccggcgatggcgtgctggagattcttcaggacggcttcggcttcctgcgctccgccgactcttcctacctggccggccccgacgacatctatgtctcgccgagccagatccggcgcttcaacctgcgcacgggcgacaccatcatcggcaagatccggccgccgaaagagggcgaacgctacttcgccctgctcaaggtcgactcgatcaacttcgatcgtccggagaatgcgaagaacaagattctcttcgagaacctgacgccgctgttccccaacgagcggatgaagatggaagccggcaacggctccaccgaagacctgaccggccgcgtcatcgatctctgcgcgccgatcggcaagggccagcgcggcctgatcgtggcgccgccgaaggcgggcaagaccatcatgctgcagaacatcgccagcaacatcacccgcaacaaccccgaatgccacctgatcgtactgctgatcgacgagcgccctgaggaagtgaccgaaatgcagcgcaccgtgcgcggcgaagtggtcgcctcgacctttgacgaaccgccgacccgtcacgtacaggtcgccgagatggtgatcgagaaggccaagcgcctggtcgagcacaagaaggacgtggtcatcctgctcgactccatcacccgtctggcgcgggcctacaacaccgtgatccccagctccggcaaggtgctcaccggcggtgtcgacgcccatgccttggagaagccgaagcgcttcttcggcgccgcgcggaacatcgaagagggcggttctcttacgattctcgccacggcgttggtggaaaccggctcgaagatggacgaggtgatctacgaggaattcaagggtaccggcaacatggaactcccattggatcgcaagatcgccgagaagcgcgtgttcccggccatcaacatcaaccgttcgggtacccgccgcgaagagctgctgaccagcgaggacgagctccagcgcatgtggatcctgcgcaagatcctgcacccgatggacgagatctccgcgatcgaattcctcatcgacaagctcaagcagaccaagaccaacgatgagttcttcgattcgatgaaacgaaagtag

SEQ ID NO: 340002 - DNA, 327 bp, Pseudomonas aeruginosa
atgagcgaacatatcgtcaacgttactgatgccagcttcgagcaggacgtgctgaaggccgacggccctgtgctggtggactactgggccgagtggtgcggtccgtgcaagatgatcgcgccggtgctggacgaagtcgccagggactatcagggcaagctgaaggtctgcaagctgaacatcgacgagaaccaggacaccccgccgaagtacggcgtgcgtggcatccctaccctgatgctgttcaaggacggcaatgtcgaggcgaccaaggtcggcgcactgtccaagtcgcagttggcggccttcctcgacgccaatatctga

SEQ ID NO: 340003 - DNA, 1506 bp, Pseudomonas aeruginosa
atgccgcaaaaacctgccgaggcattcccgctgattgccgccctggacctgggttccaacagtttccacctctgtctggccaaggccaatatccacggcgaagtccgcatcctcgaacggctgggcgagaaggttcaactggccgccggcctcgacgaggagcgcaatctcagcgaggaggccacccagcgtggcctcgactgcctacgccgcttcgcccagttcatcagcggcatgccccagggttccgtacgcgtggtcgcgaccaacgccttgcgcgaggcgcgcaaccgcagcgatttcatccgtcgtgcggaagaggttctcggccatcccgtggaagtcatctccggccgcgaggaagcccgcctgatctacctcggcgtcgccaacagcatgcccgacagcggcggtcgccggctggtcagcgacatcggcggcggcagcaccgagttcatcatcggccagggtttcgagtccgagctgcgggaaagcctgcagatgggttgcgtcagctacacccaacgctacttccgcgacggcaagatcaccccggcccgctacgcccaggcgtacaccgccgcacgcctggaactgatgggcatcgagaacagcctgcggcgcctcggctggcaacaggcggtcggcgcctccggcaccatccgcgcagtggcgctggcgatcaaggccggcggccacggcaacggcgagatcagcccggacggactggcctggctgaagcgcaaggtgctcaagctcggcgacgtggagaagctcgatctggaagggatcaagccggaccgccggaccatcttcccggccggactggccattctcgaagcgatcttcgacgcgctggaactggaacagatggttcactccgagggcgccctgcgcgaaggcgttctctacgacctggtcggccgtcaccagcacgaggacgtgcgcgaacgcaccatcagttcgctgatgcagcgctaccacgtcgatccggagcaggcttcgcgggtggaggccaaggccctcaaggtgcttgccgaagtcggcgacgcctgggagctgaacgacgaactgcaccgcgacctgctgagctggggcgcacgggtccacgagatcggcctggacatcgcccattaccactaccacaagcacggcgcctacctgatcgagcactccgacctggctggcttctcgcgccaggaccagcagatgctgtcgctactggtacgcggccaccgccgcaacattccggcggataagctggcggagttcgccgcggaaggcgacaagttggtgcgcctgtgcatcgtgctgcgcttcgcgatcctcttccaccacattcgcggcacccaggaaatgccctcggtgcgcctgaaggcagagcccaagagcctttcggtgaccttccccgagggctggctggaagccaacccgctgacccaggccgacttcgcccaggaagccgaatggctcaagcgggtcggctacagcctcaacgtgcggtaa

SEQ ID NO: 340004 - DNA, 2211 bp, Pseudomonas aeruginosa
atgaatacgcagcaaggacttgatgagatcgaacgtatcgccgccgacgaaaccgtagtggcgaacgtggaaagcgaagcagaagtgaagatggccgaaacgatcccggtggaaacgccacctgcggtggttcccagcgtggatgacagcagcctgtacattcatcgcgagctctcccagttgcagttcaacatccgcgtgctggaacaggcgctggacgagtcctacccgctcctggagcggctgaagttcctcctcatcttctcgagcaacctcgacgaattcttcgagatccgcatcgccggcctgaagaagcagatcaccttcgcccgcgagcaggccggcgccgacggcctgctgccgcaccaggccctggcgcggatcagcgagctggtccacgagcaggtatcgcggcagtaccggatcctcaacgagaccctgttgccggagctggccaagcaccagatccgcttcatccgccggcgtcactggacgctgaagatcaagacctgggtgcggcgcttcttccgcgacgagatcgcgccgatcatcaccccgatcggcctcgacccgacccacccgttcccgctgctggtgaacaagagcctcaacttcatcgtcgagctggaggggatggatgccttcggccgcgactccggcctggcgatcatcccggcgccgcgcctgctgccacggatcatcaagctgccggaagacgttggcggcgagggcgacaactacgtgttcctgtcgtcgatgatccacgcccacgccgacgacctgttccccggcatgaaggtgaagggctgctaccagttccgcctgacccgcaacgccgacctgtcggtggacaccgaggatgtcgaggacctggcccgcgcgctgcgcggcgagctgttctcgcgtcgctacggggatgcggtacgcctggaggtggtggatacctgcccgcagaacctgaccaactacctgctcaagcagttcggcctgtccgaaagcgagttgtacaaggtcagcggcccggtcaacctgacccgcctgttcagcgtcaccggcctggaaagccatccggagctgcagtacccgcccttcaccccggcgatcccgcgtcttttgcagaagaaggaaaacctcttcaacgtcctcagcaagctcgatgtgttgctgatgcacccgttcgaatccttcaccccggtgatcgacctgctgcgccaggccgccaaggatccgaacgtgctggcgatcaagcagaccctgtaccgcagcggtgccaactctgagatcgtcgacgccctggtcgaggcggcacgcaacggcaaggaggtcaccgcggtgatcgagctgcgcgcccgcttcgacgaagagtccaacctgcaactggccagccgcctgcaacaggccggcgcggtagtgatctacggcgtggtcggcttcaagacccacgccaagatgatgctgatcctccgtcgcgaggacggcgaactgcgccgctacgcgcacctgggcaccggcaactaccatgccggcaacgctcgcctgtacaccgactacagcctgctgaccgccgacgtggcgctctgcgaggacctgcacaagctgttcaaccaactgatcgggatgggcaagacgctgcgcatgaagaagctgttgcatgcgccgttcaccctgaagaagaacctgctggaaatgatcaaccgcgaggcggcccaggcggcgctcggccagccggcgcacatcatggccaaggtcaactcgctgaccgatccgaaggtcatccgcgccctgtacaaggccagccaggccggggtcaggatcgacctggtggtgcgtggcatgtgctgcctgcggccaggcatcccgggggtctcgcacaatatccacgtgcgctcgatcatcggacgcttcctcgagcacagccgcatctactacttcctcaacggcggcgacgagaagctctatctatccagcgccgactggatggagcgcaacctcgacatgcgcgtcgagacctgcttcccggtggaaggcaagaagctggtgcagcgggtcaagaaggaactggaaacgtatctgaccgacaacacccaggcctgggtgttgcaggccgacggtagctaccagcggctcagccccaccggtaaccagaacccccgcaatacccaggcgaccctgctggagaagctggccgcgccggtgcttaccgcacgttga

SEQ ID NO: 340005 - DNA, 1014 bp, Pseudomonas aeruginosa
gtgagcttcactcccgccaaccgcgcctatccctacacccgcctgcggcgcaatcgccgcgatgacttctcccgccgcctggtccgcgagaatgtcctcaccgtcgacgacctgatcctgccggtgttcgtcctcgatggggtcaaccagcgtgaaagcattccgtcgatgcccggcgtcgagcgcctgtccatcgaccagttgctgatcgaggcggaagagtgggtggccctgggcattccggcgctggcgctgttcccggtgaccccggtggagaagaagtccctggacgccgccgaggcatacaacccggaaggcatcgcccagcgcgccacccgcgccctgcgcgagcgctttccggagctgggcatcatcaccgacgtggcgctcgacccgttcaccacccatggccaggacggcatcctggatgacgatggttacgtcctcaacgacgtcagcatcgacgtgctggtacggcaggcgctgtcccacgccgaggccggcgcccaggtggtagcgccctcggacatgatggacggtcgcatcggtgcgatccgcgaggccctggagtctgccggtcacaccaatgtgcggatcatggcctactcagccaagtacgccagcgcctactacggtccgttccgcgatgcggtcggctcggcttcgaacctcggcaagggcaacaaggccacctaccagatggatccggcgaacagcgacgaggcacttcacgaagtggccgccgacctggccgaaggcgccgacatggtgatggtcaagccgggcatgccctacctcgacatcgtgcgtcgggtgaaggatgaattccgcgccccgacctttgtctaccaggtcagcggcgagtatgcgatgcacatgggcgccatccagaacggctggctggccgaatcggtgatcctcgaatcccttaccgccttcaaacgtgccggcgccgatggcattctgacctacttcgccaagcaggccgcagaacaattaagacgggggcgttga

SEQ ID NO: 340006 - DNA, 591 bp, Pseudomonas aeruginosa
atgatgctccaacaattcctgcaggacttcggctatttcgccctttttctcggtactttcttcgagggcgaaaccattctcgtgctggccgggttccttgccttccgcggctacatgcagttggataccgtgattctcaccgccttcctcggcagctacgccggtgaccaactctggtacttcctcggacgccgccacggccgccggttgctggcgcgcaagccgcgctggcagaagctcggcgacaaggcgctggaccatgtgcgccgccatcctgacctgtgggtgctgagtttccgcttcgtctacggcctgcgtacggtgatgccggtggccatcggcctgtccggctatccaccggcccgctatcttcttctcaacggcatcggcgccatcgtctgggccgccgcgctgggctccgccgcctactatttcggcagcgtactggaaggcatgctcggcaacatcaagaaatacgaactcatggtcctcggcggcctgatcgtgctgggcctgctgctctggctatggcggcgtttcaagacaccgcgcggcaacggcgcgggcggcaacgccgacaaatccgagtga

SEQ ID NO: 340007 - DNA, 669 bp, Pseudomonas aeruginosa
atgcacaagaaagttgccgtcatcctctccggttgtggcgtctacgatggcgcggaaatccacgaaagcgtgatcaccctgctccgcctcagccagcgcggcgccgaggcacaatgctttgcgccgaacatcgcccagcaccatgtggtcaaccacctgaccggcgaggaaatgccggaaagccgcaatgtcctggtcgagtccgcgcgtatcgcccgcggcgaagtcaaggacctgcgcgaagcccgcgccgaggactacgacgcgctgatcgtgcccggtggcttcggcgctgcgaagaacctcagcgactttgccatcaatggcgcgcaatgccaggtgcagccggacgtgctggcgctggccaaggctttcgccgaagccggcaagccagtcgggctgatctgcatcgctccggcgatggcggcgaagatctacggcgccggcgtccaatgcaccatcggcaacgacgccgacaccgccgacgcgctgaagcagatgggtgccgagcacatcgacgcgccggtggacgagatcgtcgaagacagcgcgcgcaagctggtgaccaccccggcctacatgctcgcccagtcgatcgccgaagccgcttccgggatcaacaagctggtcgaccgggtgctcgaactggtggaccaggacaaggcctga

SEQ ID NO: 340008 - DNA, 474 bp, Pseudomonas aeruginosa
atgagcgaaacgccctcctccgccctgcctgacgacgtccaccaactggtggcggatttcttccagcgcatccccttcaaccgcatgctcggcatccgcgtggcgagcctcggccgcgagcgggtagtcctcgacctgccgatgaaggacgaactgatcggcaacttcgtccagggcattctccacggcggggtgatctccagcctgctcgacgtcaccggcggagcgatggccctgatcggcgccctcgaacggcatcgcgaactgccaggccacgagcgcatggcgcggctgtcgaagctcggcaccatcgacttgcgcgtcgactacctgcgcccgggacgcggccggacgttcaccgcccatgcggtgccgcttcgctcgggcaacaaggtcgcagtggtgcgctcggaactgcatagcgacgacggcacgctggtcgccgtcggtaccggtacctatctgtgcggctga

SEQ ID NO: 340009 - DNA, 483 bp, Pseudomonas aeruginosa
atgcgtatctggatcgatgccgacgcctgccccaaggcggccaaggaactggtctgcaagttcgccctcaagcgcaagctggaagtctggatggtcgccggccagccgcaggtcaagccgccgttcgcctgcgtgcgtctggtggtggtggaaagcgggatggatgcggctgacgattacctggtggagcaggccgagccgggcgacctggcgatctgcagcgacgtaccgctggccgatcggctgatcaagaaacaggttgccgccctcgatcctcgcggccgcgagttcgacgcgcggaacatgggcgataagctggccatgcgcaacctgatggccgacctgcgtgaccaggggcagatgggcggcggccaggcgccctacggtgagcgtgaccgccaggcgttcgccaacgccctggaccgcctgctcacccgcctgcagcgggaagccgatctacgcgcgagtcagccgcacagatag

SEQ ID NO: 340010 - DNA, 1959 bp, Pseudomonas aeruginosa
atgggcgggaaggcgaagggacaatttaatctcttccattctcacttcgtcttcgccatgcaccctccgaaaatcctgctgtggctgctgccgctggtctgcgtgttcagccttggagctattgccgacacggccgtcgacccctcccaagccttgcatctgttgagttacctggcggccgactatccgccgaccgtggctgacggcaagatcgtcgaccccagcgaataccaggaacaggtggaattcgtcggcaacctgcaggcattggtcctgaccctgccgatgcgccccgagcgcgccgagctggagaggggcgtcgccagcctgcgccaggccatcgagcagcgcttgccgggaagggacgtggccctccaggcgcgcaacctcgaggcacgggtggcggatatctaccaggtggtgcagacccccgcgatcacccccgacccgagccgcgcagcgccgatctatgcccagcagtgcgcgatctgccatggcgatgcgggcaagggcgacggccccgccggcatcggcctggaaccgccgccggcgaacctcaccgatcgccagcgcctcgaccacctgagcctctacgacctgcgtaacgtcatcggcctgggcgtggccggcaccgacatgccggcgttcgccgaccagctcgacgaacgccagcgctgggacctggccagctatgtggccggcctgagcgccggcagtgcgcagccggacaaggcccatgcctacccgctggcgaccctggccacgcagactccggccgaagtcgccgagcacgacggcgaggccgctgcggagagcttccgcgccctgcgtgcgcatccgccgctggagcagcgcggtcctgggcagttgatcgactataccgccgccaccctggacaagagcttcgcggtctatcgcgaaggcgaccgcgaccaggcctacgacctgtcggtggcggcctacctggaaggcttcgagctggtggaaagctcgctggacaacgtcgacgccgatttgcgccgctccaccgagaagcagctgatggcctaccgccaggcgttgcgcgatggcctcccggaaacccaggtggcgcaacagttggagctggccaagggcaagctggcagaggccgccaagcagcttggcggcgactcgctgagtttctccatcagtttcgtttccgccctgttgatcctgttgcgcgaaggggtagaggcaatcctggtgcttgccgccatcctcgccttcctgcgcaataccgggcaggaaagtgccgtgcgtggcgtgcacgtcggctgggggctggccttcgtcgctggcttcgccacctgggcgttggccgcctatgtgatcgatatcggcggtgcccagcgcgagctgatggagggcttcacctcgctgttcgcctgcgtgatggtgctctggctcggcgtctggatgcacgaccgccgccacgcggcagcctggcaggactacatccgcagcagcctggtgggcggtggtggacgcttcggcttcgcagtgctggcgttcttctcggtctaccgcgagttgttcgaggtcatcctgttctacgaaaccctctggttgcaggccggaccggccgggcacaatgccgtgatcggcggcgcagcgaccgccgtggtcctactgatcggcctggcctgggtgatcctgcgtggctcggcgaaactgccgctggggttgttcttcagcatcaacgcggcgttgctctgtgcgctctcggtggtgttcgccggacatggcgtcatcgccttgcaggaagccggggtgatcggcacccgtccggtgccgttcttcgacttcgactggctggggatcaaggccgacgcctattcgctgtcggcccaggccatggcgctggtggccatcgcgctgctctacggacgtagccggatcgtcgagcgccggcgtgcggcggccaacgcggccgactga

SEQ ID NO: 340011 - DNA, 630 bp, Pseudomonas aeruginosa
atgctcgtcagtacctggttcgccttctttctcgcctgctgggccatcagcctgtcgccgggcgccggagccatcgcctcgatgtcctgcgggttgcagtacggctttgcgcgaggctactggaacgcgctgggcctgcagatcggcctggccctgcagatcgccatcgtcgccgccggcgtcggtgcgttgctggcgacctcggcactggctttcagcctgatcaagtggttcggcgtggcctacctggtttacctggcggtgcgccagtggcaggcgccgccacaggccttgagcaccgatggcgaacgacccctagggcgaccgttgaccctggtgctgcgtggtttcctggtcaacgccagcaatcccaaggcggtgatcttcatgctcgcggtgctgccgcagttcatcgacccgcaccagccgctgctggcgcagtacctgatcatgggcggcaccatgatcgtcgtcgacctgatcgtcatggccggctacaccggactggctgcgcgcgtgctacgcgtactgcgttcgccgcgccagcagaagctggtgaaccgtaccttcgccagcctgttcgtcggcgccgcggggctgctggcgacggtacgccgagcgccgctctga

SEQ ID NO: 340012 - DNA, 759 bp, Pseudomonas aeruginosa
atggaatggctcgccagtcctgaaatctgggtcgcgttcctgaccctgaccgccctggaaatcgtcctcggcatcgacaacatcatcttcatctcgatcctggtcgggcgcctgccgccggcccagcaaccgaaggcgcgcttcttcggcctggccctggccatgggcacgcggatcctgctgttgctctcgatcacctgggtcatgcgcctgaccaccgacctgttccacctgttcggccagggcatctccgggcgtgacctgatcctcttcttcggcggcctgttcctgctgttcaagagcaccatggagatctaccacagcctggaaggcgcggaagaagagcagaagagcggcggcaaggcccacggcttcatgggcatcatcgtccagatcgcgatcatcgacatcatcttctccctggactcggtgatcaccgccgtcggtctggtgcagaacgtgccggtgatggtcgcggcgatcgtcatctcggtcggcgtgatgatgctggcggcaggcaccatcagcgacttcatcgagaaacacccatcgctgaagatgctcgccctgtcgttcctcatcgtggtcggaaccgtgctggtggccgagtccttcgaagtgcacgtgccgaaaggctacgtctacttcgccatggccttctccctggcggtggaggcgctgaacatccgcttgcgcggggccatggcgcgcaagcgcggcgaagagccggtgaagctgcgcaagggttcgccggactga

SEQ ID NO: 340013 - DNA, 579 bp, Pseudomonas aeruginosa
atggaagacttgcaggtgttgacgcagacctggagcgggccgctggtggtggcgctgcagatcctgctcatcctgctggtcgcctggctgctccagcgcctggtccgacgcacggtgacccgtatcggcgagcgttatccggtgccgccggagctgctcctgccgctgcgtggcggcctgcgctggctgatcatggtcagcgcactgatcatggtgctggagcgcctgggcgtgtccgccgaagtgctgtggaccgcgctgaccggtttcgccgcggtggcggcggtagccttcttcgccatctggagcgtgctctccaacctgttctgtgcgttgctgatcttcaccgtcggaccgttccgcatcggcgaccgcgtggagctgatcgatagcgccgacaaaccgggcgtcaccggacgcgtggttgccatcaatctcttgtatacgacactggaagaaaccctcgaggatggctcgccgggcccgctgctgcaggttcccaacagcctgttcttccagaaagccgtgcgtcgctggcgtgggccaggtttttcaactccaacaaaaaacgggaaataa

SEQ ID NO: 340014 - DNA, 1917 bp, Pseudomonas aeruginosa
atgatccgactcctcaatcttacgctacagcgcgggccgcagcgcctcctggaagctgctgaactgaccctgcacgccggccagaaagccggtctcatcggggccaatggcgctggcaagtccagcttgttcgcgctgttgcgcggccagctcggccaggatgccggcgactgcctgttgcccgccgactggcgcatcgcgcacatgcgccaggaggtcgataccctggatcgcctggcggtggattacgtgctcgacggcgacagtcgcctgcgcgagatccaggcggcactggccgccgccgaagcggcgcacgacggttctgccctggcgcgcctgcataccgaactggacaacgccgacggttacaccgccgatgcacgggcgcgcaggctgctggccggactcggcttcagcagcgagcagatggagcgccgggtcggtgatttctccggcggttggaggatgcgcctgaacctggcgcaggcgctgatgtgcccgtccgacctgctgttgctcgacgagccgaccaaccacctcgacctggacgccatcctctggctggaagagtggctcaagggttatcccggcactctggtgctgatctcccacgaccgcgacttcctcgatgcggtggtgggccatgtggtgcatctggaaaaccgcaagctgaccctctaccgcggcggctattccgctttcgagcggacccgcgccgagcggctggctcagcaacagcaggcctacgagaaacagcaggcgcagcgtgcgcacatggaaagcttcatcgcccgcttcaaggccaaggccaccaaggcgcgccaggcgcagagccggatcaaggcgctggagcgtctcgaggaactggcgccggcacatgtcgattcgccgttcaatttcagtttccgcgagtcggacaagatctcccggccgttgctggatctcggcgaaggccgtctcggctatggcgacaaggcggtgctggagaaggtcaagctgcaactggtgcccggtgcgcggatcggcctgctcggtcccaacggcgccggcaagtcgaccctgatcaagaccctggccggggacctgcccgaattgggcggccgcctgctgcgcggcgagaacctggccatcggatacttcgcccagcaccagctcgattcgctggacccacaggccagcccgttgctgcatctgcagcgtatcgcccccggcgagcgcgaacagaccctcaaggacttccttggcggcttcgacttccgcggcgttcgggtggacgagccggtattgaacttctccggtggtgagaaagcgcgcctggccctggcgctgatcgcctggcagaagcccaacctgctgctgcttgacgagccgaccaaccacctcgacctggaaatgcgcctggccctgaccttggctctacaggagttttccggggcggtcctggtggtttcccacgaccggcacctgctcaaaagcaccaccgacgaattcctcctggtcgccgatgggcgcgtggtgccgttcgatggcgatctcgacgattacgcccgctggctggtcgactatcgcgcgcgcaaggcgccgcaggccgagaccgcgccgggcgcgccgtccgaacgcaccgacaagcgcgcccagcgccaggcagcggccgcgctgcgccagcagctggcgccgcacaagcgcgaggccgacaagctggagcgcgaactcggcggcctgcacgaaaagctagccgctatcgaggcgcggctgggcgacagcgccctgtacgacgtatcgcgaaaggacgaattgcgcgagttgctgtccgaacaatcgagcctgaaggttcgcgaaggcgagctggaggaacgttggctggaggccctggaaaccctcgaagccctgcagaaagaactggaggccagtgagtga

SEQ ID NO: 340015 - DNA, 480 bp, Pseudomonas aeruginosa
atgactggaaatgtctggaaattcgcggtggacgtctatgcccagccgggcgtggaaacggcttgcctcgcgcttcaggagcaaggtgcggacgtctgcctgttgctggtcgccgcctggcttggaaggcgcggtgtgagctgctcgaaagaacgcgcccagatcctggagaacgccgcgcgcccctggcgcgaaacggtcatcgaacccctgcgcagattgcgttgcgcctggcgcgaagcggcaacccacgatgcctgcctggccgaactccgcgaggaaatgaaggcccaggaactacgagcggaacgggaacacctgcaacgcctggccgacctggccacagcctggctggagggccaggaggcgaatcgtaatgcggatgcctggctgcaagcctgcagccgggacatctgcacggaagcagagcgccgggctttgctggtgcttggctcggcggctttgcagacagcgccttag

SEQ ID NO: 340016 - DNA, 525 bp, Pseudomonas aeruginosa
atggaatacaccttcaccttgaagtaccagcttgccgacgacgaccgcgacccagacgcgctggtcgagcgcctgggcgaggtcggctgcgacgatgccttggtcggcatcggtcagccaggtcgcctggcgctggagttcacccgcgaggcgaccgacgcggaggctgccgtgcgcagtgcgttggtggacgtgcgcagcgccgtaccgtcggccaagctgatcgaagtcgcaccggatctggtcgggctgaccgacgtggccgatatcgtgggtgtttcccggcagaacatgcgcaagctcatgctggcgcatccgggcagctttcctgcgccggtgcacgagggcagtgcgtcgatttggcacctggccgacgtactgacctggttacaggccaagggcagctattcgctggccaaggacgtgctggatgtggcgagggtagccctgcaggtcaacgtggcgaaggagggccagcggttgtcgcgatcggcgtccaaggaactgcaggctctggtcggatga

SEQ ID NO: 340017 - DNA, 939 bp, Pseudomonas aeruginosa
atggcaacggtgatggtttctccaatccattttgaggattacagcggcatccagttcgagcgtcttgtctttgcatatcacgtgcgtgcaggttggcgtgacctaatctggcgtggacaatccgggggcgaccaaggacgagacatcacgggcgttgaaccttttgatgaccagccggcccgcaagaccatcatccaatgcgcgaacagggacacactgaccttggcgaaagccaaaggcgacatgaccaaggcggtcaaggtcgcaggcgggatgcccgatgccttcaaattcgtttctcgtggcgctgtttcggacaccagccgaggcaggatcgagcaggctgctgcgtcccttggtgtggcccatgtgacgatctggtcggccgtggagttcgaggagaacctgcggcttcgcgcggagtacctgctgcaccgtttcgttcagggcatcgagtttcctgatgccgagacggacatccgcaaattcgttgacgacttccccaatctctcggatgacgatgcgctacaactgatggcagccgtattcgatcggccggcttttcgcacgccatttcaacaggaaagctccctgcctgcttttcagcaggcgattgaggacaccatcggcgcattgaacactggagtatggcggactcgggaaggggacgagatcaggcgcattccgtcgattcaccatcttcgagatcaacgcatccggactgtgttggaaaaagtcgttcgtcaggtcgacgagctgcgacgtgtctttgtgacccgtcttaaggaaggagagatcaggcactgcgagtgtggacagccggattgccctacatacatgctcacgcatcgagttgccgatgaactggaccaagccagagagaaaaccctggcgacatttcgatcggtgtacctgtccttcaatgtgagtcttcgatag

SEQ ID NO: 340018 - DNA, 396 bp, Pseudomonas aeruginosa
atggtgcatgcggaagtgctgaactactgccgcgcggagttgctagacgagaattacttccatgcggtgttcgaggcaacgaagggcgttgcacagcggattcgccagctgtcaggtctgaacggcgatggcgctgagctggtgaacaaggcattcgcaggccagcagcccatcctggccttggggccgctcaccacggagtccgagaagagcgagcagaaaggctttgccaacttgttgatcggtctgttcggggccgtgcgcaatccgcttgcccatgcacccaagacgaactggcctatgtccgaacaagacgcactggacatcttgaccctggtatcgctaattcatcgcaagctggatggtgccgtgaaagcagttggtatctcgccataa

SEQ ID NO: 340019 - DNA, 1560 bp, Pseudomonas aeruginosa
atgtcctcaatgttggataggttctacgagcagtccgctcgactgaacaccttactgaacagcaacccagccgaggcggtgaaacaggccagggagatcaatctcgatctcgctactaatgagcgattcaatatgatggggctgcgcgccgccatcctggtagatggcggcgcattgactcaacaacaggatgcgattgaagaaggaatcacgctgtttcgtgaactccacgccctatttccaactgctgatctcacctacaacctagcaaacggcctggtcgccgcgataggcttcccacctcgtaacgacagttggttggaccatctggaatcgtctaaagagcttcgcgcagaagcgcgaagatgcttctggaaggtcgcgcagaacacggatgccgattttgcgctgcgaactcaggcttggacaaatcttgccaatcagttcagcagcagctatcggcttggcgaagctcaagatggttggcttgcagcgctagaaatcgatccagaaaacggggttgctgcaagttccgcggcccgcaatctcctatggctttatgcgcgcggcggctgctcagaacttacacgcaccgaggcgatcatgttggccaagattgcggatcggcatcgggatcgagtcatccaatatgctggcgaacaggccgcagaacagatcgctgcgttcgcaagcgaattgggagatccaccaccgcgatcacaacatcaagatccattcatcagttgggtcgagcgtgagcgcctaacgcttgcgccagccgtggaactcgtcgaccccaccatgggcaagctggactggctcatgcttcccgggattctggagcgagaatcaggtgccggcgggacaccaccgcccgtcttcgccatgttcaacgtgctgaagagcgacttcatcctcgcgcgtgacttgctatggcgggctatggacgaagacgtgtggccaacgacggggcgatttggggacactcttgactacgccacctatggcccggatgcgtctgcacttatcttggcacaccgcacggctctcgatctgctcgacaagatcgccgtaacagcgaaccattactttgagcttgggcaatcgccagacaaggtttacttcggaaaattgtggcgaggaaagcctgacaagaccactggcgtgtccccacttgccgagaaggtggagaaggcaattcgcgggggcgtcagcgctctctatggccttgtggagcttgccgaggactatgacagcagcgtgggcatcttgcgttctcaaaaagaccttcgcaacgccggcacgcatcgattcgtggtacttcatgacattggcgacccaacgcaaagcagacaggcgcctgaaatcgaacatcaccgaagggaaccgttcactcaggaagtattgcgcgctttgcgtgttgccaggtcggccatccaaatgcttgcgctttcgatctcgcagcacgaacagggcctagcacagaggacaagtggccttgttggctcactgatcatccccgatcacgactggattcgtggacgcgacgacgatacttga

SEQ ID NO: 340020 - DNA, 783 bp, Pseudomonas aeruginosa
atgatcggacaaagaactcgctattcgttcgcccaattcctggagctgcaggagccgatgacttcaatcgtgcttttgggcaagtacggtgtccagcatctatcactttcacaagggcaactgttgtacgggttgctgaacacgctacgcgccctcgatgaccgcacgctgatgctggtgttggcggaggttgttgcgacttcgggcgatctgcgcgccagagtcaatccgaagtatcgattcgacgagcgccagcacgatctggcgcaatgcctcctgctggatggctacatcatccaggacagaaagctcatccaaaccgatccgtcgatttcagatgcggcccccttggaggatgatctgatcattgcgctacagaattccggagctcctcgtgcgcaagagatcatcgccaagatcaacgattcggctggcgcgtttcgggcagcaccgcccgactacaacgcgtcgcttgtgaacgcccgggtggcgctggagactttggccggcgacatagctgcgcacgttgcctcgcaggggcaggctccagccacctacaacccatcgaagtggggcgaggtgcttgcgttcctgcgcattagcggtgagatcacgacagaggaggaaaaaggcttggctggtgttttcggttttctcagcccaggcgctcaccgcccggtgggaatccccgaagatcagatgactcggcttggccgctcctttgcactcaacatgtgctggttcttactcaagaaccatctcgtgcgtacatcacaaacttga

SEQ ID NO: 340021 - DNA, 1722 bp, Pseudomonas aeruginosa
gtgattcaccacatcttcagcacgctacccagcttcaagaatctcggagaactgaagcccggcctgaacgtactgctggcccaaaagaccgaaggggcaactaccaagcaaacgcgcaatcgcgccggaaaaactagtttcattgagctagtgcattttctgctcggcgccgatgctggcccggagtcgatttttcgcacaccggagctggtggaacagaccttcggcatggattttgatttgaagtcggagcgtacggtcgtcgagcgcagcggcggctccaaagccaaaatctttgtgacggctccgcctgccgggaaggtcaagttctcggccaccgagtggtgtacgttcctgggcgaacagatgtttggcctcagcagccttgaaaccgcaggcagcaagccaccctctttccggtcgctgtttgcctattttgtacgccgacaggcaagcggagccttcacaacgccggaaaagcaggccgcgatgcagggaactggcgacgtgcagatggcgctgatgttcctgctcggactggactggcagattgcccgagattggcaagccgtgcgcgatcgggaaaagaccctcgaagagttgaagaaggcggctgggaacggtgccttcggttcaatcatcggcaaggccgccgacttgcgtacggagctaaccattcaggaagctcgtctcaagaaacttcatgtggaagtcgaatcttttcaggtcttgccggagtaccgggagttggaagtcgaaagcgccagcttgacccgccagctcaacgaactggccaacgccaataccatcgacttctctgctattcgcgacttggaaggcgcgctggcctctgaggttccgccagaccatgaagatcttcaggcggtctatcaggaagcaggcgtcgtactaccgggcctggtcaagcgtcgctacgaggatgttaaaagcttccacgactcagtggttcgcaatcgtaaagactatctgtccagtgaactcgaagctgcgaggctgcgaatcgaactgcgagacagtaagaaggcgcaactcgatcagcggcgcggcgagattcttggcattctcaagagtcatggcgcactcgaacagttcctcaagctgcagggcgaactggggcggctggagtctgaagtggaatcgctgcgacaacgctttgaggctgcggagcagctcgaaggcacaaagaacgaattggaaatcgagcgcaaccggctcacgatccgcttgcggcgcgactttacggaacagaaggaccgactcgcggaggccatcgtcgccttcgaggagacatctcaacgactgtatgagtcagccggcagcatgacggtcgatgagacctcgaatggtccgatcttcaaatttccgatgcaagggcagcgcagcaagggtatcaagaacatgcagatattctgcttcgacatgatgctcatgcgactgtgcgccggccgaaagatcgggcctgggttcttgatccatgacagccatctattcgatggcgtcgacggccgccaggtcatcagtgctttgcgcctaggctcggagatcgcgcaggagcttggttttcaatacatcgttacgatgaatgaagacgatgccttcaaggagaccatcgagggcttcgatctaaacgactatgtacttccgacgcggctgacagacgcaacggaggatggcgggctgtttggcatccgatttggatga

SEQ ID NO: 340022 - DNA, 249 bp, Pseudomonas aeruginosa
atgattctgccctccaagcatctaccgcaggatcgcgcgctactgaccgtcggcgcgcatgtgctgacgttcctcgcacgccctaagaccgtctccgcgctttgggaggacttgaacaggcatgacgctgggccggccgcaatgcctcgacgaatcacctatgactggtttctgctagccctcgacctcctctatgccctgggaaccatcgaactcgaaagtggactggtggcaaggaggacagcgtga

SEQ ID NO: 340023 - DNA, 972 bp, Pseudomonas aeruginosa
atgagcttctgcctgaacaactccaaaaatattaaggctagagcccaaggcatggatcgcatacagcagctcaactacgaaaaggactttcgcatcgccttcttggaatccaagggggatgggtttcaacgtctgttcgagaaactgatgtcgaaggtgcaccccaacgacttcatggcgtgccggccctggggcaatgttggagaccgaaagaacgacggatatctgccttctgagcgaatcctgtaccagagctatgcccccaatgagctgaccgcagccgaagccattaagaaggtcaacgaggacttcgacggagccaaagaacattgggaagaacatttcgatgaatggacctttgttcataacgctcctgatgggcgtttaggtcctcacatcatcgaagccctggccaaactcggccaagacaacccgaaaatcaaaatcggacactgtgggtacgaggagatgttggcgaagttccgtcagctgagccttgaggaccttgagtcgtggtttggtccatcgcttacgatggaagcgaacgtcaatctaggtttcagcgacctcgccgcggtgcttacccatatcagcatcaccccagcccccacgacgagtgaggtaaaggacgtgtctcgcggaaagatcgaggcgaacctcctatctcaggctgttgccgacttcctgaaaatcggcatgcagaagtcgccgctggttgcacaattcttcaataattggaagaaccctacttacggcgaacagatcgcgcaggcgttcaagcgcgaatatgtgcgactgcgggacagcgttccaccgctccatcctgatgaaatattcggccgcctagaaacatgggctggcggaacggtgaatactacacccgcccacaaggcggcggttttggcggtgatggcatatctattcgacaagtgcgagatctttgaagatgctcaagcactgggggcggcatga

SEQ ID NO: 340024 - DNA, 195 bp, Pseudomonas aeruginosa
atggccaacagcagtgatgtcgtgcgcgcccgaattgatgggcatatcaaagaggaagccacgagcgtgttggctggcatgggcttatccgtctcggacgccattcgtgttctgctcacgcgcattgcagccgacaaggcacttcctttcgatatcaatcgtgcccaagcccagcccgaaaccaagaagcgatga

SEQ ID NO: 340025 - DNA, 252 bp, Pseudomonas aeruginosa
atggctaacatcggcaccttcaccgtagtgaacgacggcttcaccggcacgctgcgcaccttgacgctcaacgtcaaggtcaagctggttcccaacgacaagagcgacagcgagaacgccccgacctccgcctccaggcggcggggcacgacatcggcgcggcgtggaagaaagtcagcgaggccaagcgagagtacctgtccgcgaccctcgacgatccttcgttcccagcagcggtgtatgcccgcttga

SEQ ID NO: 340026 - DNA, 1782 bp, Pseudomonas aeruginosa
atgacacttcttcaaaacgaccccatcactcagcttgccttttccgtctacgagaacaaaggagtcttcgcggttcttctggggtcgggcctgtcgcgttctgcggagatccccactggctgggaaatcactttggatctggtgcgccgtgttgcagcagctcaaggcatcgaggaacagtccgattgggcgcagtggtatcgggacacgacaggccaggagcccaactattccgtgctgctggaagagattgctacttcacccgatgaacggagggcaatcctgcatcgctacatagaaccggacgcgcaggaccgcgaggaaggccgcaaggttcccacgaaggcacaccacgcgatagcgcaactggttcgctccggccacatacgggtcatcatcaccaccaattttgaccggctcatggagaatgcgctgcgtgagcaaggagtcgagccgacagtcgtagcttctgcggacgcacttgctggcgcggagccgctgactcatagccgctgttatcttctcaagctacatggcgactataaggacgcgcgcatcctgaacaccgaccaggaactgagcacctaccctgaaagctatgacaggctgctggacagaattcttgatgagcatgggttgatcattagcggctggtcaggcgaatgggatcatgccttgcgtgccgcatttctacgcacaccgaaccgacgctattccgtctattggaccgctcgcggatcgctaggaaccggagccagcgaactggtggcacatcgcagtgccaagacaataccaatctcgagtgctgacgaattcttcgagacattgcagcaacgtgtagagacccttgaacagagccaacgccagaatcccttaagcgttgaactgctcgtcaacagcgctaaacgctacctcgccaagccagaataccgcatacagctagacgagctgttttcgcaagaaacagaacggttgctaacgaggctcgatgacaatcaattcgcgccacatgggcaatggaaccaggaagagtttcggtccagggtacagcgatatgaggctctgacagagccactcgctcgcatggccggtgtactcggacgatggggagatggtgccgagctgccattgatgcttgacatattaaagggcatctatcgtcaagcagaaaagatcggaaatggcctcaccgtctggctaggacttcgctcctatcccgccgttctggtgttcaccgcctatggaattggactgacgcgctcgcaacgctggaacacgcttcatgatcttctagttgccccctggccgagggaataccatgaaccccgaagagtggtatccgtgctgttcctatgggcatggaagggagaacaacaggacgtctggaagcagttggacggttttgatcgccgaaagactgccctcagcgatcacctgcatgatgtcatgtcggcttggcgagccagctttgctggtgtttcatctgattttgaactgacgtttgagcgatttgaaatactggcggccctggcattccttgaggaaaacgaggaagcgagcttggaacaagcagttgccagcaccccacatgggctcttcgccagaatgccagtcggacgcgcgggatggcatgagtcttctgccacagggctcattcatgagcttcagtcagaggcgacgattctcgccctgctcaacgctggtttcgcaaaaaacagtcgccgctttcttgagctttttgtggaaagcttcaagcgttacgccaacaagatgtcgtggtga

SEQ ID NO: 340027 - DNA, 189 bp, Pseudomonas aeruginosa
atgagttcgctggagcgcggccagaaaagcccgaccatgcacaaactgaccgagttgtgcgaggtcatggaagtgcatccactcgcgctgctgacactggcctatgccggcaacaattcaaccgagatcgatcgattgctggcgcaggtccggcaggagcttgagctattgaaaaggacttccaattaa

SEQ ID NO: 340028 - DNA, 351 bp, Pseudomonas aeruginosa
atgacccagccgctgaccacgcttgaggagcgcgcgcaactgctcgccaacggcgcggcacgcgccgctggccagacctttgatccgctaccggtggtgcggcttttcacgccggatgcgtacgcgatctggctgctggccgcgctcgacccggccgatcgcgacaccgcgtggggattgatcggcctcggcatcgggatgccggcgctggggacggtgaagctgtccgacttggccagcatcgtcgggccgcctcagcggtccgtcctgcgcgatcagtatttccgcgcagcacggccgctatcggagtatgtacagcttgggcagcgcgatggctcgattcccgactaa

SEQ ID NO: 340029 - DNA, 600 bp, Pseudomonas aeruginosa
atgactgccccaagcagcacggccagcaccacaggcaccgcgacgcgtcctcgctcgcgcctgcgcgctcgcatcgtcgtggcgacactggccgcgatcggcttcgctgcgatggccttggcggctttcgtgtcgccgctgccgcgcctgacctacaacccgtccgacagcgtggcggtcggctggtatcgcatcgacccgttcgatccgcgcaccgcctcactgccacgtccgttgcccgtggacagcatcgtgctggtgccgctgccggccagggccgccttgctggctgcacagcgcggctacctgccgacccgcgtgccgctgcttaaacgtgtgggcgcagtcgcgccgcaacacgtctgcatcgttgccggtcaggtacggattgacggcgtgccatcggccgccgttcttccgaacgaccggttgggtcggccgctgccgtccttgcagctttgccgccgtctcgaaccgggcgaactgttcctgttgagcatgaccaatccggcatcgttcgacagccggtatttcggcccggtcagcgcatctgccgtgatcggcgtcgcgcgcccgatctggctggagtcacgcccatga

SEQ ID NO: 340030 - DNA, 639 bp, Pseudomonas aeruginosa
atgggcaagatgctgttcgcgctcttgttttgcttctcggcgagcatgctctacgtcgcaatcatccggcgcataaagttcaagaacacggtattggttcccgtcgtggggttgatgtacggcagcgtcttgagtgccgtcgcggagttttatgcctatcgccacaatattgtgcagagcatgcaaggctggctattgggtgatttctcaaagatcatccaaggcaattacgagatcatctatttaatcctccccatcgttgcgctcacctacctgttcgcacatcgtttcactgtaatggggatgggggaagacgcagcaaccagcttgggcttgagctattcgcggactgcggcattgggcttgctgctggtggccgtcaccgtctctgcctgcgtcattgccgtaggggccattcccttcgtcggtttggtgatccccaacctggtggcgctgcgctgtggagagaacctacgccgaaccctgcctatcgtggctctggcgggtgcgtcacttctgcttgtgtgcgacatcgttggccgtcttctgatctttccgtttgaagtgccgatcggcatgacggcaggcagcctgggcggcttgctgttccttgtgctcctgctggggaaactcaaatga

SEQ ID NO: 340031 - DNA, 951 bp, Pseudomonas aeruginosa
atgatgcgcatggccaacaggtacgggctttggacgctggtcatcgcggctgcgttgatcttcatttttgtgcaatcgggtttcgatttcggctatgtcatccctaagcggctgaaccgcttggcgaccatcgtgatcggtggcatctgtgtcgcggtttcctcgatcatatttcagaccatcgcaggcaaccgaatactcacccccgctgtaatgggatacgaagcggtttacctgcttcttcaatcgttgctgatgctgatcgtgggcgggcatgggttgatcgccattggccgcaacgagggcttctttctatcgatcgccttcatgttggcttattcgtgggtcgtccatcgctatttgttcagagatggcaagcgcaacgtgtactacctgttattgcttggtctggtgctgaccatggtgttcagcacgattatccagttcgtccagctcaagatcagcccgggggacttcggcatcgtccaagggtttatctacgcgtcgttcaacagggcgcggccagagcaactggtctatgcgggggttctggtggccgcgatagccattgtgttggccaagacgcttccttctttggacgttctagcgcttgggcgcgagcaatccgcgtcactgggattggactacaagcggagcgtgaggctctacctggccctcactgccgctctggtggccatctccaccagcctgattgggccgacagcctttatggggatcttcgtcgccaacattacgtactcgttgaccagatcgacatggcatcgcctgacgctaccaaccggatgcgcggtcgcgatcggaattttcatagtcgcccaactcctggtcgagcacgttttcaattacacaaccaccgtcagcatcctcgtcaaccttgtttgcggggcctacttcctcatgctgacggtgcgtacgcgaggtggcgcatga

SEQ ID NO: 340032 - DNA, 777 bp, Pseudomonas aeruginosa
atgatcgcgacagaaggcctttgcaaggcatacaacggcaactgggtgctgtccaaagtcagcacccagtttcctgcaggaaaactgacctctcttattggcccgaacggcgcagggaaaagcaccctgttgatgctggtcgcccgtctgctggagcccaccagtggcgcaattaggatcggcgataggcctgtgtcagatttccgcccgcgggactatgcaacacgtgtcgctacgctgcgtcaggcacctgatatcaaccttcgcctgacagtcgaagagctggtggctttcgggcgttttccctatacccgcggctcactcgatgcccgtgaccacagcgagatcgaccaagccttggcctttctctctcttgatgggttgagagagcgctacatcgatgaactcagtggcggccaacgtcagatggcgttcttggcgatgacgattgcacagcagaccgactgcctgctgctcgatgagccgctcaacaacctggacatgaagcattccgtacagatcatgcaggcccttcgccgtctgtgtgacgaacgcggccgcacggtggtgatggtggttcatgacatcaatttcgctgccaactattcggaccacatcgtggcgatgaagtccgggtccgtttgcttcagcggccgggttgccgaggtcatttcagaggacagactacgagaactgttcgagttggatttcgaaatcacgcgtaccgctcgtgggtgcgtgtgcaattacttcaaaccatcaggagaatctagatga

SEQ ID NO: 340033 - DNA, 1008 bp, Pseudomonas aeruginosa
atgaagtggaacaaaggtaaggaacgatgggcgacagctctgctcttgcttttggttgccgcgttgcagggctgcgatcagaagcacgagcaatcggcgcacggggaagcgccggctgtgacagcccagcaacaggtggttgctgatacagactccataacggtcgtgcacgaattgggtactgccattctcaagtccaggccgacgcgcgtggttccctacgacatgagcgtgctcgactccctcgaccagcttggcattccgatcgtcggcatgcctaaggactatgttcctcgcttcctctcgaagtatcaggacaacccggcgatccaggatgtgggttcggtgttgcagccgaatttcgagcaactccatgcggtgaagcctgacctggtgttgatttctcctttggaagcaggcagctatcaggagctttcgcagatcgcgccaacgatctacttcgatgtggattacatgaatcaacacggcgactacatcgggggcgtcaagaagcaactcatgacgttggggcatgtgttcggggtggaagaccaggcgcgcaagaagagtcttgaaatcgatcagaaggttgaagaggcacgcgccacaatcaatggtcgtcccgagaaggcactcatcgtgatgcacaacaacggtgccttcactgcctttggcattcaatcccgatacggattcatcttcgacaccctcggtgtcaagcctgccagccagcacatcgaacctggactgcatggtcagccgatctcgaacgagttcattcacgatgctgatcccgacatcctctacgtcgtcgatcggaccgccgctcacgaccgcaagccggtggatcccaaggcgctcgacaatccgctgttgcggcagacaaaggcatggaagaccggccatgtggtcttcgtgaatccggatgtttggtatctcaccggcgccggtgtcacttcgctggaaatgctcatcgatgaggtcctgaagggatactccggcggttag

SEQ ID NO: 340034 - DNA, 2241 bp, Pseudomonas aeruginosa
atggctattcatcgccaggggcccgcttgcgcccggaaaaagtaccgaaaccaaatgacgtggctctgcgcgttgttcctaccgaccgtgctgcctgcatatgccgggcccatggaagcggaggagcccgcctcggcatcgtcgcagtccaaggaggacggcagaggtgtcgcggtcttgcccgctgtgacggtctccgcgcagagaccaggctccgacaccgaaggaactggctcatacaccaccggcacaacgagagcggcgaccgggctgagcctttcgccaagagaaaccccgcagtcggttaccgtcgtgacgcgccaacgcatggacgatcaacaactgaattcaatcaaagacgtgttggagaatacgaccgggatcagctccaccacattggacacggagcgcgtttcttactattcgcgtggtttcagtatcgacagcttccagtacgatggcgtgcccacgacatacattcccggatcgttcctgccaggtgagggagtgctggacacggccttttacgatcgggtcgaggtggtacgtggcgccactggtctgctgcaaggggtcggcgatccgtcagcctcggtcaacctcgttcgcaagcggcctttgcgtgagttctctctgactggttcgctgggggctggttcttgggacaactatcgtggaatgctggacgtatccacgccgcttacctccaccggcaatgtccgcgcgcggatggtgggtgcctatcaggatcgcaattccttcctcgactattaccagcagcgccggcaggccttctacggtgtggtcgaggcagatctgacgtcgagcacgaccctgagcctgggccacgaataccaggacagcgatcccaaggggattacctggggtggccagccgctgttctattccgatggttcgcgcaccgattggtcccggaccaagaacactgcgccgcgttggagccattggggcaatcggattaatacgaccttcacgcgcttggaacatgagttcgataacggatggagcgttcgcgccaacgcggagcaccgacgtgtggacagctcaagcgagctgttctcgatgaatggctatccagatcgcgcctcaggggaaggcttgtggccgattgccctgggaggccgcagcaatagccggcagaacaattttgatgttatggcctctggaccgtttgcgttgttcgggcgtgatcacgaactgatggtaggtgcgtcaacgtcccggctccgtgcacatgacaactctgctttcatcttcccgacggaccctatcggtagcatctacgactggagtggaaactatccaaagccggatttcgccagcttcccgcacgacgcatccagtacgactatcaagcagagcggcctctatagcgcggcccgcttctcgttggctgatccgctcaagctgattgtcggtgctcggctgagcaactatgaaatggagcgggacagcagcaggggggagccatttcactataagaaggacaacaagctgatcccgtacgcggggctggtctatgacattgacgacacgtactcggcatacgtcagctatacggaaatcttcaagccacaaaccgaccgtgaccgcaacgacaaggtgttggggccgaccaagggcaagaacacggaagtcggcatcaagggggattatctggacggtcgcctgaacgcgtccatcgcgatgtttgaagctcgccttgacggggtgccgcagatcgacagcggccatttgctgcccgacggctctcaagcgtattacgccgccaacggcaccaaatcgcgaggattcgacatcgatgtccagggcgagatcatgcgtgattggaacctttacgcgggcatttctcatttcactgcatcgcaaggcgacggccagcgcttgagcacgcagatccctcgaacgacggcgcgcctgttcaccacttaccggctgccgggtgactggaatcgcttgacgatcggcggtggcgtgaactggcagagccgcttttatgggacggcgacgggacctcaaggggaagtccaagttggtcaggcttcttatgcgcttgccacggtgatggcacgctacgacgtctcgaaaagcaccagcatcacggcaaacatcaacaacctgttcgatcgcaagtactacacgatgaccggcttctacaaccactatctgtatggcgaacctcgcaacttcatggtgaatatgacgtacaagttcgagtga

SEQ ID NO: 340035 - DNA, 579 bp, Pseudomonas aeruginosa
atgccccacagtgttcgcgccaccgcaaacgcacggatttgttacctcttcgtgcaaccaggtgcagcgcaattgccggaccaatgctgcacgctctccatcactcccctggtgcgcgagttggtgctgcacatggctgaccaggctcccgaataccttccaaacagccgagtgggacgcaaggccgtcgtgcttctggaggaactcgcacaaatgccggtcgagcagctatacctgccaacatcgagcgaaccgcggatgcgcaaaatcgcgaagatgctctcggacgatccggcggatcgaaggacacttgccgattgggccaagctggtcgccatgagcgaacgctcgctagcccgcctcgtccaacaggagacaggcctgacgttcggccgctggcgtcagcaactgcacttgatcgttgccatgcgccagctttcctccgggcagacggtgcagcgagtagcggaccaattgggctacgactcggtcaccgccttcattaccatgttcaagaaggcggtcggaaagccccctgcgcgctacttcgccgatatcacgcaagccgacgagcaatag

SEQ ID NO: 340036 - DNA, 1206 bp, Pseudomonas aeruginosa
atgagtaatcgtgatgcagccttggcggttgcccgaccagctttgctgatagcagggctccttttgatcgcgacgaacctgcgtgcgccaattacgggcgttgctcccgttctggagacactgcagtcggcgtttgcgctgtcgcccgcgcaagcggggctcttgacgacgctaccgttgctagcgttcggcatcatttccccatttgccgcgatgttcgcgagggagtacggcctggagcgttcactgttcggggcgctgctactgatcgctgccggcgtggtcgttcgatctattggatctgtgtggaccctgtatctgggcacggccaccatcggtgccggcattgccgtgggcaatgtactgctcccaagtttggtcaaacgcgatttcccggcgaaagtgcccaccatcatgggggtctgctccattgcaattggcggcgcagccgcgttggcatccgccagtgccgttccactgggaaatgcattcggatggcaaggtgcgcttggcgccacggctgtctttccgctggctgccgccctggtgtggaccagccaactgagcggtcataccgcgccggccaagggaaccgcatcggctcctcatggtggacgggtatggcattccccgttggcgtggcaggtcaccttgttcatgggcatcaattcactggtgtactacgtcctggtcgcgtggctaccgtccgttcttacttcctcgggaattgctccagaggtcgccggctcgcttcacggcgtcatgcaacttgcttcagccgtgcctggtctcttgcttggccccattgtcagtcgcatgcgggatcaaaggctggtcgctgccaccatgggcgggttgatgaccgcggcccttctcggattttgcgtggcgccgtcctgggcctccttgtgggcgttctgcttcggtctgggctccggcggcggcgtattgctggcgctgatgttcatgggcctgcgggctaacagcgcccatcaggccgcttcgctttcaggcatggcccagtgtgttggctactttctggctgcatgcggtccggcgcttgcgggaaagttccacgaccttaccggtagctggaccgccgtgctgtacatcggcgcggtcctctcgatcgtcatggtgatctttggtttgctcgcaggtcgttctcgaacgatcgggggtgagcatccgaccgttcgtcattga

SEQ ID NO: 340037 - DNA, 414 bp, Pseudomonas aeruginosa
atgaaccttaaccctcaggacttcctggtgcatgacattagccaccatccaatggtcgtcttcaggaacgactctgcaagacctggctacgcaaagcaatgggaggtggaaactgtttctcttattgggcaaggggcccccttcgtcattgtgtatgaccagcttcggggcgatgaagatcacgaggatcgcaagcatagggcactttggctcaagcagaacaaggcagacatgagccgtgtgtgcaaaggattcatcagcattgagcctgaccctgtgcgccgagaggaggcaaggcagatgggggcgatgctggcaaaagcattcggcatccaacatgagggagtcgaaacgtgggaggaagctcgaaagcttgtccacttctggatctccgagccatgcttaggtagttag

SEQ ID NO: 340038 - DNA, 279 bp, Pseudomonas aeruginosa
atgagaaagatcatcccatacttgctgatggccgtgttgaccgcctgcggccaatccgaggcaccgcagaaagccgccgattcggtgggaaacatcccaacggtggaagaactggcagccaatcccgaacggctcaaagagttgcgtcagcaatgcaagaccgatcgccccaagctgggcgacatgctctgtaaccgagtggccgaagccacgcgcaagcgattctatggcgatggcaaggtgccttatacgccaccggagaatccgcccaagctctga

SEQ ID NO: 340039 - DNA, 465 bp, Pseudomonas aeruginosa
atgagccaataccgcctcaatctgttcatccagcccgagcacgccaagcgcctcgaagaactggccgccaagaaaggcgtgtccaagtcgtccatcgtcgcggcggcgctcgcgtcctggctgtcgcccgatgccggcgaccagcgcgaggcggccattgccaagcggctggatcgcctgtcgcggcaggccgagcgcatggagcgcgaccagaacatccagatcgaaacgctggcgctgttcatccgctacttcctgaccgtcagcacgccagttcccgaggcccatcaggacgcggcacgcgcccatggccgggcgcgcttcgagcagttcgttgaacagttgggccgccacctgctgcgcggccgcagcctggtgcgggacgtggtggaggaactgcatcccgatccggtgcgaatggatgacgcggcggcgctggctgaagcgcaggagcgtgcgtcatga

SEQ ID NO: 340040 - DNA, 393 bp, Pseudomonas aeruginosa
atgacgcagatgcacgcttacgctttccgcttttccgtaaatccgcttccccatctgtccagcctcgcgcagctgcgcagcctggcccgccctgcgggacaaggactgctgctggccgcgctgctgctgttcctggccggaacggcgcaggccgccggttcctcaatgccgtgggaaggcccgctgcaatccattctggagtcgattcaggggccggtggcgcgcatcgtcgcggtcatcatcatcatcgccacgggcctggcgctcgccttcggcgacacgtcgggcggctttcgcaaactcatccagatcgtcttcggattgagtatcgcgttcgccgcgtcctcgttcttcctgtcgttcttcagcttctccggcggggcggtcgtatga

SEQ ID NO: 340041 - DNA, 339 bp, Pseudomonas aeruginosa
atgcgatgcgttcctgtcctgctggccgtgctgctgaccgcgcgcggccagtcgtctgaccagcaaagggccgaagacctggctgccaccttggccaccgatcccgtgcggctcaaggcactgcgcgcccaatgcgcaatcgacctgcaagccatgggcgaagacgcctgccgcgccgccgccgaagccttccggcggcggttcttctccggccagaccgggcctgacgagtaccggacgcttgccgaactgccgccgatcccggcgagcttcgacacgcccgccgacgacacgccggaaggcgatgcgccgctcgccgctaaggaggacgggccatga

SEQ ID NO: 340042 - DNA, 1260 bp, Pseudomonas aeruginosa
gtgggtggagagcgcgccgcaggacgcggcatagaggcggagctagcgaagcactccggagtagaagtgcatggcaacagcattcgcatcgtgttcatgtggcagaaacgacgctaccgcgaaaccctcggtctccccatcaccaaagccaatatcaagcacgccgcccagctccgggcggcggtgctccacgacataaagatggggacattcgactacgcccggcattttccaaactcgcggcgcgctggcaatcacagcagcagccgcgacgagcggctgcacgtattgcttgatcgctacaaaccgctcaaggcggtggatatcacagaagagaccgagcgtcgttacaacttggcgctcgatatctgcattggcatgctgggcagggaccgcctggccagcgctctacggcccgaggatattcaaaagctgcgcgtagaattgatcgaggagcgagccatatcgacggtcaaccactatctcgctactctcgccggcttcctgaactggtgcgagacaaatagctactgccgagaggggcttgcaagcgcttgtatccgttttgaaatgaccgagcgtgaccccgatccgttggccaaggatgaactcgacgctctattaaccaagggctgcctacatccaatggatagagccgctgtaacccttgcggtatataccgggctgcggcctggcgaactgggggcgcttgcccgggaagacatcgatcttgcgaaagggcagattttggtgaggcgcgccattactagcactggcgctttcaagctaccgaaaaccggcaggaaacgaacagtactcttgctccctcccgcactagaagcatgccggcagctactctccactgagtcatgcgttccacagcagacgatcacggttcagctcaaccgccacgaatcgatacaggaagtagtcacaccactgatctctccggccgttcaagccaggagaaggaatgtgaacccttggttcgtgcccacatcctggaactcgaagtgggcgaacatacagcgccgggcaggtatccgccctcggcgcccataccagactcgtcatacctacgcctgctggtgcctaattgcaggtggcaaccttgcatttatcgccaagcagatgggccataaagacttcaccatgctggttcaagtgtacgcaaaatggatggacgacgagtcacccaatgaactccaacgcatttggaaaggaatgcaggggctcagaaagcaaaggacaggacattaa

SEQ ID NO: 340043 - DNA, 213 bp, Pseudomonas aeruginosa
atgaccacccactttctcggaatgccacgctgggtactgattaagcgagccgcagaacttaccggctactccaaggatgcaatcacccacaaggtcaagaacggtacttggccacaggggagaatctggagaaaggcacgcgacggccgcatattcatcaacatagaggaggtcgacaggtgggtggagagcgcgccgcaggacgcggcatag

SEQ ID NO: 340044 - DNA, 309 bp, Pseudomonas aeruginosa
atgaaacgcaacccgaccacaaagcaggcagtgcaatccgcgcttgcatacctactgcggcagacccttcgaatagcacgcgaagcggaaagcgactattccatcgacgatgcccaagggcgcgctcgcggagcaatctatctggcctatcacagcgacgcgatcaccgccgccgctttcgacgcactgatcagcctcgtacaaaacgcgacgcatgagcgccgtacagaactgatctacggccaacctccatacaccggcgcgaaattcgccaagactctccgcgacactgcacaggttgctgcatga

SEQ ID NO: 340045 - DNA, 369 bp, Pseudomonas aeruginosa
gtgatctcgtcccgtgttgtctcggtcgcgctgggctgcctgctactggtcggcctcggcgccgccggcggtgtctggctcggcgcgcggcactaccggccgcagctcgatgctgcgctggcggatctggtcgcctgccgcgccgccaggggaggcctggaggacgcagtggcggagcaggtccggcaggtcgccgcgctgcgtcaggctggcgaacagcggtcccgggatgccgcgcaggcgatggggcggggccggcagcaggccgccgagcagtatgccgcggcacaacacctgctgagccagcggaccgccggcgagcagtgcgcggctgccgatgcggtcattgatcaggagctgggtctatga

SEQ ID NO: 340046 - DNA, 804 bp, Pseudomonas aeruginosa
atgaccagtcctgttttcccctggatgggcggaaagcggcgccttgccgaccgtctcatccctctcttcccgccccatgaatgctatgtcgaggccttcgccggtggtgcggcgttgtattttctgcgtccagttcctgctcagactgaggtgctgaacgacttgaacggcgatgtcgtgtgcctctatcgggtggtgaagcatcacctcgaggagttcgtgcgccagttcaagtgggcgatctcgtcgcgtcaggtattcgagtggcagaagatgacacgaccagagacgttgaccgacattcagagggccgctcgtttcttctacctgcagcaccatgctttcggcggtaaggtcagcgggcaaacgttcggcaccgcgacaacaggcccggccgtcaacctcctgcgcatcgaggaaaacctgtcagctgcatggcagcggctggcgggaacctatgttgagaatctgccgtggcttgagtgcgttgagcgctacgatcgcccgcacacctttcattacatggatccgccgtactggcagaccgagggctacggcgtggacttcccgttcgaagagtacgagcggatggccgacttcatgcgccgctgcaaggggaaggtaatggtcagcatcaatgaccatccagatatccgccgggtgttcgaaggcttccatatggagcgcctggatatccgctacagcaacaccaaccagcggcaaggcttggctgaggtcactggcgagttggtgatcatgaactgggagcctgccactctcggcggtttgttcgtcgggatgtag

SEQ ID NO: 340047 - DNA, 450 bp, Pseudomonas aeruginosa
gtggaggttttctccaagctgttcctggagaagccagcagttctctggctcagtgaatcgagcaacaaggtcgccatgcaagacctgcgtatggcttcgagtattggcctcgacatcgaggcgcaaaagaacctgcctgacttaattctggtggacctcgggccgagcaatcccttgattgtctttatcgaggttgtggccaccgatggtgcgatcacggcacggcgccagagtgccctgttcgagctaacggacaaaggcggcttcaagcgctcgcaagtggcttttgtcactgcctatgcagaccgagaatcagccggcttcaagaagaccgtcactggcttggcttggggttcgttcgcctggttcatgagcgagcccgacaaggttttcatgctgcgagatggaaccagtcagctgtctagcctgaatcaactgcttactgattag

SEQ ID NO: 340048 - DNA, 255 bp, Pseudomonas aeruginosa
atgaatacctatctcatcgacccccgcaaaaacaacgacaactccggcgagcgcttcacggttgacgctgtcgacattacagccgccgcgaagagcgcagcccaacagattcttggcgaggaattcgagggcctcgtataccgtgaaaccggggagagtaacggaagtggcatgttccaggcctaccaccacctgcacggcactaaccgcacggagacgaccgttggctatccgtttcatgtaatggaactctga

SEQ ID NO: 340049 - DNA, 912 bp, Pseudomonas aeruginosa
atggtcagcctcgaccgcttcgaaacctttcgcgccgtggtcgactgcggttccctcagcgccgccgccgacaccctcggccagacgcgtgcggtagtcagcttcaacctcaagcggctggaggccgagctgggcgtttctctgctcagccgcagcacccggcggatggccctgaccgatgctggcgaacgcttctaccagcgctgcgtgaaggtgctcgacgaggcgcgcctggccatcgacgacgcccgcgccgagcatggcgaactgcgtggcagcctgcgcgtcaccaccacccaggaatacggcctgcgccaactggtgccggccctgcaggcattcgcccggctgcacccggcgttgcaggtacaattgtcgacctcatcgctgcatgccgacctgattggcgaacgcttcgacgtcgcgatccgcctggggcgcctggaggactccacccaccatgcggtgcaactggccagcttcgaggtcctggcggtggccagcccggcctgcctggcggcgctcggcgaaccgccgccgaccgacctggagagtctggagcgcctgcagaatctcggtcacagccggctggcggactccctgccctggcaagtacgcgcccccgacggcgccctgcgcagctaccgcggaccgcgccatcccatgctgctggccgacaacgccgcggccctgcgcgcctttgccctcgacggcctgggtatcgccgtgctgccggactggctggtgcaggccgacttgcgctgcggcgcactgcaacgcctgctggcggaccacgggtttccgctccagggcgtgcatgccgtttatccgccgacccgccacctgccgtcgaaggtccgcgcgttcatcgacttcctcaagactcgcctggggcacccggacgccggttag

SEQ ID NO: 340050 - DNA, 252 bp, Pseudomonas aeruginosa
atgcgttttttgaagaagctggacggcggcaacgccaaccagaatatgcacaacaatgaagatgcccgcgtcaatatctcttctgccccccagcagaaggacaagaagggagaaggtgttaaggccagagctgttcaggcagcgcaggtcgtaaaacggatcccctactatgtctggctctgggaaaaagctggcgaggcctggggttgggtctgcgaacatgcagaatcaatccttgaggtaatctcatga

SEQ ID NO: 340051 - DNA, 4881 bp, Pseudomonas aeruginosa
atgtctgccctctccgctctgctccatacctttcgttccgcctccgtcaccgagcgcgaaaaaggcacctacttcgaggagctgatttgcgcctacctgcgcaacgaagccacctaccgcgatctgtacgacaaggtgtggacatacgccgactgggccaaggaacagggcctcagcggtaaggacgcgggcatcgacctagtggcgcgcacccagggcaccggcgagtaccacgccattcagtgcaagctctacgccgaggactacaaagtccagaagaaggacatcgacagcttcttcaccgcctcgggcaaggcaccgttctcgcaccgcgtcatcgtaaccacgacaaacaattggagtgagcatgccgaggacgccttgcagggccagcagcctccggttagcaagatcgacctgcaagccttagaggacagccaggtcgactgggctaaataccagcccaaccaggcggtggtgctaaaggcgcgcaagcagctgcgcgatcaccagcagactgcactgaacgccgtggttgccggcttgaaggatgccgagcgtggcaagctgatcatggcttgcggtaccggcaagactttcaccagtctgaaaatcgccgagcagcaggccggcaagggcaagcgtgtactgttcctggtgcccagcctgtcgctgctgtcacagaccctcaccgagtggacgcaggaaagcgcaaccctactccacagttttgcggtctgttccgatagcgacgtaggtaagaaacgcaaggcagaggatgacgcggttcaggtgtttacccacgaactgcgttatccagccaccactaaggcggatcgcctcgcgtcggaaatgctcaagcgccacgatgccgagcacatgagcgtggtgttctccacctatcactccatcgacgtgatcagccgcgcccaggcagatcatggcctgccagctttcgatctggtgatctgtgacgaagcgcaccgcactaccggcgccacctttggcgatgatgacgaaagcaactttgtgcgcattcatgatggtgactacatccgcgcggccaaacgcctgtacatgaccgctacgcctcgcatctacggtgacagcgccaagatcaaagctgagtccggcgaagtcaccctgtgctcgatggatgacgaggcgctatatggcaaagagctgttcgtcatcaacttctccgaggcagtccagcgcggcctgctcaccgactacaaagtgctggtactcaccgtcgaggagagcaccatcagccgtcgccttcaggacatgctgaaggacgagaacaaccagctcaaggtggatgacgcggccaagatcgtcggctgctggaaggcattggctaagcagggcctgcatgagcaactgattggtgacgacgagccgatgaagcgtgccgtggcgttctgtcaggtcatttcacccaactacaaaggcaccaagcacaaggtcagctcgatcaacattgccagcatgttccaagcggtggtcgaggcctatcaggaatctgaagagattgacgaagcctcgcgcctcatctgcgaggccgagcacgtggatggcggcatgaatgccagtgccaaggaagccaagctcaactggctgaaggaagaacctctggcaaacacctgccgcatcctcagcaacgtacgctgcctgtctgagggcgtggacgtgccggcgttggatgccgtgctcttcctcaccccgcgtaactcccaggtggatgtggtgcagtccgttggccgcgtgatgcgcaacgcaccgggcaagaagcgcggctatgtggtgctgccggtggtcatcccggcaggcatggagccccacgaagcgctcaacgacaaccagacttacaaggtggtctggcaggtgctccaagcgctgcgctcgcacgatgacagcttcgacgccatggtcaacaagctcgacctgatcggctcagaccctcgcaagatggaagttattgccatcaccgacaaggccgagaagaacgccaagaaagccacaggcaccaccaacggcaaagctggcaaaggccagtacgggatcggtagcaagaaccatgatgttcccggccagatgactcagcaggctgagctgacctacgaggtcggcgaaatcgagaaggccatctacgccaagatcgtcgagaagtgcggcaaccgccaccattgggaagactgggccaacgacatcgccaagatcgctcgcacccatatcgaccgtatccagggcattctggagaacccggccaacacccaggagcaggccgctttcaacgtatttgccgccgagttgcgcgacgacctcaacgacagtatcagcgacggcgagattgtcgaaatgctcgcccagcatctggttaccaagccagtattcgacgcactgttcgatgagtacagctttgctagccacaaccccatgtccaaggccatgcaaggcgtgctggacgcgctccacgagcatcacctagccaaggaagctgacaccctggagaagttctacgccagcgtgcgtcagcgcgctgccggcatcgacaatgcccagggaaaacagaagatcatcgttgagctgtacgacaagttcttccgcaatgccttcccaaagatgaccgagcgcttgggcatcgtttataccccggtcgaggtggtcgacttcatccttcacagcgtcaaccatctgctgcaacaggagttcggtcagaccctgggtagtaagggcgtccacatcatcgatcccttcaccggtaccggcactttcatcacgcgcctgattcagtcgggcctgatcaagccggaagagctgccacacaagtacaagcacgaaatccacgccaacgagctggtgcttctggcctactacattgccgccatcaatatcgaagcggcctatcacggcgaagtgatcgacgaatacaccccgtttgaaggcatctgcctgaccgacaccttccagatgtatgaaaaagaagatctgatcgatgaagtgctggtggacaacagcgcccgccgcaagcggcagaaggcgttggatattcgagtgattgtgggtaatccgccgtactcagttgggcagaagagcgagaacgacaacaacgataacgtcgattaccccaagctggatgcagacatccgcgccacttatgcagcacgctcctcggccacgctcgccaaggggctatatgacagctatatccgcgccattcgctgggccagcaaccgcattggcgataccggaatcattggctttgtcaccaacgctggctttctggacgccaacaccaccgatggattgcgcaagtgcctggcggatgagttctccagcctctatgtgttccacctgcgcggcaaccagcgcaccagtggtgaaacgtcacgtaaggagggcgggaagatcttcggcagtggcagccgagctcctatcgccatatcactgctggtcaagaatccggctgcgcaaggtcacggtcagatctacttccacgatatcggcgactatctgagccgcgaagaaaagctggagaaggtagccggttacgccagcgtcgctggcattgagcaatggcagagaattactccagacgagcatggagactggctgaagcagcgtgacaacagtttcaaccgattcatcgtcttgggtgaaaagaaaagcgatgcgccgaagctgtttgaaaacttctcgctgggcgttgtaactaaccgcgatgcctgggcctacaacgccagccagtcaaagctagcaaccaacatgaccagcatgatcggcttctacaacggtgaggtagagcgtttcaacgcgaagtattcggggctggataccaaggcccgtcaggcgcaggttgatggattcatcgacaccgatccgacccgaatcagctggacgcataacgtcaaacaggatcttgtcagaaatcacatctatgcctttgaaagcggaaacatggtttctagcctgtatcgtcctttcaccaagcaatggttgtattacaaccgtcgcttcaacgagagggtttaccagatgccacgcatcttccccgatgccggaacggagaatttggtgattggggtttctgccgctggagagaaggtagcttttagcgctttgatttcacgccatgtgcccagccttcacttcgtggatatcgagggctcgcaatgctttccgctttacctctacgacgaagctgcccaagcttcagatagcgacctttttgccgagccgattgatggcggcctgcgccgccgcgatgctgtgactgacgctggcttggcgcatttccagagtgcctaccccggtgagtcgcttagtaaggaagacctgttctactacgtctacggcatcctccattccccggactaccgcgaacgctttgccgacaatctgagcaaggagctgccgcgcattccggcagtgaagaaggctgccgacttctgggccttcagccaagcgggtcgcgcattggccgatcttcacctgaactatgaaactgtcgagccgtatccgctgaccatcgaggccaagagcccgctcaccggtgctgattaccgcgtagagaagatgaagttcgccaagaagggagacaagagcacggtcatctacaaccaccgcatcaccctcaaggatatccccagagctgcttgggactatgtcgtcaacggaaaggctgcgctggactgggtgatggagcggcaggccgttcgtacagacaaagccagcggcatcgtcaacgacgccaacgactgggccatcgagaccatgggtaaccccaagtacccgctggagttgttccagcgagtagtaacagtaagcttggagactaccaagattgttaagggcctccctccccttgatatctga

SEQ ID NO: 340052 - DNA, 639 bp, Pseudomonas aeruginosa
atgcgacgcacaaaggaagattctgaaaaaacccgtacggccatcctcctggccgccgaggaactgttcctggaaaagggcgtgtcccataccagcctggaacagatcgccagggccgccggggtgacccgtggagccgtctactggcacttccagaacaaggcccacctgttcaacgagatgctcaaccaggtacgcctgccgccggagcaactcaccgagcgcctgtccggctgcgatggcagcgacccgctgcgctcgctctacgacctctgcctggaggccgtgcaatcgttgctgacgcaggagaagaagcgccgcatcctgaccatcctgatgcaacgttgcgaattcaccgaggaactgcgcgaggcgcaggaacgcaacaacgccttcgtgcagatgttcatcgaactctgcgagcagttgttcgcccgcgacgaatgccgtgtgcggctgcatccgggcatgaccccgaggatcgcctcgcgcgccttgcacgcgctgatcctgggcctgttcaacgactggttgcgcgacccgcgcctgttcgatccggatacggacgcggaacacctgctggagccgatgttccgtggcctggtgcgcgactggggtcaggccagctcggcgccgtag

SEQ ID NO: 340053 - DNA, 315 bp, Pseudomonas aeruginosa
  misc_feature (302)..(311): n is a, c, g, or t
atgaccgacccgatccgcctgtccaaacgcctcgccgaactcaccgcctgctcgcgccgcgaagccgagctgtacatcgagggcggctgggtcagcgtcgacggcgaagtgatcgaggagccacagttcaaggtgctcgaccagcgcgtggagctgctgccgggcgcccgcgcggaaacgatcgaaccggccaccctgctgttgcacaagccggccggctggcgccacgacgatttcgaaggtctgctcgccgcggggcgacgctggcgggcgaagtgttttttcagcgctcgcaagggacnnnnnnnnnnatga

SEQ ID NO: 340054 - DNA, 267 bp, Pseudomonas aeruginosa
atgctggtgattcgattggcggggaagtggacgttgaagctggaccgccagataggcagttccggcaagcatgggatatgggcgttccactgctctgaaagcacgttcgcgccgtcttcgaatgacctccggcgcactgcggcgatccttccagccgagcccaaggaaggccagacggtggacgtatcgatctgcgacaccgcgcactcgccagatggatggatcgctgtcggctcaggcgtagcagcctacgaagcggagcgctga

SEQ ID NO: 340055 - DNA, 1440 bp, Pseudomonas aeruginosa
atgaacattcggcagaggatcctcgcttcgggcgccatcggcatcgtggctgtggtgctgctcggcggggtcggcttctgggggcaattgcggttgggcaaggcgctgacggagaacgagctgagcgtcaatgcgctgcgcaaccacatggaaggcgacatgatgcacgacgccttgcgcgccgacgtcctggcggcgttcgtggtccagcccggcgacggcgcggcggccgagcaggtccgcgaggacctgcaggagcacagccagtggtttcgcaaggtggtcgagcagaaccaggggctgcctctcaacgacgccatccaccaggcgctggtcgagttgcggcccgacctggaagcctacatcggcgccgccgagagcatcgtcggcaaggcgttgctcgatcccgtggcggcgcgggccgagctgccgcagttcgtccaggccttcaaggatctggaagggcgcaacgaagcgctcagcagcctgatcgagaaacacgtcgagcagaccaaccgggcgcgcgaagacagcatgcgctattccgcctggatgctcgcgggcggcatcctggtcgcctgcctggtcctcggacagctctgtcgccagttgctgcgcgccgtcctgcagccgctgcgcaaactggtctcatcggcccgggtgatcgcccagggcaacctgcaggagccgatcggcgtcgacagcaatgacgaggccggccagttgcagcgggcgttgggcgagatgcaggagaacctgcggcagatgatcaccatcatccgccaggaaagcgaagaactccacgacacctcccaatccatcggccagacctcgcagtcgatcgtccacggcgccagccaacaggccgacagcgccaccagcatggctgcgagcatggaagagatgatcaccaatatctcgcagatttccgaccacgccgacaacgccagggtgatctcggccaagtccgaggagctggccagcagtggcggacaggtgatcctcaacgtggtggaagggatgagccgcatcgccgacgtggtcaaccagtcctccaccagcatcaccgctctcggccagtcgtcggacgagatccattcgatcatccaggtgatcaaggggatcgccgagcagaccaacctgctggcattgaacgccgccatcgaggcggcgcgggccggagaggccggccgccaggcaggggtgtcgatcaacgagatcctcgatggaacccgtcatgccgcgtcggtggtcgacgaaatttcccagaccatccgcgaacagtcgcgcgccagcgatgaaatcgcccagcgcgtggagctcatcgcccagcgttcgcagcagaacacccaggcgatgcacgagatggccgccaccgccaggcgcctgaacgaggttgcggcgaccatgcgctcgtcggtggagcgcttcaagatctga

SEQ ID NO: 340056 - DNA, 564 bp, Pseudomonas aeruginosa
atgccccgaaccatcgaatactggcgccccacgaacggcctgtatcatgcgaccccgcccggaatcgccgtgctgacccaggacagcgattgggaggtgctcaacgaagccaccggcttctacgaggaaagcccgtatccctccgccttcaagggacaggtgtatcgcgcgctgaactacataaacgctacgccgacgggcgcatcgctgctctggaacctctacacgacgaacaatttcgtcgacatcaccccctcgtcgctgggcaacaatgtccagtccaccaatcagcccatggcgctcaatcaggtcgccagagaaatcatcgtaggaaccggtcccggcccccagacccagatcgcgctcaatcagacaggcatcgccccgcaggcgcagacccagtggtctgacctatgtcatcaacagttcgccgcattgggccctggacggcgtgccgggcaacggtggtggcctttacggctatctagagcgcgcccgccagtatgccaaccgctggatgctgctgttcgaccaccgctacttccgctggagcgacagcaatga

SEQ ID NO: 340057 - DNA, 1476 bp, Pseudomonas aeruginosa
atgcacaacgagtcccgccctgaagcccccttgcgggtgctggtggtcggcgccggcttcgccggtctcggcctggcgatccgcctgcgacaggcaggcatcgacgattatctggtgctggaaaaggccgccgacgtcggcggttgctggcgggaaaaccgctacccgggcgccgcctgcgacgtcccctcgcatctctattcgttttccttcgagccgaaggccgactggtcgcgcaagttcgccccgcaggcggaaatcctcgactacctgcggcattgcgcggacaagtaccgtctgcgcgagaagatccgtttccactgcgaggtggaggaggcccgtttcgacgccggcagcggcgaatggcaggtgcgctgcgccgacggccagacgctgcgcgcacgggccctggtctgcgccaccggccagttgagccggccgctgctgccgcgcctgcccggcctggagcgcttccagggtccggcgttccactcggcgaactgggacgccgaggtcgagctggccggcaagcgggtcgcggtgatcggcaccggagccagcgccatccagttcgtcccgcggatcgccccgcaggtgcaacgcctgtcgctgttccagcgcagcgcgccctacgtgatcgccaagccggaccgcgcctacgccgactgggaacgccgcctgaaggcgcgctggccgtggctgcaacgtctggatcgggggctcaagtacctgcaccacgaatcgcggatgctcgccttcgcgaccttcccggcgctgatgaaggtgatgcggctgagcttccatcgtcacctgcaccggcagatcgccgatccgcaactgcgcgcgcggctggttcccgactaccctctgggttgcaagcgcatcctgatcagcaacgactattacccggcgctggccaggagcaatgtcgaactggtcgacacgggcattcgcgaagtcaccgaagacgccgtggttggccgtgacggccgccggcacgaggtcgacgcgatcatcttcggtaccggcttcgccgccaccgagttcctcgccccgatgcgcatcctcggcctcgacggacgcgacctgcggcaggcctgggcggatggcgcggaagcctacaagggcattagcgtcagcggcttccccaacctgttcatcctttacgggccgaacaccaacctcggtcacaactccatcgtctacatgctggaaagccagttcccctacgtgctcggctgcctgcgccagctccaggcgcagggcttgcgctacctcgacgtgaagcccgaggtccagcggcgcttcaacctggaggtgcaacaggggttgcgccataccgtctgggagcgtggctgcgacagctggtacaagactgccgccggcaagaacaccaacaactggccgggctacaccttcgtctatcgctggcgtacgcgccggccggagcttgccgactatgacctggcccgctga

SEQ ID NO: 340058 - DNA, 957 bp, Pseudomonas aeruginosa
atgagcgagaagccggaacggcaacgcatcgtcgaggaggccatcgaatggatggtgcgcctgcaatccggcgacttcagcgccgccgagggcgatgccctggaacgctggaaggcgctgtcgagcgagcatgccgaggtgttccggcaactgcttggcagcctcgcgccgctacaggactcgccctggcgcggccagccgagcgctaccgtgctgcgcgccctggagcagccgtcgagccgccggcgcttcgtcggcggcgccctcgggctgttcgtcctgctcgccggcggcgccggcctggagcgctgggtccaggccggcatgggcctgcccggcgaactggcgaccggcaccggcgagcgccgcgactggttgctggccgacggcagccgcctgcgcctgaacgcgcggagcaaggcgcggccgctgttcgacggcacccagcgacgcctggaactgcggcgcggcgcgttgcgcctggaagtgaaggaggacccgcgcggcaccttcgccctcgactgcgcctccggacgggtggactgcgccagcggcagcctgctgcttgccgaggagcgcggggcgatccgcctggtgaccctgcgcggcagcgcgcggctgaccaccggcgagggacgccaactggtggtggcggcacggcgcagcctgctgttcgatgccggcggcctgctcgaacagggcccgatgcaggccggagaggacgcctgggccagcggctggctggaggtccacgaccgttccctggcctgggtcgcggaggccttccggccctatctgccaggcatcctccagctcgacgcggagatcgccggcaaccgcgtcagcggtctgttcccgctggacgacatgcacacgtccctggacatgctcgggcgcagcctgccgatccgcgtgctgcgctacagcgactactggatcagcctgcgccccgcctga

SEQ ID NO: 340059 - DNA, 3639 bp, Pseudomonas aeruginosa
atgcgatcaaaactattcctgctgttcttctgcctgctgctgtcgggcggacgcctgttcgccatcgaagcgcatccgtccctgacgctgttcagccagttgcgcatcgagcacgaggacatggcgatcgccgaggacgactgggcctggctgcgccacaagggtcacctgaggctcggcgcggcgctggacgagacctcgcccttcaacgtccggctcgacgacgagaactacgaaggcataacggcggacgtcgccacgctggtcgggcagttgctcggcatgcgcatcaaggtcgtgagcttcgatacccatgcggatgccgtggcggcgctcgctgccggaaagatcgacctgcttggcagccattacagctcggcgggcgattcctccctggtgctcagccaaccctatgcccgtgatcgattggcggtgttcaagcggatgggggaaaagcgcaactcgccggaggatctcgccggactcagcgtggcggtggcccgggagcatgtcggggaattgcgccagcgtttcccgcgggcgcgtttcgtggtcttcggcagccatgacgaggccgttgccgcggtagctttcggacataccgacctgtatctcgacgatgtgctcagcgcctaccaccggatcaatcgatcctattacggctacgtgaggttcgagcggtttgccgatgctcgcctggaagggggctacggcttcctccttcgtcgcggcgacacgaacctgttgcgcgtcgtcaactcggcgatcggtgcgatcaaccaggaccgtctcgaaagcatcgccaggcgctgggtcggcagcggttccctgccaacgggccagcgtatcgcgctgacgccgcaggagagtcgctggatcgctcgccacccggtggtgcggttggtcatcaacgacgacctggcgccgctggccttcttcaattccgacgagaccttctcgggcatcgcctccgacctgctggacatgatttcccgccgcaccggcctgcatttccaggtcacgcctcgcagtggcggcttccccgagcagatcggcgtattggccaggaaggaggcggacctggcgatcatgagccgcagcagcaagcgcgaggaaatgctgcgtttcacccgctcgttcctgtccacctcgtacgtcctcgtcacccgggcggacgacaagggacgcgcggagagccccggaagcctcgacggcaagcgcatagcgattcccgccggccatgtgggcatgcaacaggtgcgcgagcgctatccgcaggccacgatggtggaggtcggcgtcgcgctggatgccatgaacctggtctacgaaggacgggccgacgcggcggtggtgccgctggtcaccgctcgctactacatcgtccggttgttccgcgagaggctggcgatcgccgacctggttcccatcggtgcggccaccgcccacttcgccgttcgccgaggcgacgccgaactccagtcgattctcgacaaggccttgctgagcatctcgccagacgacctgagcgatatcgtcaatcgctggcgctcgccgccgggaatgagcggccagacctgggtcgactacatcctggtgatcaccgagatcctggcgatcgcagcggccttgctgctgttctgcctgggctgggtcacttatcagcgccggcagatcagggcgcgcgcgcgggtcgaacaggcgctcagcgaccagttgcggttcgtcgaggccctgaccgactgcatgcccccgccgctgtatgtgcgcgatgtcaacggacggatgctgtcttgcaaccgcagctacttgcagagcgtcggcctgagttccgatgaggtgatgaaccgcaccgtgctcgagctgcccatggaaaacttcgagaccgctccggagttccatcgcagctacctgatggccatgcgcgagggcaggatcatcgaggcggtctacccggtggcgctgggcggccgggagcgctggatcgaccactggatccagccgttccgcgattccagcgggaccatccgcggtgtcatctgtggctggctggacatcaccgagcaccgccagttgatcgatgagctggaagaggcgaagaacctggccgacgaagcgagccgggccaagaccaccttcctggcgaccatgagccacgagatacgcacgccgatgaatgcggtgatcggcatcctcgaactggcgctcaagcgtgccgagaccggtcgggtggaccgttccagcatcgagatcgcctatgcctcggcgaagagcctgctggagctgatcggcgatattctcgacatcgcccgcatcgagtcaggtcgcctcagcctgtcgccgaaacgggccaacctgcgcgagctggtggaatcggtggcacgggtattcgaaggcctggcccggcaaaagcgcctgagcctggtgctggagatcgattcgagcatcaacggcgacgtactgctggatgccatgcgcttcaagcagatcctctccaacctggtcagcaacgcgatcaagttcaccgacgagggctcgatccgcatccgcatcgatggccgccaggtggagccgtcgctgttgcaggtcaatctctgtgtggaagacaccggcatcggtatttccctgggcgaccagcaacagttgttccggcctttcgcccaggtcaaccgcaacctgcagaacaccgagggcaccgggctcggcctggtgatctcgcgctcgctgtgcgaaatgatgggagggcgcctggtgatgagcagcgagctggggcaggggacgcggatcgacgtcgagctgcgcctgcaagtgctggaaccgatcgtcgagagcgtgcgggcgatcccgctcggcaatcgccaggcgcggcggttgcaggtcctggtggtggacgatcatgcggtcaaccggcagatcctccatcaacagctgagcttcctcggccacgacgtagaggaggcggaaaacggcctgagcgctctcaacctgtggcatgggcaaccgttcgacatggtcatcaccgactgtcacatgccgctgatgagcggctccgacctcgcccgctcgatccgccaggaggagcgcgagaatggcgaggaaccggtggtcatcatcggcctcaccgcggacgcccagccggaggagatcgagcgctgcatccaggctggaatgaacgagtgcctgatcaagcccatcggcctcgatgttctcgaggagcgtcttctggccctgggcttcgccgacgacgacctgcccgtcaccatcgacgccgaacccgtcgcgataccgtcggccccccgtctctacgacctggattccctgcatgcgctgaccggcggcgagccgacgatgctcaggcggctactcgatgaactgctgaccagcaaccgcaaggacctggagaccctcgagggactggtgcaacgccaggagaccggcgaactggccgagctggcgcatcggatcaagggcgcggcgagggtggtgcgtggcgagcaactggtggaaagctgccggcgcctcgaggatgcctgcctcagcccgaacgcctcgttcgcctgggtggaggagtgcgccgttggggtgaaactggcgatcctcgccctggacgagagtctggtggaagagtgcacggattga

SEQ ID NO: 340060 - DNA, 495 bp, Pseudomonas aeruginosa
atgcccagtcaagcatcctccccttccccccaggtcgccatcgtcggcggcggtcccgcaggcctgatggccgcggaggtcctgagccaggcgggcgtacgcacggaagtgttcgacgccatgccctcggtcggccggaaattcctcctcgcgggcgtcggcggcatgaacatcacccatgccgaggccagggaacaattcctcggccgctatggcaggcgccagaaggaaatcgccgcactgctcggcgaattcgacgcggatgcgttgcgcgcctggatccacggcctgggtatcgacaccttcgtcggcagttccggccgggtgttcccctccgacatgaaggccgcgccgttgctccgtgcctggctcaagcgcctgcgcgagcaaggcgtgctcatccacaccgctgccgttggctgggctggaacgcggacggtacgctggacatccagagcgccgccgagcgcctgtcgatacgcgccgacgccgtga

SEQ ID NO: 340061 - DNA, 582 bp, Pseudomonas aeruginosa
atgaatgaccacgcccagcgctccgcacggccccaggtcgccctgctgatcgtcgacctgcaacgcggcatgcagcgccacgacctgccgccgcgcaacaatcccggcgccgaggcgcgcatcgtcgaactgcttgccgcctggcgcgccgccggctggccggtggtgcacgtccggcacatttcccggcagcccggctcgcccttcgcgcccggccagcccggcgtggagttccagccagcgctggcgccgcgcgacgacgaggcggtgttcgagaagaacgttcccgacgccttcatcaacagcggcctgcaacgctggctccatgtccgcgacatccgccaggtggcgctcgtcggggtagccacggagaactcggtggaagccagcgcacgaagcgccggcaacctcggcttccagacctgggtagtggccgacgcctgcttcaccttcgccaagcccgatttccatggcaccccgcgcagcgccgacgaggtacatgcgatggcgttggccaacctgcacggcgagtacgccgtggtactgcgcgccgccgaactgttgcagcgcttgccggcctga

SEQ ID NO: 340062 - DNA, 1383 bp, Pseudomonas aeruginosa
atgcgaatgaacatcacctcggtcgcgctgacgtgcctgctcgcagcgcaacttgcccaggccgacgacccgatcaatgtgtccaagaccggcacggttctcagcgacgaggtcctctacagcattggcggcggcagtgcggtgagcatgggcagcgccggccagatggactcgatcggcgtcggcttcggctggaacaacgaccttatgtgcggaaacatgaacctgagcaccaccctggagaaccagctcaacggtgccacacagggtttccagaacatcatgggctcagtcatccagaacgcgaccggcgcagtcatgtcgctgccggcgttgatcatccagcgcgcgaaccctcagctctacaacctgatcaccaatggcatcctgcaggcgcggatcgactacgaccgctcgaaagggacttgcagagcgatcgccgagaagatggctgacatcgctggcgagcagaccggctgggggaaaatcgccgaaggccaggccctgggtgccacactggcctctggcgggaaagacgccgtatccgccctcgaagcagtggagaagaagggcggcaacgatggcataacctgggtcggtggagacaaggccggcggctccggccagaagcccattcgcatcgtcaacgacgtgacccgggcgggctacaacctgttgaccagccgctcagtgaatgactcgtcgagcgtgccttccgccacttgcaacaacggcctggtctgcaacacctggtcctccccccaggaagccgccgcgttcgccacccgggttctgggcgaacaacagcaacagacctgtgaaggctgtcagaagacggtgacggcggcaggcgtcggcctgaccccgctgatccaagagacctacgacaagaagctccagtcgctgcaggagctgctgtcgaaaagtaagccactgaccgccgagaacctggctgcggccggcaccgatgccttgccgatcacccgcggcgtcatcgaggcgctgcgcgacgagcgtgaccaggacgtcctggcgcgccgcctggcgtccgatgtctccctgatggacgtgctcagcaaggccctgttgttgcagcgcctgatgttcgccggcgccaaggagcccaacgtcgccgccaacggcctggccacccaagccgtcgatcagcagaccagcctcctgcagcaggagatctccaatctcaagaccgaactggaactccgtcgcgagttggccagcaattcgcccatgcgggtcatcgagcgcgggcaacagcgcgcctcagggtccagtggcgtgttcgagtcggcgcccgatgccgatcgcctcgatcgcctgcaggccccctctgccgccgacggcaagacgggagggagaccgtga

SEQ ID NO: 340063 - DNA, 1152 bp, Pseudomonas aeruginosa
atgaatcgaatctggagtctggctaagtatagcgcaatattctttatggtggctggatttattattcctgtggttattcttacggtttacgcagggaaatactctaattggtggagttgggaatggctggggcggatatccctaaatcctaacgactggtcggtatttggtgctttattggccggagtcttcagtcttttgggggctgctgcgactacaagcacactgttgctagtggtgtatcaatataagctttctagagagtctatggtgctaaatcagtatattagtcacagggatgtttttattggaaggcttaaggcgcttgagagcaactttgatggtaaaatttttttcaagtttcacgatgaactctatggtagggtgtttccagataataagcctacacatgtggggctgtatgaaaatttacgtggtggctctggaaaggctaactctcttgctggtatgtattcctcgtatagggagctgagttctgagcttgctcggtatcagtttaaggaagctgaaggtagagagtatatatataagtctgttctggcgctgaatgactttcagagcaagctgggtattatagtctcaagcaagggtgataggtttggtgatatatttcttgatggaaagaatactgggataaacttatatgttcttggtgaggcgtatcttagagctgagtatgttctgaattcatacctattttattctgggaacgatacggtaaaggattttaaaagtattgattttgaaatgttgcgtgggcggatgtatgacgggattgaacaaggaagatttcgttctaatatttatgtgcaagaggatgactttgggatcctcaatgctctgtggaaaatctttggcttctgctcggaagaggtttataaaaacgatgccatttatttgaggccggtgtggttacggctgagacgattttttgcttcagctgataatgtggaagagcacatgagtgactattctaaaatgaatgatatgctcgataatcttctgagaagagttgatgggaagtttctgaaagggtatagggctgatctggcggtggttctgaaagtgaaagactccttgcaagaagttcaggggagagtaaatgattttttaagtcgagggaaaaaataa

SEQ ID NO: 340064 - DNA, 627 bp, Pseudomonas aeruginosa
gtgaacgagtcgctggaggtctccccgtcgcggcacctcgacttcggccagctgtacctggccgcgcggatcaacatctccgagtggcgtaacaacaagcagtcgatgcagtacatctcgttcatcaagggcaagggcgggaagaaggtcaccgactacttccgcgatttcatcggctgccaggagggcatcgactcaccgggcgaaacccgcgccctgctcaaggccttcagcgagttcgtggagagcgagggcatggccgagcagcaggcccgcgagaaaaccgagacgctggtcgactacgccacctcgcaggcgcgcatcggcgagccgatgaccctcgacgcactctcggaactgatggacgaccagcaaccgcgggcgttctacgactacatccgcaacaaggactatggcctgtcgccggaaatcccggcggacaagcgcaccctcaaccagttccgccgcttcaccggccgcgccgaaggcctgtcgatcagcttcgaggcgcacctgctgggctccaggatcgagtacgacgaggagcgcgacacgctgcagatcagcagccttcccactcagcttcgcgaccagctcaagcggcgcaaggcccaaattggagaatga

SEQ ID NO: 340065 - DNA, 1800 bp, Pseudomonas aeruginosa
atggctgctcttgccccggactatatggtcattctcaagaatattctgcgtgagcgatttgtagattcactgccgccactgctggacacgaaaaagccagcagcggagcagcaagacaagcagctgtcgcgcgcatttagtgccttcgtgttgcacaagctgctcgatctggcgccagcggctgccgcagcgtcggtggtcgatgacttcaatgacaagggcattgatgccgttcactaccacgagccgtcgcaaactctttacctgctgcagaccaagctgaaggagtcggagcagttcaaacaggaggacgccctgccgttctgtgagggagttcgcctgctgttgaagcaggagttcaccgccttcaatcagcatgtcctacagcgtcaagcggagatcgagaccgcacttgatgtatgcagccatatcaagctagttgtgccctacaccggcgacggtgtctcgaagaccgccagtgatgccttgcaggcactgcttgacgacgaagacctcgatgaggatcgtttggttcggcaggtgcactattacgcggcagatgagatcactcgcgatcttcgggccgaacaggcctactcaccggtacataccgacgtttacctgcagaagtgcagcagggttgaggaaccgcgtgccacctactatggcctcgccagactgtctgatctggttgcgctgcaccggcagcatgggaaggcgctctatgagcgcaacattcgatattaccttggcagcagcaagtctgaagtcagtgctgccattcagacgactctgcgcgatgctcctgacgagttcttttatctaaataacggtgtcactgccgtttgtgaccatgttgatcaaaagggcaacaagcctgcgacaggcttccgcagataccaggtcagggggctttccatcatcaatggtgcgcagacggtcgcctctgctgccgagtttgtggcgcagaacccgcagagcaatatcgagtgcgccaaggtgctatttaccctgatcaaggcaccagccgctggcgattttggcaaacaggtgaccaaggctcgtaatcatcagaacccggtgcagatggcgaactttgctgcccttgatgagaatcaggagcggttgcgccaagaggctgggctcttgggttttgactaccattatcgccctgaggttcaggggacaagcccgatggccttcaccttggatgaggcgttgcgagcactggccctgcagcagaatgatccgcgctatccagcgtggctcaagggggagctgacgcgactctcgaatccggagtcggacgaatacaaggcattatttagctccacactgagaggcatgagtctggtcaatgcagtccagtgccagagagttcttcgtgatttgattgttagtcatgaaaatggggctccatccacctcccgagagaagatgctctaccggcacggtaactacgtcataatctcggtcatgatgaagcggctgcgtaatcgtatcgaatccacccagatcattgatccaggcgaggttgctgcgttgattagcccatccctagatctgcttcggcagcaagcctttgatcttggacagctacggttgaatggcgcggggccgctggctttcttccgaaatcagggcaacgttgtggcctttttggcagacctgatggaggagcactataggctggccaccgatccggctatagcgccactccgtaatatccagaatgcagcggatgcgtatccgcgaaagcgcctgatcgactacatgtcgagcaaggcaccgcaaatttga

SEQ ID NO: 340066 - DNA, 630 bp, Pseudomonas aeruginosa
atggtcgagttgggtgagcattgtgatacttgcattaccccgcgcctgcagaaggtcatcgacggcaccgaccaaggcggtatcagcaaggcggtcaactggcagggcggcggtggcttccgctactacaagctggcacccacgctgattgtcaatgacagctggggcaattcggtgatcaatccggagtacaacgccgccatgctggccgaggcactggcgaagctggaaggcttcacctatgcgccctcggaagcccactggtggcagcacggtcattccagcgaacgtgatttcatctacgtcaccacccagaacctgtccgccgaacagctacaggcactggccgatgacgtgggagccgagcagagcttgctggtctgctgtgcggccttccatggcgtgactgccgcccaggccgaagcacgctggccgaacctgacgctgaagaagatcccgaagatggtgctatcgcgctgcgagtggggccacgacgactacagcctgaacgtcgctaatctgccgctggccgagcagtccgtcgccgtacccgagccggccaaaaacggcaggaagagcaacgccgctgcgccggcacaagcagcgctgtttggtgaaagcgaagcgtga

SEQ ID NO: 340067 - DNA, 2769 bp, Pseudomonas aeruginosa
atgagcagttcgcgtattcaacatcacgtttccgggcgtctgtcgctgcgcccgccgcaggccgagtcgttgggcaagctggtgcagacgctgagcgcagcgccggagatgttggggcatcaacagaatgtgccagccatcctcgataccctgaaggcccagttcccgaccctggaagatttcgagcgcgacttcccgtcgctttgcttcgcgctggctacgggtgtaggcaagacccggctgatgggggcattcattgcttatctgcatcttgagcacaagatcaacaacttcttcgtgctcgcaccgaacctgaccatctacaacaagctgatcagcgatttcaccccgaacacgcccaaatatgtgttcaagggcatcggcgagttctcgatcaatgtgccgcgggtcatcaccggcgacaactacgaccagcagaacatcctgggcggtgagctgtttggcgagattcgcatcaacatcttcaacatcgccaagatcagctccgaggtgcgtggcggcaaggagccgcgcatcaagcgcatgcgtgaggtgctgggcgacagttatttcaaccatctggccagcttggacgatctggtgctactgatggatgagtcgcaccgctaccgagcccaagccgggatgcgggcgatcaacgaactcaaacccctgtttggcctggaggtgacagccacgccgttcgtggagtccaccagggggccggtgccgttcaagaatgtggtgatgaactacccgctggcccgtgccatcgaagatggcttcgtcaaggagccggcggttgtcacccagcgcgacttcaaggccgagcagcacgcgccggaagaggtggaacgaatcaagctggaagacggcgtgcgcctgcacgagatgactaaagccgagctgctgacctacgcccgcgaaaacgatgccagggtggtgaagcctttcatgctggtgatcgctcgtgacaccacgcacgctggccagctgctggagctgctggagtcggaggtcttctttgagggccgctatcgcggcaaggtcatccaggtcgattccagcaagagcggcaaggatgaagaggaaatgattacccgcctgctgaccgtggaaagcgtggacgagccgaccgagatcgtcatccacgtcaacatgctcaaggaaggctgggacgtcaccaacctgtacaccatcgtcccgctgcgggccgccaaagcccgcacgctggttgagcagtccatcggacgcggcctgcgcctgccttatggcaagcgcaccggagtggaagccgtggaccggctcaatatcgtggctcacgacaaattccaggaaatcatcgacgacgccaaccgagctgattcgccgattcgcctcaagcaggtgattctcgatgcgcccagggcggacgacaacaagaccagtgtgcaggtgcagtccggcgcgcatacgatgctcggcctgagcgaaggtacagagcagccggctgctgagcaggcgagcaccttcggtgaggcaaacaataccggtttgaataccgctacgcagaaatctgtgccgattttcaccaccgatgcagaaaagcaggctgcgcgtgtggtgatggaggtgatcggcaagtacgaaaccaagcgtgatttggtgtcgagtagcagggatctgctgaaggaggaagtgcaggagcagatcaaggccgaagtcgccgaaagactcaagccgcaacaaggctcgctgctggaagaccaggatgcctatgtgccggagttgaatctggccgatgtggtggccaagaccaccgaagtggtggtgcagcagaccatcgacattccgcggataacggtggtgccgaccggcgaggtgacttcgggttaccactcgttcacattgagcgatctgcctaattatcagccaggccagcgggagatcatcgggcagacactgcgaaccaacgagcagttcaccctgagtcgggagagcggtatccacgagaaacgcctagagaattacatcgtcaagaagctgatcgacttcgacgacgtggattacttcacccaggccgaactgctatacgaccttgccgggcaggcagtgactcattaccagacgcagaactacaccgaaagcgagctgcacgagatcctcgatacgcacggcgcggacctagcccgcctgatccatgcggaaatgcttaagcacttctgggaagaggccagtggctacgaggtcaacgtcagtcgcggctttaccgagctcaagccttgcaactataccgtgacagccaatcagccaatacgcagcgtgcgagagacggtcgccgaaaccagccggatcaagcagatgctgtttggcggtttcatgcgctgcctgtatccgttgcagaagttcgattcggacaccgaacggcgctttgccgtgatcttggagcgtgacgccctgaagtggctcaagcccgccaaggggcagttccagatcttctacaagctcggtgccgaacagccggagtatgttcctgacttcgtggtggagacggatagctgcatcgttctagccgaaaccaaagctgccaacgacctggatactcaagaagtgcaggccaaggccgccgctgctgcccagtgggccaagcatgctactgactacgcgcagagcgtcggtggcaaaccttggaagtatttactgattccgcacagcgaagtgaccgaggcgaaacggttgatggactatctgaggtttgaggtgaagacaccagtgtcagcagcaggctga

SEQ ID NO: 340068 - DNA, 771 bp, Pseudomonas aeruginosa
atgaaaaccgacagggacgacgcaccggactatctacgcagcaagaaaaagcccggtccatggcgagtggcggccatcctgagtgtgggctccgcaattgcttggactgtaattacgttgtttgccaagccaattgtgatcgacgttgaccaactcaagcaagcgattcatatagacggcaaaccgctgctcggccagccaccggcgccacagtctaataacgagtcagaagagaatgtaaagctacgatccgctccagtggccccacctaagcatcagcatacataccagtccagcaatccgcctcagtcacatgcatcgatccattggacggaagaagaaaagtcgagggccatagtaagtgctcagaacgtattcaatgatagaaactatacaccccaaaaaccggccaacatctacacaccatcagcaatccatcgagtagtaacagggccacagaaaacacagcaacaccaagccaactgggtaagccacgacaaaacttccaaatggataaaaagttggaatggcggcacaaactacctagcagaatggctctccgttaacaattacatagatagccccactgtctgcgccaatcaccgacgcggatcaatcgactaccgagaatgtcgtaaagctgccaagcagcatttccatgaacaatgcagaatatggcgtgcgcgttatgacaatgaccgcaaagcaagaagtgatcgaatgaagacgcgttactgtactgcagcgagcagcttcaatccaatgggataa

SEQ ID NO: 340069 - DNA, 729 bp, Pseudomonas aeruginosa
atgaaagtccttccgctgttagttccaagcgtcattttagtggtggcgctttctttttactttggaagctttaactcggggctttctagtgatcagtcggtttggggcgcttttggtgactatgttggcgggatactgaatccggttctgacttttaccaccatttaccttcttattaaaagccttgatagccaaaatagatctctagataacgcagagcggcaagctttggaggcgcgagatgctttattaaagcagcaggagacggaagggttaaagcaatttgactctttattttttgtgtttacagaaatcgcagcaaatacgtatgggcgatttgttattagagttggtcacaacaaagagtttctggggcatgagggtataacatacgtatctgagagacttgagcgggcatctgccgagtctaaagatgtaatagccgagtttgagcgtcttgatgagagtcatcataacgtaatatatgagttggttcaggcttactgctcgatatttaagatgattttggagttttgtccagaggctcaaagggatagatatatatctattgctgtttcagttgttccggtaaaggtggtgcatcttttgtctatggcggaggcttacaccaaatggcctgtattagagtcgactcggactgctggtttctttgataaggcttcagttgtggggcttgtaaagcacttcaagaaacttgcagaaaaataa

SEQ ID NO: 340070 - DNA, 321 bp, Pseudomonas aeruginosa
gtgcgcgccggccggcttcgccacccgctgaccattgagcgcgaggaacgcgtgccagatggcggcggcgggttcaccaccaaatgggtggccgtagggcgcgaatgggcgagcctggaaggcatcaatggccgggaattcatcgcggccaatgcccagcaatcagagacgacctggcgcgtcaccttgcgctatcgcgccgacctagtggcgaagtggcgtctgcgcgacggcaacaccgtgttcagcatcgaggcagttctgcccgacaacggccgccgtcagctcgtgctgatgtgcaagtccggggttctgaaatga

SEQ ID NO: 340071 - DNA, 282 bp, Pseudomonas aeruginosa
atgagcaccgtcacccttgatgacgtgaagatccacctgcgtgtggaccaagacgcggagaacgtattcctgcagggcctcatcgacgccgccgaggcgcacgtggccatgttcctgggcgatgacctccccgaccccatgccggcgcccgtgcaagccgccgtgctccttctggtgggcgatctttacgagaaccgggagcggcaggccaacgtgcagttgttcgagaactcggcctattccctgctgctggcgccatatcgttcgatgggagtgctgtag

SEQ ID NO: 340072 - DNA, 1497 bp, Pseudomonas aeruginosa
atgacccgggcagagaaggttatcgcctttatcgagcgctactgcgttacgccggaaggcgccgacgtgggcaagccgctgctgctggcagacttccagaagaagttcatccgcgacgtgtatgacaacccggccggcactcgccgggccatcctgagcgtggccaggaagaacgggaagtccggcctgatcgccggcctgctgctggcgtacctggtcggccccgaagccaagcagaacagtcagcttgtctccggtgccatgagccgcgaccaagccgccttggtgttcaacctggcaagcaagatggttcagcagtctccagcgctgtcgcaaatcgtccgcatcgtgcccagcggcaaacgcttgctgggcctgaacctgaataccgagttccacgccttggccgcggacgggaagacagcacacggcctatcgcccgtgctcgccatcctcgacgaggtgggccaggtgcgcggcccgcaatccgatttcgtggacgcgatcatcaccagtcagggggcccacgagaacccgctgcaggtcatcatcagcacccaggccgccagtgatgccgacctgctgtccacctggatcgatgacgccaaggccagccaagacccgcgcatcgtgtgccacttgtacgcagctcccgccggctgcgacctgatggacgaagccgcctggcgtgctgcgaacccggccctgggcctgttccgttccctggaggatctgcgcgatcagatgcaacaggccgagcgcatgccaagcatgagcaacacagcccgcaacctgctgctcaaccagcgagtcagcctcgacagccccttcatcagcccggatgtatgggcggcctgccgcgccgagcctgagccgttcgacggacccatctatgccggcctcgacctatcggcgcgcaccgacctgacagcgctggtgctgatcggcaaggccggcagcgtgtggcaggttcgatcctacttctggacccccgagcagggcctgctcgagcgcgcacggaaggaccgcgcgccatacgacacgtgggccagacagggcttcattcgcaccaccccaggcgcgacggtagaccttgaagccgtagcactcgacctggccgacgttctgagcgactgcgatgtgcaggctattgcctacgaccgctggcgtatcgacgtgctgaagaaggagctggagcgcctgggcctggaccttccccttgtccctcacgggcagggcttcaaggacatggcaccagccctagacgccctggagatcgagctgctgaatggccggctcgcccacggcgcacacccggtcctgaccatgtgcgccgccaacgcggtggccaccaaagaccccagcggcaaccgcaagctcgacaagtcccgccgtaccggccgcatcgacggcctgcaggctctcgctatggcgttcggcgcgtccctgacagccgaggcacccgccgacatcgacaccgaggtttatttcgtatga

SEQ ID NO: 340073 - DNA, 462 bp, Pseudomonas aeruginosa
atgaagaccactccccgccgcccccgatccgatagcgccaaggccgccgtagctgcgagccaggccgtcgccatcggcccaatccagccgccggcgcatattcctctcagggcggccgataagccgttctgggaggcgatcgtcacggcaaggccacgcgacacatggactgacgcggacctggtgctggctgcgaacctcgctcgcacctatgccgacatcgaggcgctgcaggccagcatcgaccgcgacggcctgttggtggatggcaaggtgaatcctgcgtgcgaactgctggacaagatgacgcgtcgctcgctagcgatggggcgccaactcatggtcgccaccattgccacggtgggcaaggctcaggacatccacaagggtgccgccctggagcgcaccgcccgccagcaggtggacgatgatctgatccccaccctggggacgctgcaatga

SEQ ID NO: 340074 - DNA, 384 bp, Pseudomonas aeruginosa
gtgagcaagaagaagcggctgatcccactcaatagcacagcctggcaacggattcgcgccgaggtgctggcagaggaaccactctgccgcgcctgtgctgctcgcggcctggtggtgcgtgcaactgacgtggaccacatcgaggacagccgcgacgactacagcgacgacaaccgcagggagaacctgcagccgctgtgtcatgagtgtcactcgctcaagaccgccgccagcatgggtaagagcgtgaccctcggctgtgacgcgaatgggctcccgctcgacccaaaccaccattggaaccgggcgaaagatcacgaggaaccgtccgcacctagaccgcctgccccctgctctgtcatcgctaactgcctgaaaacatga

SEQ ID NO: 340075 - DNA, 1236 bp, Pseudomonas aeruginosa
atgaggtttctgcgccgactgttcgaaaaacgtgccgacaccttcgaccgctattgggacaagttctctggcgcacctgctgttgccggggtgagcgtcaccgtcgataccgccgaaagcatcagtgccgtatacgcggcagtagcagcgataagtgaaagcgttgcgggcctgccgctcgacgtgtaccgccgcaccgacacaggccgcgaaaaggcccgcaatcaccctctgtacgccctgctccacgacgcgccgaacgaacgccaaactgccttggagttccgcgagcagatgcagcggcatgtcctgttgcgaggcaacgcttacgccgaaatcgtttggtctcgctctggccgagtggaagcgctgaaaccgatccatcccgacagcgtatcgatcctgcgtaccaccgacgaccgtctgatatacgagatgaccgatcgccatggtcgcaccaagcgtttgctggccgacgaggtactgcacctgcgctatcacaccgatgacggcatccttgggcgctccccgcttcaggtcgccagggacacggtggggctggcgctggccgagcgcacccacggggccaagatgttcgagcaaggcaccaagctgtccggcgtgatcgagacagcaccgggcaccaccaaggagcaggccgcgcagattcgtgagagctgggccgctggacaggtaggggtatcgaaccacggcaaaaccccggtgctgccccaaggggcgaagtacagcactgtgagcatgaccctggaggatgccgagtggatcgaggcgcgccgcctgtccgtcgaggaagtggcccgcctgttccgtgtacctcctgtgctgattggtgacctgcgggaggcgaactactccaacgccgtggagctgggccgctacttcgtcacccataccctgcgccgtcatctggtcatgtgggagcaggccatcagccgcagcctaatcaatgacccgaccaccttctacgccgaacacaacgtagagggactgctacgtggcgactccctcaagcgcgcccagttctacgactacgccgtaaaaggcaaatggatgctgcgcagtgaagtgcgccagcttgagaacctgcctgccctggagggcatcgacgatgaaaaagaagcgaccccgcctgaagatgctgcaaccccgcctcaaggaagcaccgaccctgctcgaagcactcaaggccaaggcaagggagaagacgaagcgtga

SEQ ID NO: 340076 - DNA, 510 bp, Pseudomonas aeruginosa
atggaacgccgagcagccgcaagcctgaagcacaatggccgaacgctgttcggctatgccgcccgcttcggtgaacctacccccattgaggggttcaccgagatcatccagccgggagcattctcccgctcccttgcagggccagccgccgccagcattcgagccgtatacgagcacaaggacgcagccctgctgggccgtgtcggggctggcaccctgcgccttaccgaggacgacgtgggcctggcattcgaactcgatttgcccgataccaccgtgggccgtgatgtagccgaactggtgaagcgtggtgacgtggccgggtgctcgttcggctttgtctcggaagacgagcgatgggagggggagactcggcatctgctggacgtgaatctccatgaggtgactatcaccgccagcccggcctacccctcgaccaccgtccaagtccgcagcaaagagcctcgtggccttcgcctggcccgcctgtacctggagtgcctgcaatga

SEQ ID NO: 340077 - DNA, 1239 bp, Pseudomonas aeruginosa
atgaaacttagtgcccttcgtgagcagcgttccgccaaggtcgccgcgatgaagaacctggtggacaaggctggcgcggagagccgcgacttgtctgccgatgagatcaagcagttcgacgccctgaagtctgaagagcgcaccctcggcgagcagatcgatcgagcggagtacctgcaagaggtagagcgccgcgcaatgggtgagccggtgtcgagcaatgcctgcaccgacttcgaaaagctggccggcggcgtgtcggtcgtgaaggtaattcgcgcccagatggagggtcgtagcttggacggcgcagaggccgagtatgcgcaggaagccgagcgccgcagtggccgtaaggccgagggcgctttcgtgcccatgcgcgccctggagacccgtgccgacggcgtgaataccactaccaccgcgccgcagatcgtccccaccgtccaccgcgctgaccagtacatcgagccgctgcgcgagcgcctgctggcccgccagctcggtgtccgcgtgctgaccggcctgtccggcaacatcgtaattccgaagttcggctccggcctgactctgggctgggtaggtgaaaacgagccagtaccggaaggcgaaatgaccttcggcaatgtcgagctgtcgcccaagcacactggcggcaagaccgaaatgtcccggcagctcatccagcagtccagccccggcattgagcaactggtgcgcgatgacctgtcctacctggtagcgaaggccatcgacctggcactcatcaacggcaccggtgccaagcagccactgggcgtattgaacgctcccggcacccagacgggtaccctgaccagcgccgactggcccagcatcctggcattgcctgaactgctggagctggtgaacgccaatgccgtgaactggctaaccaccccacaggtgaagaccaagctggcagccgccgagaaggtaccgggctcgggctcgggcttcctgtaccaaggtggccagatggccgaccttcccctggcagccaccaagcaagtgccagccgacaccctgatcctgggtgattggtcccaggtgctgctgggcgtctggtccgagctggacatcttggtgaacccctacgccgaaccggcctatagccgcggtggcgtgcaggtgcgcgcgatggcgaccgtggacgtggcgatccgtcacccggaaggcttcgtcatcgtgaagaacgcactggccgggggcgagtga

SEQ ID NO: 340078 - DNA, 468 bp, Pseudomonas aeruginosa
atggcaacccgcaagaccaaaggaaaatccaaggccaaagccccaccgtttgccatgatgccgaaggccatgattcagtctcgtggctatcgctccctgagctttgttgcgcgtggcgtgctggtggaactgctggcgcagtacaacggggataacaacggcgatttgtcggccacccgcaccatggcggaagagtggggcattggcgcgcccgtcacgctgcagaaggcacttaaagagcttgagcgcaggggctggatcatccagacgcgaaccagcattttctcccgccacggggccaagtgcgccctctatgcgctgtcctggcttcctatcgacgagtgccctgggaaagacctggaggtagggccgaccaaggcaccacccactccacttccccggctcatcaattccatttcttcctgttcagaaagtgaacacgtaccggttcagaaagtgaacacgtag

SEQ ID NO: 340079 - DNA, 210 bp, Pseudomonas aeruginosa
atggagtttttgaacgactacacgtctggcgggttgttcgaagcagtcgctctgatcgctcggcatctggagttcgagggtgaggacttgggcgagttggtggagcgagagcaggagaaagagaaaacccttgccgagtgggcgctcgacaagggtcgtgactctggaaggaaaagtcggggccagtgtggcagagacggaaacaactga

SEQ ID NO: 340080 - DNA, 216 bp, Pseudomonas aeruginosa
atgaccgcagaagacaaagccatcgaggccaaagcgcgctatgtcgcacagaagcacggctatttcgccatcaagtccacgaaacgcacactgtccgccgaaaacggcggtggcttcatgctggtccaggcggccaccaatcgcatcgaggctggagagcgcttcgacatgagcgctgaacaggtcatcactttcttcggggggggccaagtatga

SEQ ID NO: 340081 - DNA, 246 bp, Pseudomonas aeruginosa
atgagcactcgaatcccagggctgatcgccgacgcggtggaagctgtgagctacggtcgggagcacgctcgatggcttgccgcccttgctatcgctacccggcttgacctgaagcacaacgaggggcgcgaggcgatggaactggccagcctggcgcattatctggccggcgactgccacaactacctcgactgcgaggtcgagcgcctgcgcaaagagatcgacggagcggaggcggtgcaatga

SEQ ID NO: 340082 - DNA, 648 bp, Pseudomonas aeruginosa
atgacaacatttgatgtaatggtggttctctctctctgcgtgggatacgatgccgtctctagtatctcgttcgataggtggtccgtaatggcaaagaaaactggagtgaggaagaaaaccgagacgttcactactcggctggagccaaaagagaggtatgttcttgaactgctatcaaggatttcaaacaaatctattgcgaagaccctcgaagaaggaataggtctgcttgcgcatgaaacgcggattaggatcgctggaaggccgctagagcaatatcctctttcatccgtggttaatgccctctggagtccgcaagagtggcataggctattgaatatgcttgcggtgtctcctgggctcctgaactattcagaacagtgtaaggtttcgatactgttgaagtctaagccgctatgtgatggggcgagatttaataaggatggtgcactaatgtttattgaggttgtgccggccttaattgaaacggcttggcctttgatcgaagaaagggcggaacgtatggcggagggagatccagcgccaccacctacgctaaaggaaattcaagagcagtatggctcttcggttttgcctaaaaaacatgaagatgggcttaccatagactactcgaccttcttcgattag

SEQ ID NO: 340083 - DNA, 177 bp, Pseudomonas aeruginosa
atgatcgattgggaattcctcgttccggtggctatgggctgggcgctgcatcactggtggacggtgatgacggcgctagcggcggtagggggggccgccatgaggggcgggccgcgccgccggccaggagcggaaggcatgagcgataggccgaaggcgcggccgacgcccctgtaa

SEQ ID NO: 340084 - DNA, 624 bp, Pseudomonas aeruginosa
gtggctactgcgaaagaaaggcagaaacagagcagattcatatgtctggtagttgggtttgtggcattgataccgctgttgatgatttcattctggaggtactccagcctgaaaagtcagtatccggaagatgaatatactcaaagagtgtttgatacagggaatctcgttcaaccttttgcaacttcaggtgctgtgctgttgatgtcttgggttttcgtagcgtggtcaagccaggctaagattgcgattgttctggtaccagtcctgcttgtctgcgccctgtttgtgctttttaaaatggctcagtcaataagcagtacctattttggggtgttggtagatcctgttaatgatagggttttgcttcctaaagatatggccaactactctgtgtcggattatttgaactttaagtttgttactgatcttgggcgtatggaggaggttcctctaagtcagattaagcggatcacgcggcagggcggtaatcagctcttcattcatgggaagttcggctcgcgcggtatgaagttctcgaacaagcaaaagcgcgatgagtgcctttctgctattgaagaggggagctcggctgctgtgtctatggagttcgaaggggtataa

SEQ ID NO: 340085 - DNA, 1050 bp, Pseudomonas aeruginosa
atgaaaaaacaatgtgccgactgtgacaaagaaatccccaaaacctccaagcaatggaaaaagcagatttattgttcaactaagtgtcgaaaggcagcacatagaaagaaaacctctcaaaaaagccgagaagagcagaagagagcaaatatgcgccaaaacgacgaggttctatatttagtccgacagtgcaggagagcaggcacagttcagatactatcagggcataactctcaatcttttatagagaccatgaatctagttagagaaaggccaaatgccaatgtaaatctttgccacatagcccctgttaaaggaaagaactccattggtctatttcatgcacaaaatttattctggggaggctcctaccaaaacaaaaagctcggaaacaagcaacttggcaaaggtctctcaatagaaaaaaagcatctaaagaagaaatggagcgtatcagaagacctatctacaaacgacatacttctaaagatagaggactaccttggcgacacaatatcggactacatcagggagtgccccatacgaaaatctaaaaaagcacaagctgccagaaagataattctcgcaaaaccagaggaaaatttcgaaaaattaatgacgctcagctacacctgcctactagaacaactcaagccactgagcaacaagtcttcctccaggaaacacaaacaaaaaagtgagtccaagtatatagtttacattgacgagataactagatttatctcatataacaatgcgaacagagctaattttcgaagacttagaaagattctactcatgggctatattgcgcttgaacgcatcgagtgtagcaggacctacaacaaggacttcaaatccaaatacggtgcactttccaaaaaatacaaacatgccaacctaaaaagacatgacaactggtcaatactaaaagacttgatttacgaaacctctttccgagcactacaaggagagaagatagacataaataaatcatgcagagctataaataaatatataactctaaccaagaacagccccttcagttaa

SEQ ID NO: 340086 - DNA, 225 bp, Pseudomonas aeruginosa
atgagctacttcaaaaacactgaagagtcacttcaaatacacgagtacatgaccgaggaagggctgtgcttcggttgcggcaggatgatctatgggggagtggtccgctacgacggttacgctgattcggagaccgtgaaggggctcttcttccatccgagttgtgctgcggtggtaggacagcgacttatctgcgacggatatccaaaccgccgcgagggctga

SEQ ID NO: 340087 - DNA, 843 bp, Pseudomonas aeruginosa
atgtttgtcgaattgcatttcatgtgcctggcctgcggcggtattatgcatgaggtgttggactgtccagaggcctatgatgctgctaaaactaacgaggatagtgagacatctataacatctcaggttgggtgtgtgtggtgtaagggtgaacatgagtttattgtaaaaaattcatctagcggggtgttggttgaagcctctgagcaggcacgtgttgagtggttgggtgatccatatatgggacattctggctacgaagaagagctagcttgggccatcgaatctgatccgaaggaaccatatcgaatattctccgagcaagtgcacagcgtagctggtctgctcgatgtagatatgccggagaatatagagttctctttgcatgtaatgctgcatgggcacttagttgcagccgtagagggctatctggcaaacacttttgtcgggttggtgacagcttctgatagtcttacacgaaaaatgtatgagacggttccagagttaaggaataagaaatttgactggagagaggttgtggagcaggagaatccggcaaagcttgcgatagcatcatatttgtctgatctggtttttcataatctctctaaagtcggcctgatgtttaaatcggttcttggttatgagttcttaaatgttgagtggctttatagagcgattgaagtaaggcacgattgcgttcacagggctggtttcactaagaaggggcagaaagtatctgtgaatagaatcagtatcgatgatcttcgatcgcaagtagtggagcttgttgaatctgtagaggcgcatgccaagttagtccgtgagggaaaactgctttga

SEQ ID NO: 340088 - DNA, 1395 bp, Pseudomonas aeruginosa
atggccagccaacgcaacaacggcatcctcatcggcggcaagcgccccgagtacgtccacagcgcccagggcaccggcctgcggcgcatcctcgggctccccgccctggtcttcttcgggctggtctacatggttccgctgaccatgttcaccacctacggggtagtcaccgagatcaccggcggtcgcaccgccagcgcctacctgatcaccctggcggcgatgctcttcaccgccttttcctacagcttcatggtgaagaaatatcccatcgccggctcggcctattcctataccagcctcagcttcggcccctgcgtcggcttcctcgccggctggtcgctgctgctcgactacctgttcctgccgatgatcaactacctgctcatcggcctgttcctcaacatcgccttcccgatggtgccggcctgggtcttcgtgctcgcggcgatcggcctggtcaccgtgctcaacgtgatcggcatcagctcggtggccggcatgagcaacgtgatcgtcggcgcccagttcgtcttcgccgtggtgttcgtcgccatggcggtcaagcacctggccggcatcccctcgctggacctgagcctgcccttcgtcggcgacggcagccagccgggcttcgccccgttgatggccggcgcggcggtgctgtgcctgtcgttcctcggcttcgacgcggtctcgaccctggccgaggaaacccgcgacccgcaacgcgacatcccgcgcgccatcgtcatcaccacggtcggcgccggcctgctgttcaccgtgctggcggtcttcagccaactggtgttccccggcagcgtattccaggacgccgagtcggcggccaacgaagtgatgctggcggccggcggcaagttcctcgccagcttcttcaccgccgcctacgtcgccggcgccgccggctcggcgctggcctcgcaggcctcggtgtcgcgcatcctctacagcatgggccgcgacggcatcctgccgcggcgcgtgttcggcagcctctcggagcgcttcaagacgccagtgatcgcgatcctggtggtctcggtgatttccctgctggcggtggtcatcgacctcaccaccctggcctcgatgatcagcttcggcgcgctggtggcgttctccgcggtgaacctggcggtgatccgcagctacctgctgctcgacggccgccgcgccccgcgcgacctgctgcgctacgggctggtgccggccatcggcctgggcctgaccctgtggctgtggaccagcctctcggcgctgaccctggtgatcggcctgacctggttcgccgccggcctcgcctacctggcgttgcataccggcggtttccgccgcaaggcgccgaccgtgaccttctccgaacagaactga

SEQ ID NO: 340089 - DNA, 435 bp, Pseudomonas aeruginosa; identical to SEQ ID NO: 325092

SEQ ID NO: 340090 - DNA, 423 bp, Pseudomonas aeruginosa
atgattgaagatccgcgagtgactgctttagatgaccattactacaagggaagcctaaatttcgaccagttcgtgctgggggcaaccctggccgcatctgcataccttgcgcagacgcagaggtatgcacagctgggctggaatgaagagactctgttgctcctgccgcttctggtgcttgtcctgtctgcgtggctaggcttcaagagaatcgcttggacaatccacctcttaaaaatgaacgctcgctaccttgagctatgtgcaggaaacccaggcatagatttctcgaaggtcctcgaagccaccaaagaaatcggcgacaagaccgggttcttctatcgatggcgtaacaggacgatcttccttgctttcgcgtgtcatattggcgtgaagctggcctccacctacccgatattctga

SEQ ID NO: 340091 - DNA, 228 bp, Pseudomonas aeruginosa
atggagctttggccctgcaactggacggcattcatcgtcttcgaggcgatgagtacccagtggcgggccggcatgtgtggcgcaacaggcctggactacaccgctttgccggtggtgatgcagatgtgcggcgtagccgctggtgagcaggccgcggtgttcgcggatatccgggtgatggaagacgctgcgctgaaggccttccacgagcagaggaagtcgggatga

SEQ ID NO: 340092 - DNA, 234 bp, Pseudomonas aeruginosa
atgtgggtcgcggtcagcgtgcttcaagaagttctgcgcgttatgaatgacggcgagcgcctcttttcgattaagccccgagctctcgatgagctccgaacgccaagactcgttcggtttctgatgctccacaagatcagcgaacaagccgaaagcagccgcggcaagggtgcgaactgccagggggtcatgatcggccaggagcaggcctatcgcttcatccagctggcgtga

SEQ ID NO: 340093 - DNA, 531 bp, Pseudomonas aeruginosa
atgggcctgacccaaaaagaactggccgatgctgccggcatcagcttggtgcaaatagctaggtacgagactggacgctcaacgccgcgcctcagcggagcccttaagctcgcccgcgcactgaagatggacgcctttgacctgatgcccgaactcaagaaaaccaccattgaagtggaaattgagctcagcgacgatgagctagcccgattcgaagcggaagcggaggagctcggcataaccacagaagagctactgaggaagcgggccggagttgaggaagacgaattctcagaagagctgcccgatacacaaggccggaaaatcagcctcaacatttcagcagagcatgaagccaagatccacgagttcgccaagaaggaaggcgtctcattcgacgctgcggtacagctgatccttgcccagggactgaaggataggcttgatgccgattccaccatactcgccaaactagagcaggacattcccggcgcctatgaaaagctggtggagctgctcaggaagcaataa

SEQ ID NO: 340094 - DNA, 174 bp, Pseudomonas aeruginosa
atgagaaaggcagaggcaaaggtgcagacggttttgaggctggccccggccatgcgtgagtggttgcttggggaggctgattcgaacgggcgcaccatcaacggcgaggtcatctatcgcctgaaaaagatgatggaagaggagacgcagaatgagcaaaaacagcgggcatga

SEQ ID NO: 340095 - DNA, 1080 bp, Pseudomonas aeruginosa
atgagcatcgaactgcgcggcggcgtgcgcgcctccgcggtcatcggcgacagtgccttcgcccgccaggccgcgcgtttcctgccggacacccgcagtcgcgcggtgagtgccttcgacatccagcagaaggcccgcctggaagaggcggacggcctcgacggcgcactgttcaccgtttccgctgcctggcccgacccctggctggtcgccggctgggctttggccgcggcgccgcgcctgcgcgccaccgtcgcgcaccgaccggggagcgcccagccgaccgttgccgcgcgcgccctggccactctcgacggcctgtccaacgggcgcgccggcgtacatctggtgatcggctccagcgacgccgacgtgcgccgcgacggcgacttcgccgacaaggacgaacgctaccggcgcgccgtggagtacctggaggtcttcacccgcgccctggaaagccgcgaccccttcgactaccacggcgagttctaccggctggaggacgccggcagcggcttcctgccgatccagcggccgcgcccgccgctatccgttggcggctcctcggcgcaggcacaacgcctggcggtgcgcttcgctgacgtctacgccggccacttcgccagccccacgcagaccgcggagctcaagcgcaggctgaacgaggaggcggcggagcagggccggcggctgaagttctggaagcacttccaggtgatcctcggcgacagtccggcggcggccctggacatcgccgagcactaccgccaggccgctttcgaactgcttctggcacggcccctcgacgaactggcggcatcgccgcaggtcgcccgcgacggcgagcgcgaccggctcgcccggctggagccggatgccttgcgcgaatgggtggcgaataccgtgcagcgcagcttcgccggggtgctggtgggcagcgtcggcgaggtggcggaacagatcctggcctttcatcgcgccggcatcgagatcgtccagctcgaggccaccaccgagaacgccgaggacatccgcttgcgccgccaactgatcgagcgcctgaggcgcgacgcatga

SEQ ID NO: 340096 - DNA, 345 bp, Pseudomonas aeruginosa
atgctgtcgccccagtccggcgcgaacgtccaagcgatgatgcgattgccggtgatgaccaggaccaggtccggctcgccctggagcttccagacgatccgcgcattgacgacgggcgggccgtccgtgccaatgctgaccgtccaagtgcgttcttccagggcggcaaaacccagcggcggcgacgcctggccggatagcgtgatgccgtctgcatcttcccgctcgatggcggtcagcgtgcgcggactgaaatatgcgttccagactgatgccggtcgtacctgggtgctgacgacgttgcccagctccattgtggtcggaatcagccacaagcggttgtag

SEQ ID NO: 340097 - DNA, 285 bp, Pseudomonas aeruginosa
atgacatttcgcgtcgaaaccctcttcgatcagacccatacctgctccacgggtcatgatgatcctgatcacatcaccgaccgcgacctgcgcacctggacttgttcgcccccccttcgcgacgtcttccagtgccgtcagatggcctacctcgatgcgcaggcgatcggcgtgcaactggtgaccctgcgcagcgaatccgtgcgtggcaactttgtgttccccgggccggatagccggggccaccatccgccgcaaactggcggcgctggccagcctgtttga

SEQ ID NO: 340098 - DNA, 621 bp, Pseudomonas aeruginosa
atgcgcgacatcggacatccgagtgagctggaaccaagactgacggctgagtatctcgatgtggtctgcaacaatgccttgcatgcggcttacaaggcgctggaagcagcgtcgacggatgacgataccaactggacaaagggtaccctatcgtacgggcgcgtccatggccgtttcatcaagatgagcgtcgcccccgagctcccttggttccgattgactaacaaaaccatggactacacgcccagcatcaacggtgtgctcctccaggtagtcatggatgatccgcgggagcgaaagaagtcccatcgccttgctgctaatggtgtcgagcgctaccaagctagtcttttgggtccatccagtgaccgtaaccttacttggggcctctacatcgacagcgatggaaacccagacgggcaagagctcacggcaacaattatgggatttgactcgaatctcaacgtcgtatgccaatgggttcacgactatgtgccgcttgtctctgttcgcaccaccgacctgccgcaggaagttgagattcaggaacaattcccgctgcgtcgaaacaaagatgccgagcaaggcaagctagacgatacagaactgaaagatgaataa

SEQ ID NO: 340099 - DNA, 891 bp, Pseudomonas aeruginosa
atgcccaggcgcagttccgttgagctggagcagtgtcactttcgaagcctaaggtcatcaacccagaccttgaagaagactattgcagcgcaggttgaaatgttcgagttgctggtagatgagctcgaaaaggaaattgcattccctcccgtggacttcaaagctttcgatggggccattgattcgacgtcgaaaattgagcaggtggcggaaaaatttcgccgagagcaaggtctagggcttgggccgatttcaagcgtgaccaagctggctgagaagattggggtcttagttgttgacctgaacgaagcagatgaaaaggtggatgccttctctttgtacaacaagcgtcccttaatcgtccgcagcactgccaaaacaagcccaggtcgccaaagattcgaccttgctcatgagttagggcatctgatcatgcatcagggcgttgaaacgggttgccgtgtcactgaagaccaggccaaccagttcgctagcgcgtttttgatgccacgagccagttttgcttctgagtttcctgcgatgcggggccgatacctcaattggcccgccctcaaggagcttaagctgcgatggaaagtcagtttcaaagccctgatctaccgtgctcgaagcctagatctgcttacggttgagcaagccaaatcagggttcacttatctgaacaggaagggcttcaccaaagacgaggagttcgacgatcttatccctatggagtcgccggtactcgtgcagcgtgcaattgacctcctggactatgcgacttggaaaagggttttaggcgactcaggcctgacttcccgaaaggtaaaggagcagttcctactcaaagtaccagtctcgccgcttcgtctagtggggcgagagagctga

SEQ ID NO: 340100 - DNA, 1557 bp, Pseudomonas aeruginosa
atgtacgaggatggggagatcgaagagcagtttctcttcgtgaccaagacggatgagaatggcgatcctgtgtcgaaacaggcggttcccaagcggcatcgtgacaccatccatctccactacctccctgccaggcgcgacccttccgatcacgtagcttacggggcgacagcgcttctgggccggctccttcgtgccgccaattggaatgacgaccgcgagacagtaaaggaactcacggagcagatcaccgattgtctagtcgagaacgagtcagtaaaaacgcttagcgatagcctcaccaccgcttggcagcgcctgcacaagggggacttcttcgcctcgccccgcctgacgttcgagaactctgagatcgaagcattacttcggcacctcacggtctctttcagcccaggtcatggagagaaccaggttgattttgcacgtctgagtgacgggcagaaatccatgctttacctctcgcttgttttgtccgcgctcacgatagggcgagaggtgaggtctggagagaacaaggccttcgatccccataagctgaaaccgccggcattcacaattcttgcggtggaggagccggagaacagcctttcgccgcattatctcggacgcatcgtcaattcactgaaatcctcggtcgacgtggacgcccaggctctaatcgctacccaagcgccttccatgctgcggcgggttgagcctgaaaacatccggtaccttcgactgaatggtgatcggtgcacccaagtcacaactattcagctacctccgaagcttactgacgcgtacaagtttgttagggaggccgtgcaggcctttcctgaggtctatttcgcccgtctggtcgtgctgggagaaggtgatagcgaagagatcgtgctcccaaggatcctccaggcgaaaggtgcgcctgtcgatgagtttgccgttgcaatcgcaccattgggtggccgccatgtaaaccacttctggcggctgctttctgcgatcggcaccccttacatcacgcttctggaccttgatgtcggccgtcaccaaggaggctgggggcgcgtgaagtatgtaagggatcagctagatcagtttgcacctcaagacagcctgcccgctggctggccttaccatgaatggaacgatccccagacgcctgtgcggacccataactggttcgagggtgggacggtaagtctgttcaatgagctcgaaaaacgtaacgtcttcttctccgaccccttggatttagattttgcaatgctgtgcgcattcccggacgcctatgaggctgaagccgtcccggcaaccttgaagagccacaccaaggtcctgggagatagccatttcaatccagaccagtacgacgaagaggagcagcgctggttcgaggcctaccacaaactcttcaagttgagcagcaagccggcggcacacttgggcgcgttgggaaggctcaccgatcaggaacttcttgatggcctgcctgactcgctcgatcggctagcagacaaggtgatcgaacggctcgatgagtcgccggaatga

SEQ ID NO: 340101 - DNA, 1671 bp, Pseudomonas aeruginosa
atgatcaagcctgaacgctgggttccctctccaggaattcgactggaaagaaacgcgtgggaggcagttcgtgagcgcgaaaggtcagtggtgcttactgctggccctggtgcgggaaaaacagaggtgctcgcacagcgagctgactttcttctgcgtacaaacgcctgccgctacccaaaacgcatccttgccgtttcattcaagacggacgcaagccggaacctcaaaaagcgagtacagcttcgctgtggttgggatcgcgcgtcacgtttcgacagcgttaccttccatggctttgcgaagcggatcatcgaccggttccatccagttttggtggatgaggcgttgagccaggactatgaaattggtccggaatacatctggggccaacagatcacctttaaacacctacttccgttcgcccttcggatcgtgaaagagagcgcgatcgcacgcaatacgatacggcagtcctatacgcacgtgttcctcgacgaattccaagattgtacggcagaccaatacgaactgatcaaactgctgttccacgacacgccggcgatcctgaccgccgtaggggacactaagcagaccatcatgggatgggcgggggcgctcgaggggatattcaaaacctacgctgacgactttgatgcccgaccgctacgtctgtttttgaacttcagatcccagccagcactactgcgaatgcagaacgatattattcgggagatcgaggctgaggcagtgatgccggatgatctcgccaagggcgaaggcggggagattctggctgggaatttccgaaatgccgctgaggaagctgaggctcttgcgaaccttattcagcgctggattactcaggacggcataccacctagtgaaattgccgttttgatgcctcgccaagttgaagagtatggcgaatcactaatgctgcggctcactgagcggggaatcgctcatcgtaatgatcacgaccttcaggacctactgaaagagccagcagtcggccttgtaatcgattacctcacttgcctctacggccagggcgaggcagaagcatggtcacggttaatggaccatttcaccccgttcgaagacgacgacagccaaaatagcgctcaacggatctttgaagagacataccgggatcacctcaagaaggttaagcaggagcgaaaaacagcgagcccatatggctcgtggtgggatctgaccaatgagttcctaaagaaacttggcctgtcgtccgtcagcgcactctccgccgactatcgctcaaaggcccgcttgttagaggttgttcgagacgttcgtgatcgtatccgggcgcaacttgcgattgagccagatttactcaaggtattggcacgcctttctgacgattcggcagttcgcttcctaaccatgcacaaaagcaaaggtctggagttccattcggtagttgtgctcggcgtcgagaagcaaacgttctgggggcacctcgaccaagagcgctgcgtgttttttgtaggagtttctcgggccaaacacagtcttgcgctcaccactgcggactatcgaccacgccctaagaacgtcaagagatgggatgagcatcgagctccacatggtgagtttgtgagtcatgttgttcgacacctcaccagtcagcactttaagtag

SEQ ID NO: 340102 - DNA, 963 bp, Pseudomonas aeruginosa
  misc_feature (894)..(903): n is a, c, g, or t
atgccagcgaaaaaaagctctaacgctaatcctaaccagccactgacctccttccttttggatgagagcttcgcggaaagctccaacgcggaagcattcattgttccgctggcccgaaaatttaacgacttcggctaccttatagcatgctccataggctatcgcgataaacaagggcagatttattggcttgaagggaggtgtgccattcaaggagaaaaagatctctttgaggctgttggcagtctgctttcgcctgaaaaacctgaaatttaccaccgcgaaattaaaaaaccgttccgcacactgctggtagatgcaaagtcatacagctttttgcggcggacgctaggcgagactcaggcaaggaaaatcctagctagcttacaagatgtagcaacgactaaaagccggaccttcaccaataattggtatgacttctataaagaagaagtgttcacccatgcgatgattagatcaagcgaagcctactttgcttatcgcaagggggagcgcatattgcaaggcttgcaagagcttgatgctgatgcacgtcaacctttcagtattgagttgaagggaactggcccccaagcccagttcgacttccagtttgatagcaaaaattttctcagagggcggatcgcggtcattatcggccagaatggctgcggcaaaacttcggcgcttgcaaagctctcaaaagttttggccgacaaagaaagtcgatctgctgaaattaccaatcgccccgaactgaatcaagttatagctttcattcacactgcatctgttcgacagttctcccccacgtcaaaggaggggctcgcgagagctaggatttttacattcaatccggcaagcccccgcaagcaaggcgaggactctgcaacnnnnnnnnnnaacatctctcggatattttgcgcactgaattcagtgagcttgaagttctggtcccaatga

SEQ ID NO: 340103 - DNA, 639 bp, Pseudomonas aeruginosa
atgaaaaaagacagaccaggagagtcaggaagaatggcgctgtacgatgtagactatatgccattttcagagtggaagcgtggtggcgaacaacgtattttaaagaatgcggcaaatgtcgcctcttggcagtcattgaaatttgtcgataaacacggaaaggaacgtaagcttagcttgggccagcaggccttcctaaaattcattttggttgcactagctaactctgggccggcatccgcgttgattattgatgagccggagaattttctgcatccaaaccttatatcaaggtttatgcgtagtctaaataaaattctgaacggtacacgttcggtagcattcatcgccacacactccccgtttgtcgtcagggaagttcaaagtgctcaggtgcatgtgatgcgcgatgaagatggagtactcactgtaagaaagccgcgcatgcaaactctaggagccaatgtcgcatcaatctcgaatgaggtatttggcgacgatctaccccatcatctctatgaagagttgttagagctagcagagcaagagagcaatacgttttcggaggcacttgatagatactcttcagagttgagcgccgaagctctcatgcgcctgcgtaggatgatggagcagtaa

SEQ ID NO: 340104 - DNA, 813 bp, Pseudomonas aeruginosa
atgaggaaactcgatccgcccgtcattcaagataatttgcttctcagctttctgcagcactctagaaaggaaaatgcgaaagcaattgtgcatcgcatagctgatattgctgagcgctatcaagcgtatgatatttgcaatggtgatccctggggtatcgctgaggacgtgtcatacgccccactaaaagaagaccttaacggaatttataaagcgccaccatccgttctaaatttcattgcgacgctgcgatctcaacttgacggcgtgtgccccgtgtgtgggcgagatgcactggggaccttggatcattacctacccaaagcaaattacgcagaattctcattttactcaaaaaatttggtgccagcttgtgataggtgcaacaacaagagaagcaacgcgttcaaaggcgcgaatgcaggagagcgccctctgcatccatattttgactactttgcaaataacaagatcctgtccgtacgatttgaacctgattggaatgcgccactgctgacgccaataccttacaatgtgaccggaagtcagcttgctgttgtccagtggcacatcgacaatgtcctaaggcgagcgggaatcgatgaatatctgacgacacaatggggggtcttgatcaatggaataaggacgtttcttccagatcgatctagcttggtaagcataaaaacggaaattcagcggctcgaaagctatgaatttgaatgcggaaagtcggctaacggatggcgttgcgccttctggcatggattgaacctaaatgatgatgcgctcaggtacttgcagtcgctatga

SEQ ID NO: 340105 - DNA, 1107 bp, Pseudomonas aeruginosa
atggaaatgttgtcgcgccgaccggtgcgctcatcgatgccgctgcgcatcgtgcgctcctgctcgcgatattcggcggtgaggttgacgaagccgctatcgccgaaggccagtccgatgttccccccgccgccatgggtgaagccgtcgccgtcgccggtctgcccgacgtcagcggccgccgacccgccgtggtcggcggacttgaggatgacgttgatcaccccggcgatggcgtccgaaccgtactgcgccgaggcgccgtcgcgcagcacctcgacccgctcgatggcgttgatcgggatggtgtccagatcgacgccggtggagcccttctccagccccccgctgatattgagattggccgtttcgtggcgacgcttgccgttcaccagcaccagcacatggttggggctcagcccgcgcagcgactgcgtgtgggtcaacgccgaggcgttgaacggctgggcctggcgggtcagcgagggcagcagtttgaccagtgcatcgcgcaggtcgaccgcgccgctactacgtagctgggtagcgctgaccacgtcgatcgggctcaggctgtcctgcgccttcacctcgctcttgcgcgtgccggtgaccaccacggtggacaaggtcggtgccaccgccgcacctcgcgtctcctgcacaggcgcctgtccgccgcgcaggacgaaggcaccgctttcgtcctgcgcgtatgccagcccgctgccggccagggcacgccgcaaggcgtcctcgacactgagccggccgcggatatccggtccgcgcaaccccgccaccaggcgctggtcgaaggcgataggcacgtgtccctggcgcacgatgttcaacaacacctcggccagttcgccgggcgctatgtcgaatacccggggcgccgtggccgcgtcgcgcggcccaccgtcggcggcctgcacctcgccctgcagcgcgcaggcgagccccaccgcacagagcacgggggtcaacgaacgagaggaaagacgtacatcgggcatggtcgaatcgtcctggatggaattcgcccatgagtgcaatccgacgccggctttttcagcgtcgggcaatatgaatttcgcataa

SEQ ID NO: 340106 - DNA, 1248 bp, Pseudomonas aeruginosa
  misc_feature (18)..(52): n is a, c, g, or t
ttggtcagttcgccgccnnnnnnnnnnnnnnnnnnnnnnnnnnnnnnnnnnntcgccgccgacgtcgtagccgacgtagccgggcggcgcgccgatcaggcgctggtcggcatgctcggcgctgaactcggacatgtcgaagcggatgtaggcgctctcatcgccgaacagcaggctggtgacggtcttcgccagctcggtcttgccgaccccggtgggcccggcgaggaaggccacgccgcgcgggcggttgcccttgcggctggcgccgaccccggtcatcgcgcgcttgacgatgtccagcatgtgggtcaccgcgtgctgctggcccttgacccggcggcggacgatctcgtcggcctggcggatgcgctggcggtcgatcttcagccaggggtcttcggtgacgccgaccttgtagcggcgcacggcgtcggcgatgcgttccatggccaggccttccacgcgcgccagctggacgatggcgttgagatcgaggagcagcaggccttcggtgttctcgacgaaggttgcggcggcctgttgcagggcctcctcggcgacgcccgcgccgccgagcccgcggagcagcgccggggccagggcccggcgcgccggctggtcgggcttcgacaccgggatatggcgcaggcgcgggttgtccaccagcagccagtcgggcaggtcgccttccttttccaccacccacagcacgctgttgaagaacggtttgcgctgttccccggcgggacggctgcgggcctggtgggagagcaccagggcctgggtgaacaactgatgctcggcggcgctcagggcgtcgttgcgcaccgccaggcgcgaggcgaagtcgacgatcagggcgatcggctcgccgctacggttgaccaggcgttgcagggtcgcgccgagcaggtcgatgccggccggcgcggcgccgtctaccggggtcaggccgaggtcgagaagcacctgcggagtggcccccgcctcgctgcccggccggccgagcacgcggaacccggccagcggatcccaggccagcacctgggcgtagccggcgtccagcaaggcgtcgcagagggtctggttgaagctctgcgcggtgaccgtacccggcaccacttcgcaggcttgcaggtcgcggatgttcccggagaggacgaattggctcttgaggggcaggaagcgcaggaggtcgcgcaaccagcgtggcttttcgaacagtgcagtccctggcatcgatag

SEQ ID NO: 340107 - DNA, 744 bp, Pseudomonas aeruginosa
atgctcgacccgcccctcgcccaccagcagggcgccctgggcgccgagggtgacgatcaccctgccggcgcccatttcgcgcaggcgctcggcggcacgtccggcgctctccagggagtccaccggcaggcggcagagcagttcgctttcggtctcgttggggaccaggtagtccaccagcggcagccagtccgccggcacgtcgcgggtggccggcgccgggttgaggatcaccgtcttgcccagcgcatgggcccggcgcagcacatggccaatcgtctccagcgggctttccaactggcagaccaccacctgcgcctgctccagcaagtgttcgtggcgcgccagcacggccggcgacaggtggccgttgccgccggcgacgatgacgatggcgttctggctgctgtcgtcgaccacgatcagcgccaccccgctggactccccggccacccgctcgacgccctggcagtcgatgccctcggcctgcagcgcgcggtacaactggtcgccgtaggcatcgtcgccaaggcagccgatcatcgccaccccagcgccgagacgcgccgcggcgaccgcctggttggcgcccttgccgccgggaatggtggtgaaggactgcccggcgagggtctcgccgccccgtggcaggcgcggcgcgcgcactaccaggtccatgttcaggctgcccaccaccagtactttcgcttgcatcgttgcgtccttgttccagcctctctctag

SEQ ID NO: 340108 - DNA, 1047 bp, Pseudomonas aeruginosa
atgtcccgtcgtctgcccttcctgctgcgttgcgcgctgttctgcggcgccggtctgctggctgccaccgcccaggcgaggatggagtcgctggacgacgaccagctttccgacgtggtcggccaggccttcatcaacctcaccaccgacgccgccaacggactgaacttcacccgcatcaacttcggcgccgacatcgagacccaactgaacatgaagaagctgcagttgggccagtacaaccgcagcggcgagcttgccggcagtgccgacatcgccatcgacaacttcgccctgggcacggtcaacgacgccaccggcgcgatcaacccgttcctcatcagcaatccctacatcgagttcgcctacgacggtagcaagatggtcggcatccgtatcggtttcggcgaagccaagggctacctctcgggcgatatcaagaccctcaccggcaacgtgccggtggacctgtacggcaccggcagccaactgggaggcagcatttcctgcggcctgctggccctcgactgcctggcggcgaagaccgccatcaccctcaccggcagttcccaatacaccgcccaggccgaactggtgaacagctccggcaaccccgacccgatccgcgctgccatgatcggcctgaagaacggcacagccctggacatgcacgacagcaccatcatcggcagcctggtgaacgtcctgctgcccttcctcacctccaacgactgcaagctgatgggcgcccagacctgcttcaacctggcccagtaccagtcgttcccgatcggcaccgtggatccgaacaacgcgcagaacttcatcgactcgtcgaaaggcttcttcatctcgatgcagagccagaacgtccagtggcgcgaccagcaggatccctccaagctggtcgccgcgctggccggtgccttcctcaacatgtcgcgcaacgccgatggaacggcgccgatcaaggtcgacttcggtcaggccttcaatggcattccacggcaggacacctgcctgggcggcctgaacaagggctgctga

SEQ ID NO: 340109 - DNA, 603 bp, Pseudomonas aeruginosa
ttgaacgacgccgcctacgccgaggcccgctgggccgaactgcagaaccagggtgaccttgcctgggacctggatgccatcaccaaccgcagcgaggcgatcgccttcctcaaacgtttcgagaaccgcctgtgtatctactcggcctatgtcgagaagctctacagcaactacagcttcgtgattcccgagagcgaccatggcggcatcaccatcctgcccagcgagcaggcctggcacgacaccttccacgatatcccgctggccgcggtggagcccaccgggatccatatcctgccgggcgagaccatgggctatcgcgggctctacctgaagattcccggcgagcaccgcctggtggcgtcgaaggaattgccgttccaggaagggttgaaactgctgatccagcgttaccaggctcacgacgacgtgttcctgccgatcctggtcaagggcgacctgcgcgagtacgaagcgcgcatgccctcgctgcacctgcaccggatcaaccccgcccgcctcagcgcacactccctgctcagcctcaacgccatcaagggtgccattgccgaccatctgatcggcctgttccgccagcagtga

SEQ ID NO: 340110 - DNA, 1299 bp, Pseudomonas aeruginosa
atgatcgacccccgacgcgtactgcgtgcgcttgccgaacactgggccctgctcgagcctctctgcgagcgcttcgatgccggcaccctgagcctggcggaactgcgcagccagttgaacacccagttaccggaaagcaacccggcggaaatcaccgccctgctcgaccagtggatccgcctggatatcctggtcccggtggccaagagccccaaccgtttcgagctgaacgcgcagatccacgacttcctcgcctacctgcgccacgagcatcgccttggtctgtgcctggagatcgaggcctacctgcgccatctggagcgcctcgccgggtacatccaggacgccttcgagacccgcgacagccaggacctggcgcgccagctgcgactgctcgacatgcgcgtgcgcgatgtactgaagaagctcggcaatgacgagcaggcactgatcggcgtggccgagcgggccaagaccagcgaccggcagattcccctggcgcagcgctacgcggaggtcctggcgacctgggacgagtacgtcgagccgatgatccagctggtcagcgccgacggcgccttcgagcagggcgtgcggcgggtcgaacaggtcctgctgcgcctgctaggcgaacagcagcgcctcggccacctggtcgacgacgacctggtgctgcgcacccacgcgcgcatcctcgagatgcagaccaacgcccagctgaccctgcgccgcgcccgcgaattattgctgccgctgcgcgaggaagcgcgccggcacaacgcggtgacccgtggcgccgccctggcgctggcggcgatccggcgcaagggcctggacgccgtgccgcaggcggcgatgccgctgttcacccggccgcagagcaccttcctcggcaccgcctcgcaggtcgagagctacgtcttcgccctcgcccgcttcgagccgaagccggcgcagttccccaagtccagcggcacgcgcaagagcaacgggccggcgcgaccaccgcggaccgcgcgggaaatgatcgagcgctgccaggcggcgctgccgctgccggacctcatgcaatggctgctggcccaggaaccggacggcgccaccgacgagttgctctactggttctcccggctgtcgcgcgacgcgcgcttccagcgcgaacgcctgcaacgccgcgagtacgaaaccaccgaacattgcgtcagcctctgctccttcgccctgaaccccgccgccaaggacaagggccaggccagggacgcagacaccctttccgcgagcgaaacccatgcatcttga

SEQ ID NO: 340111 - DNA, 696 bp, Pseudomonas aeruginosa
atgcatcttgatctctccgaactgacccagctcgcgccgatcttccgcgagctgttcaagggctaccacatcagccaccgcgaccccgagctgtacacccagctgtcctcgcaccaggaccagtaccgcggcctgttccgcgccatgggcttcgagctggtctgcgacacccgcggcttctactacttcgtcccggagcaggtcggcgcccaggtgaacaagaccgcccaacgcctggcgctgttcaccttcatcctcgtcgaacacctcgccgaccagggccgcgacccgctgtccgtgctggacggcggcagcatcggccgcgaagagctgccgccgctgctggagaaataccgcgacctgttcctccaggccgaggtgcagacccaggaagaactggaagagaaagtcatgcgccgcctgacccagctcggcttcgcctccgaggacagcggcgtgtaccgcttcatgccgccgatgcaccgtttcctcgacgtctgcctgtcggtgcagcaggaccgcaacctgtccgccagcctgcacgccgacctgccgttgcagacgccggtgctggtcgatgacggcgagatcgaaccgctgatggccagcgacgaagaattgtccgaagagagcgaggaagacgccctcgcccgtgccatcgccgaagaacacgcgcaacaggaggctgacgcatga

SEQ ID NO: 340112 - DNA, 2847 bp, Pseudomonas aeruginosa
atgagccagacccgctacggcatccgccgcttcgccctgctcaataccgccggctacagcctgggtatcttcccgctggaaaacccgctgtcgatctacggcgccaacaacctgggcaagagcgcctcgatcaacgccctgcagttcccgatccttgcccgcctgtcggacatgagcttcggcaagtacagcatggagcagtcgcggcgcttctacttcgcctcggacaccagctacatcctcctcgaactgatgctgccccacggtccgcacgtgatcggcgtggccgggcgcggcccgggcggcggcttcggccaccagttcttcgcctacgccggcgagctgagcctggaccactaccagaagaacggtacctgcctgcgccagcgcgagctgttcgccaacctcgagcgcgaaggcatcaaagcctacgaggtgaagccggaagagctgcgccgcctgctggtcggcgggcacacgtcgatcccgctcgacctgaccatgatcccgctgcgctccaccagcgagcagagcctgaagaccttccgctcgctgttcatcaacctgctgcacatgcgcgagatcaccgcggccaagctcaagcagctgttcctcgacgccttcgagcacagcctgcgctcgggtaacgtcgactacatcgccgcctgcgaggaggccttccgcgacgtgcggcggatggagcaggactaccaggcgctggtcgccgccggcccgctggtggaagccctggccaacggcgtgacccagcgcgacgtactgcgcggcaagatgcaccgcctttcaccgctgctcgacagcctgctcggcacctggcacgactacgccggggcgcgccgcgaggaactgctgatccagcacgagcaataccgcgccgagcaggacggcctgcagaacgaacagcgtggcggcacccaggagctgatgcgcctggagcgcgaaatcgccggcatccagcgctggctcggcgaactgtcggtgctcaagacccgcttcgccctggtcgacgacgccaaggtcctcgaacaacagctgctcgccgccaaggatgcccacgacgaactggccggcgccctggcccattcgcggcagttctccagcgaagacctggaagagcgcctgcgcgacctggaaaaacgcctgaagaacgtccgccagcagctcgaacacgccgacaacaacagctacgcacgcctgcgcgaggagttcagccagcaagacgtggaacgcctgatgcgtctgttcaacggcgcgctgttcagcctgccgctcggcgagaacggggtgaacctggatgacggcgacgtctgggtgaagagcgtcgaagccatcctcgaccacttcaagggcgagcatttcgaagcccctggcctgagcatcgacctgtcgcacatcgaaccgccggcgttgcaggccctggccgaccgcgccgccctgcgcgaccagaaggagcgcctggagaaggagctgaagcagctcaagacccagcagagcgtcgccgccgaccgcgccgcgagcaaggcccaggcagagaagctgtaccaggacgtgctggatgcgcagaaggccctggaagacttccgccgcacccagacgctgaccgccgaggagcccgagaagctcgccgaactggcccagctggaggcgtcccaggacgaactcaagcgctccagcgacgccttcgccgagcgcgtccagcaactctccgcgcgcctgcaactggtggcccggcaactgggcgacctggaggccaaggagcgcaccctggaagatgccctgcgccgccgccagctactgccggccgacctgcccttcggcacgccgttcatggagccggtggacgactcgctggacaacctgctgccgctgctcaacgactaccaggacacctggcaggcgctgcagcgcatcgacgggcagatcgaggcgctgtacgcccaggtgcgcctgaagggcgtcgccaagttcgatagcgaagacgacaccgagcgccgcctgaagctgttgatcaacgcctacgcgcatcgccaggacgaggccctgacgctggccaaggcgcgccgcgcggcggtcaccgacatcgcccggaccctgcgcaacatccgcagcgactacgacaacctggaacaccagttggccctgttcaaccgcgagatcaacaagcgccaggtgtccaacctgcagagcttccgcatcgtcctcgcgccgaacaaggatgcgctcaagcacatcgaccagatcatccacagcgccggccagtacgaggaaggcgagaacctctcggtgttcgacctgacccagagcgccgagcaggacgcgaagaacgaggaggccaaggaatacctggcccgcctggtcgccgccaaccacaaccagttgggcctgaaggacctgttcgaactggccttcgagatcaccaaggtcaacggccagccgatcatgcacaccgacatcgacggcgccgcctccaacggcaccaccatgaccatcaaggcgctgaccaacatgtacctgttgctgcacctgatggaccgcgagcaggccgggcgcgtgcgcctgccctactacctggacgaggcggcggacatcgacgagcgcaaccaggccgcgctgctggagaccagcctgcaactgggcttcgtgccgatcctggcgagcgtgaagccgcaggtttccgcacacgtggcgatcgacctggaaggcggtagcggcccgaacggcatctatatcgacgaagccgactggaaatacatccgtcgccgggatgccgccgccagcggcgaaacccgcgcagccagcgagccggaggaagccggcgaaccggcgtga

SEQ ID NO: 340113 - DNA, 1008 bp, Pseudomonas aeruginosa
atgcctgttcgacttctcaaccgtttccgccacgccgccctggcgtgcctgctcggttcgctttccctcaatgcggcggccgatcccgtcacccttaccctctacaatggccagcacgccgccaccggtatcgccatcgccaaggccttccaggacaagaccggcatccaggtgaagatccgcaagggcggcgatggccagctcgccagccagatcaccgaggaaggcgcgcgctcgccggccgacgtgctctacaccgaggaatcgccaccgttgatccgcctggccagcgccggcctgctggccaagctggagccagagaccctggccctggtcgagccggagcacgccggcggcaacggcgactggatcggcatcaccgcccgcacccgggtactggcctacaacccgaagaagatcgacgagaaggatctgccgaagagcctgatggatctttccgatccgtcctggtccggccgtttcggcttcgtgcccaccagtggcgccttcctcgaacaggtcgccgccgtgatcaagctcaagggccaggaggaagccgaggattggctgaccggcctgaaggccttcggctcgatctacaccaacaacgtcaccgccatgaaagccgtggagaacggcgaggtcgacatggcgctgatcaacaactactactggtacaccctgaagaaggaaaagggcgagttgaactcgcgcctgcactacttcggcaaccaggacccgggcgcgctggtcaccgtctccggcgccgcagtgctcaagtccagcaagcaccccagggaagcccagcagttcgtcgccttcatgctcagcgaggaaggccagaaggcgatcctcagccagtccgccgagtacccgatgcgcaaggggatgcaggccgatccggcgctgaagccgttcgccgaactggacccaccgaaactgaccccggccgacctgggtgaggccagcgaggccctcagcctcgaacgcgacgttggcctgaattga

SEQ ID NO: 340114 - DNA, 1563 bp, Pseudomonas aeruginosa
ttgatcggcgccgcctccacgcccgtgcgcctgcgcacgggctcgcgccggcgaacgccattctggttgttcctgccggtcctgctcctcgccctgctggccagcctgccgctgctctacgtcgcggccaaggcctgggacgccggctggcacaccgcctggcaactgctctggcgcccctacgtattccgcttgctgggcaacaccctgtggctgatgttcggcgtgaccctgctcagcgccctgctcggcctggccctggcctggtgcgtggagcgcagcgacctgccggcgccgcgcttctggaacgtggtgctgtgcctgccgttcgccatccccgccttcgtcagcagtttcacctgggtttcgctgagcccgatgtacgaaggcctcggcggcgccatcctggtcatgaccatgtccaagtatccgctggtctacctgccggtagcggcgaccctgcgcggcatcgatccttccctggaggagtcggcgcggatgctcggtctgtcacggcgccaggtgttcctgcgggtcaccctgccgctgctgcgcccgaccctggccgccaccggactactggtggcgctgcacatgctggtggagttcggcgcgctgtcgatcctgcgctaccagaccttcaccacagccatctaccaggagttcgaactggagttcagcaacgccaccgcggcgatgctctcctcggtactcctggcactgtgcttcctgctgctctggctggagttgcgcatgcgcggccgcggccgcctggtacgcaccggccagggcagcgcgcggcgggccgaacgagtccgcctggggttcggcaagtggccgctccaggcgctgctggcgacgctggtgctggtcggtaccggtatccccctggtgatgctcggttattggctgtacgaaggctcctcggccagcttcccgctgatggaaatcgcctcgaccctgctttcctccctgtcgctggccttcggcggggccctgctcagttgcctgctggcgctgcccgtaagcatcctggtggtgcgctaccccggcgccctggcgcgttggacccagcgcctgccgtatctgctgcaagcgttgccgggactggtgatcgccctctcgctggtgtacttctcgctgcactacctgccagccacctaccagaccaccggcttgctgctggtcgcctatgccctgctgttcatgccgctgacccaggcaccgatccgcgtggccctggaaaaggcctcgccgcagttggaggaagccgcccgcactctcggccagacgcccttgatggccttcctgcggatcaccctgccgatcatctcgccggccatcggcgccggcttcgtgctggtgttcctcgacaccatgaaggaactgaccgccaccctggtgctaggtcccaccgggctgtcgaccctggccacctcggtctgggtgcacaccgccaacctggagtacgctgccgccgcaccctacgccgcgctgctgatcctgatctccggcttgccggtgtacctgctgaccacccgggcgcatctcagcactcactga

SEQ ID NO: 340115 - DNA, 1914 bp, Pseudomonas aeruginosa
gtgaagggcgagaaggaagaacgctacttcaccgcgttgaaggagccgccacccctttccgacaagctgcccggcctgcacctgaccctcaaggccgatcgcctgggctccctggagcagggcagcccggtgttctaccggcagatccaggtcggccaggtgaagagcttccagctgggcgatgaccagaggaccatcgagatcaaggtgcacatcgagccggcctacgccgacctggtgcgcaagcacacgcgattctggaacgccagcggcatctccatttccggcggcctgtccggcttcaaggtgcacagcgagtcgctgctgaccctggtcgccggcggtattgccttctctaccccggagaaccgcaccgacagcccgccgaccgatccgagcaagccgttccgcctgtacgacgactacgacgcggcccaggccggtctgcgcgtgaagctgaagatgaacgacgtcagcggcatcgatccgggccgcaccccggtgatgttcaacggcgtgcaggtcggcctagtcaagtcgatcgacatgggcaaggactacagcagcgccactgccgacctggcgatggatccgcgggtcgaggacatgctgctggaaggcaccgaattctggaccgtcaagccaagcatctccctggccggcatcaccggcctcgaggctctggtgaaaggtaactatatcgacgtgcgcttcgccaagagcggcgcgccgagtcgcgagttcaccatccgcccgaaagcgccgccgctgaacaccgacgcgcccggcctgcacctggtgctgaccagcgacaagctcggctcgatcgatatcggcgcgccgatcctctaccgccaggtccgcgtcggcagcgtgcagagctaccagctgtcgcgcgaccgccagcgagtggtggtgggtgtgcacatcgagccggagtacgcgcacctggtgaatacctcgacgcgcttctggaactccagcgggatcaccctgaccggcaacctcagcggcgtgcaggtgaagagcgagtcgctacagaccctgatcaccggcgggatttccttcgacaccctcgatccgaaggcgccgaccgtgaccaaggtgcgtcgcttcaccctcttcgacagcgaggaggcggcgatggcccgtggcgtggagatccagctgagcatcgacaatgccgacggcctgcgcgaaggcacgccgatccgcttcaagggcctggacatcggcaagatcgaaagcgtcgagctgaacccggacctctccggggtacagatgaaggcccgcctgacttccgccggcgagcgcgtcgcccgcagcggaacccgcttctgggtggtgcgtccggcgctcggcctgctgcgtaccgagaacctcggaaccctggtcagcggcccctacatcgaggcgctgccgtcgagcacgccgggcgagcgccaggcacgcttccagactctcgccgaagcgcccaacctgctgggccgggaaaacggcctgcggctgaccctcagcgcgccgcgcaagggctcgatcaagccgggcaacctggtgacctaccggcagatcccggtgggcaaggtcgtcgacctggccttgggcgaacaggccgaccgggtgctgatcagcatcctcatcgaaccgcgctacgtaccgctggtgcgtaccggcagccgtttctggaatgccagcggcttcggcgtcgacgccagcctgttcaaggggctgtcgctacgcaccgagtcgatggaggcgctgatggagggcggcattgccttcgccaccccgaacaatgcgcagatgggcgagcccgccaagccggggcagaccttcgccctgttcgattcggccaatgacgaatggttggagtgggcgccgaagattcctctgaaggaaaccgcccgccgctga

SEQ ID NO: 340116 - DNA, 1239 bp, Pseudomonas aeruginosa
atgtgcgacaccctgatccttcgccaccagggccagacctggttcgccaagaacagcgaccgcgagcccgccgaaccgcagcgtctgctgcgcctgccggcggtgcgcaacgatccggaagcgcgcttgcgcaccacctacctcgacattccccaggccgcccagcgacatgcgctggtgatcagccagccgagctggatctggggcgcggaaatgggcgtcaatgagcacggcgtggccatcggcaacgaagcggtgttcaccaagctgacccgtcagcgcggcaccgcgctgctcggcatggacctgctgcgcctgggactggagcgcggtgccagcgcccgcgaggcgctagaggtgatcaccgggttgttgcagcgttacggccagggcggcccggccggctaccgtgacaagcgcatccgctacgacaacagctttctcatcgccgaccccggcgaagcctgggtgctggaaaccgccggcaacctgtgggcggcgaagaaggtcgagcgctgggccatctccaacgccctgacccttggccacgaattcgacctgtgcagccgcgacctcgaggaccaggcacgccgccagggctgctgggatggtcgcggcgacttccacttcgcgcgggtcttcgacacccgcctgctaccctgggtcggcggtgcgcaccggcgctgtcggatcaaccagcgcttcctcgacagtctgcctggcgagccggactggcacgcgctgttcgtcgcgctgcgccaccatggcccgcgcggggaccacttccgccgccacaacaaccgccaggtatgcatgcacgccggcagcttctggcggccttcgcagaccaccgccagtctggtcgcccgcttgcgcgacgacggcccgctactggccgccaccggtacttcggcgccgtgcctgggactgttccagccgctgtccttcgatccggcctccggcgccgccgtgctcagccagccgcgcgaggcggtacaggaatccccctggtggcgcttcgaggcggtgcaccgccgcgcgctcaccgaccgagccttccgccggctcctgcgcagcggccgtgattggctggaacgggaactcttcgccgacctcgcacagcccgactggccgcgcctggcagaggacgccgcagtctggcacgcctgttggcatgatcaggtcgccatgcagccgctggcgcagcagcgctggtggcgtagtcacgccgcgctgtga

SEQ ID NO: 340117 - DNA, 1122 bp, Pseudomonas aeruginosa
  misc_feature (222)..(231): n is a, c, g, or t
atgacgcgaatagctccaggttgtataagagactcaatctttgattttctatcaacaactgaatcggctcctatcaaagaaattcataaagctgttgagactcgattgggggctgtcgcacagtcttctgtgcgctcttatttgaatttaaacgagcctgaagtttttgaacgggtggaaagagggcgctatagacttgcgggtcgtgcttcaccgcaaatnnnnnnnnnngataggccggtttttgagcatgagagtgcctctctagttttctcagattgcttcgattggcttcgtgagcagccatcaaagtctgtgcatgctgttgttactgatcctccatatgggttagttgaatataccagcgccgaacaaacaaaacttcgtgcgggaaaggggggggtatggcgaattcctcctgcgtatgatggacaccaacggtcgcctttgcctcggtttactactcttaccgaaggggatcggcacgtgatttatatgtttttcctcgacttggcacgacaccttgctagagttacggtgcctggtgcaaatatagtggtcgcctctaatccattattagctcatattgttgcctccgctatgagcgagggcgggttggaactaaggggctacattagtcgtttggtgatgaccatgcgtggtggagacagaccgaagaatgcgcatgaggagttttccggggtaagtgttatgcctcgatcaatgcacgagccgtgggtagtattgcgcgcgcctttggaggggcgtgttcaagataatcttagaaaatgggggactggtgggttccggcgcctttcagaggacaggcctttcggagatgtaattcggtcccatcctacgccggtaacagaaaagcgtattgcgccacatccatctcttaagccgcagggttttttgcggcaactggtccgagcttcgctccccttaggagagggtgttgtttatgatccgttcgctgggtctggctccactttggccgctgcaaatgctgtcgggtatagaagtatcggcacggagcgggatgcggattattttcagcttgccaaggatgctatgcccaagctggctaggctcaaagtcaaggacgttgacatgctttga

SEQ ID NO: 340118 - DNA, 540 bp, Pseudomonas aeruginosa
atggcagttaggaaaaaatcggagaccattcatcttcgcgttcagcccctctcaaagctcctcttggaaggtctagccaacgctgcgaaaaccacatccacaagcatcatcgaagatttgattctagaggccgcccaaaaagccgaggtcgtcgacgttgacgatatgattgatgaccggctcctaaggaatggaaagctcagcctgacggatgcgctcacagcggcctatcacccggacgaacccatcctaactaaactgagaacctactaccttgccgacaacgcactaggttatagagagagcctgattacgagcacaatcctgcatctcccagaatttttctcgggagaccaagagattttttctgccaaagaaaaaataataaaggaagaatactttcaccaagtgcccagagttagcctagagaaaatcgcagaaagcatgagctctcttgaaagttttgcagccttcaaagagaagaacccaaagctaaagacaaagtacagtgactttctcaaaatggcagagctagactag

SEQ ID NO: 340119 - DNA, 1227 bp, Pseudomonas aeruginosa
atgaaaaccaagatcacatcgaagctcataagcggattagaaccaggaaccaaagcttaccgggtgcatgacacccagcagccagggcttttcatccgggtgcttccgtctggccatatgtcctacatggttacgtgggcccgaaataagaatgtgacgttggggcgtgtgggcaaaatgacattggatcaagcgcgtagagaggtggcgcgctatcttgctgaagctcacgagcacggggagccgttggctgttagctctggaagaagagacgctacgatccccacgttggaggccttccttgatgaccaatttgagccctgggcgttagagcaccacaaggatggtgagaacgggcttagagctctccgccacagctttgccgagttgctaccgttgcgcctcgacgaaatcgatgccagacgtatcgagaaactgcgctcctgctggcttgagtcggggctggcgccagctactgccaaccgcaatcttgtacgcctaaagggagttctgtcgcgtgctgttgactgggaggtacttgaggttcacccgcttgtgaaagtccgccggctgaaggtcgatcagcgtggccgggttcgctacctggcgaaggaggaggaaagccgcttacgaaaagctctggatgagcgacaagacactatgcgcagagaacgacaaagcgccaacgagtggcgcgctcagcgcaagcacgagttattgccggacttatatgctttgaagttcaccgatcatttaaaaccattagttttgctcgctatcaatactggaatgcgccgtggtgagacgtttaaccttaagtggggtgatgtcgatctgaaaaataaaatggtgacagtagagggaggtggagctaaatctggccaaactcgacaccttccattgaatctagaagcgtttgaagccttaagagagtggaaggagcaacaaaagggggagggaaggtatgtctttccagggaaaggtgggaaacgtctagataatgtaaaaaaatcttgggtggcgttgcttgtctccgcaaaaattgacggtttccgctggcacgaccttcgccatacttttgcgtcaaagcttgttatggcgggtgttcctttgaatactgtacgggagttgttggggcactcggatatcagcatgactttacgttatgctcatttggccccagagagtaaggctgctgcggtagagttgataagctttggtggctag

SEQ ID NO: 340120 - DNA, 651 bp, Pseudomonas aeruginosa
atggtcgactggcacgctgaatttgggaaaagtcggattttccacgagaagcgcatagaccgaaggtctgtcgatgcgctctcaggactggccgctgggatcactgctgatgggcatatcaatcagcatgaggccgagttcctacaggattggatcgctacgaacttgatccatcttgacgatccagtgaccaacctcctctaccggaggctctcagacatgctgtccgatggcgtgttagacgctgatgagtctgccgaactgcttgagattcttagagggtttggtggcctctctgcttccaagccgaaaccaagcgacaatgcctttactccatcgaatgctcttccgctcaacaatccagctcccaagcttgagtggtcgggccatctctacgttttcactggcgtcatggtctacggccccagaaagcattgcgaagagatcgtcgtcaaccgcggcgggggaatagcctcaggcatcagcaaaaaggtgcactacctggtcgtcggcgagataggcaacgagcagtggctacacagtacgtatggaaccaagatcaagcgagctgtcgagctgcgcgaggaaggccatcccatcgcaatcatcagcgagaagcactggcaagcctcgatgttcaacctgatctag

SEQ ID NO: 340121 - DNA, 372 bp, Pseudomonas aeruginosa
atggaccagcgccgcgagcatcatatcgaacagcgcgacgccacgcgcaacagggacggccgaatcttctaccggcgcaatcttctcgccaccctgcgcgagcgggaagttgcgcgcgccggtgcggagatggccgagggcaaggcgctgccgttccgcgccgccaaggatggtgagagtgtcagcggcaagttcaccgggactgtccagctaacgagcggcaagttcgccatcgtggaaaagagccacgagttcacccttgtcccgtggcggccgatcatcgaccgccagctcggccgcgaggtcgcgggtatcatgcagggcggttcggtgtcgtggcagttagggcggcagcgggggttggggctatag

SEQ ID NO: 340122 - DNA, 1041 bp, Pseudomonas aeruginosa
atggtgatgctcggtgtgggccaagtgatctttgggccactctccgatcgcgtcgggcgacggccgatcctgcttgtaggcgcaacggctttcgttgctgcgtctctgggagcggcttgttcttcaactgcattagcctttgttgcgtttcgtctggttcaggctgttggagcatcggccatgctggtggccaccttcgcgaccgtgcgcgacgtatatgccaatcgtcccgaaggtgccgtcatctacggccttttcagttcgatgctggcgttcgtgcctgcgctcggccctatagccggtgcgctgatcggcgagttttggggatggcaggcgatcttcatcacactggctgcactggcttcgctcgcactcttaaacgccagtttcaggtggcatgaaacccgaccgttggatcaggccagaacgcaacgatctgttttgccgatcttcgcgagtccggccttttgggtttacacggtcggatttagtgccggcatgggcacattcttcgttttcttctcgacagccccccgtgttctcataggccaagccggctattccgagatcggatttagcttggccttcgcgactgtcgcgctggtcatggtcacgacaacccgcttcgcaaagtccttcgttgccaaatggggtatcgcgggatgcgtagcgcgcgggatggcgttgctcgtttccggcgcgatcctgttggggatcggccaacttttcggatcgccgtcatttttcagcttcatcctgccgatgtgggttgtcgcggtcggcattgtcttcacggtgtccgttaccgccaacggcgcacttgcgcagttcgacgacatcgctggatcagcggttgcgttctacttctgcatccaaagcctgatagtcagtatcgtcgggacattggcggtgacgctgttaaacggcgatacagcgtggcccgtgatttgttacgccacggcaatggcagtgctggtgtcgttggggctggcgctccttcgatcccgtgatgctgccaccgagaagtcgccagtcgtctag

SEQ ID NO: 340123 - DNA, 294 bp, Pseudomonas aeruginosa
atgcggaatcagggcatggataccgatacgaagccggccgctttctccggctgccgccatgccggcggttttcaccgcatggtcgagttggtcaatacctacggctatccgctcgacgaaatggcgtccggcctcggtcagccgaacgccgcgcgcatgacgctcgaacaagaggatgccgaggtcttcttccagtgccttcacgcgggcgctgacgctggactgtgcaacgccgagcgcgttggcggcgtgacggaagttgagatattcggcgacagcgagagtgtgaactaa

SEQ ID NO: 340124 - DNA, 1533 bp, Pseudomonas aeruginosa; identical to SEQ ID NO: 281084

SEQ ID NO: 340125 - DNA, 399 bp, Pseudomonas aeruginosa; identical to SEQ ID NO: 239707

SEQ ID NO: 340126 - DNA, 207 bp, Pseudomonas aeruginosa
atgcaaaagctgaaaaagatgttcgttcgtggcggcgtggtcctgggctcggtcggtctgctggctggccaggccatggctgaagttccggctgctgccactactgcgctgaccgatgcgcagaaagatggtgtcgccattggcggaaccgtcctgggcgtgatcatctccattgcggtgttcaagtatatccgccgcgctctctaa

SEQ ID NO: 340127 - DNA, 306 bp, Pseudomonas aeruginosa
atgccctatctctatctcggcgtgactcgtgatgctggcacctccaaggctggcaaggcttatgacatctgttcggttcatttcgctgtcgatgccacgcaatcgacccgtccggaccgcaaagctgcttttggcctggagcctatcgcgctgtcgtgttcgcccgaagcgtttagccagttccagcgcgttgagccgctgtcgtcggtgaacttcgagttcgagccggacccccggaacatgcagcgtaaccgtatttgcggcgttaagccgttgcagaaaactgccactcaggcggcttcgtga

SEQ ID NO: 340128 - DNA, 264 bp, Pseudomonas aeruginosa
atggctatcgagatcaaccgccagtcgtacatggctctgcgctcggccctggagctggaactgctcgatgccggtatcgactcgcctgagctgctgagtcggcttatgcgccacgtgcttgccaccgaatccgcgacccgtaccgagtcgcaacgcgtgcgccgtgcgttcgtcacggcccgtagaaacccgctgctgggcgcaatccctcagcacagtccagggcgcacaaatcgcccgtatatccgcaagaggaaaccctaa

SEQ ID NO: 340129 - DNA, 135 bp, Pseudomonas aeruginosa
atggaggaatgtgccgaaggatggtgcaacgaggcccagcatctccaccagcaactggcggaagccaccgcaggccaggccgctatcacccagtccggcgccctgatcgtcattccgatggagcgctgcgcatga

SEQ ID NO: 340130 - DNA, 852 bp, Pseudomonas aeruginosa; identical to SEQ ID NO: 307112

SEQ ID NO: 340131 - DNA, 270 bp, Pseudomonas aeruginosa
gtggccaagggccgcatttccgtgcgagacctcatgttaattgcccgctcgcggcaccagaatctgagcagggcgaaggtggcggcgaagataaggacatgctccgtaaccctggagatcacattgttctggaccttcgatatggggctgcggaacaggttaacggtgatccagaatcgggtgctgaaggtggtaccagaggcggtcggtatgttgggtcaggaggtaatcggcgggcgatttctaggcgtaggctacggcctattttga

SEQ ID NO: 340132 - DNA, 333 bp, Pseudomonas aeruginosa
atgagcgcgaaatacgaaattttcctgggtgcagatcgtcagtattacttccgcttgaaggcgccgaatggcgagaaaatcctggccagtgaaggctataccaccaaggcgaactgccagaatggtatccaatcggtgaaggtgcactcgccgtacgacaccaactacaagaagctcacgtccgttaactaccagtactacttcactctgcacgcaaataatgggcaagtgatcggcaagagcgagacctataccactgctcaagcgcgagacggcggcatcgcagcagtcaaagcttacggtcccattgctccggtagtcgacctcacctga

SEQ ID NO: 340133 - DNA, 561 bp, Pseudomonas aeruginosa
atgaatcagaaatcgatcactgtgaagctcatagacttcaccgaagacgaccatccctttggcaacgttcaggggaaggcgacctttgggaggctcaccgagtttgttgacgcccatccccagtactccatttttggagtctccctcgccggcatcgaagcgacagacgcatcctttccacgagaaagcgttgttgccgtagccaagcttttcaagggggagcgtggttttttcctgaaggatctcaaaagtcgagacctactggacaactggagctatgcggctcaggccaaagacatccctctgactgtctggacgaatgacggttacgacattatcgggccagagatcagctcttccacgagggagctattggattgcgtgctgtcccagcgctcggttaccgcagccaaggtggcagaaacgctgcaaatctccgtccctaatgccagcaccaagctgaagaagcttaaggaccaggggtacatccttagggcagaagaggcagctgagtcaggcggtattgaatacgtctacctcgccatcggggaatctgcttaa

SEQ ID NO: 340134 - DNA, 1086 bp, Pseudomonas aeruginosa
atgattgctgagattgcccgatttctccgggcgaaccctggagccaagggaagagaaatagctcgccaactaggcctggataaaggggtggttaactcccttctctacaagaaccccaagacatttgctcatgatgatgagcagcgctggtcactgactgagccgaacaagctgactgtcgctcttgaggaagaggcatgggtgggggcctcctcatttgaaaatttgcttgcagtgaccggatcgcctctggatgagacttgctcggaggtcgagttcgtcgtgcctaaaggctgcaagatcatgatcgatgcagctgcgcgcatcctggccctgtgcaatcagttagtcatgctaaggaaaagtgtgacgattgacttcagcgcgtgcaagacaacgctgacttacttcaaccgactaggtttttttgaccacttagccggtgcagtgggcgtcgttccggcgcgcccttcccagtctggcgcagtgacccaccgcggaaaaaatgacggtgtggtcgagcttgcttcgattgaccatcgtaatccagatgagtccatccccaagcgcttgaaaaatagcctcgtaaattgtgcgggcgagcagtattcgcagtctgctttcacgttcatttccgagctgtttggtaatgtccgggatcatgcaaagtcagagattccgggctttgcagctcttcagtactatccgagaggtgggaagattcaggtggtgatctctgacagcgggataggcatcgtgggaagccttcaacctgttctggagcacaagtatcaggagctttttcgtaggctcgacttctcgaagcctgaggctggggcagaactcgttttgcacgttttcaagcaaggtcgagtctccagcgctaatgaagacggtagagggctcggattgaaacgcagtggtgacgtggcagctaacttcaacgccaccgtcacggtcaggcaaaaaaacttcgagctgacaatgatttacagcgggggacagcttaacgacagctaccctcgcgtggacatgccgaccatcttgggaacccacatctgcttcgacttcttaattgacagctaa

SEQ ID NO: 340135 - DNA, 204 bp, Pseudomonas aeruginosa
atgaatgatttcagtgaagaaaccaggcgagaagtcatgaagttggctgtgcagttggtgacgacttatgtcactagccaaaaccagatactggactcccgagagcagtactggttcggcatcgaggaaagagagagcactccacccttgcccgaccttatcgagggagtctaccgtcagctcttgggtatgctgggtaagtga

SEQ ID NO: 340136 - DNA, 888 bp, Pseudomonas aeruginosa
atgtccacgcacgaagacctgctcctgcaactcatccagcgtgatcccggcaagatcaggagcatcctggggctgtctgctccaaagccagacctgtcctggtacaaaggggcagacgtctggattgaagctggacaccgcagcgacaggggcgcggaactacgcatagccttcggggagccactcccgaatggctatgccgatttctggataccgttcagcggaccggatggcaacgcgctgggctggctgcgcttcagctacatcaccacggtacgggagaagtctctgttcaccgcctctgaatggcgctccgcaggcgaacctgcgccggccgaagagaaccggctggatctgccgatggacccgctgccgggaggtttcgcacccgtgtccagcaagggcgcgagtgacggtgccgatcagcactctgtagcgcacagagcgagcaaagggatcgatgagcacctcttggtggcaatggcagatcccaaagtgatagcagcaatcatacaagcagcacggatcaagcggtttgcaaagatcgcccccttaaacacacaggagtgggcggctgaaacagagcggatgaaggctcagttttcgtctcctgctgccgaagagtcgaccacaccggacaccctgcaatacatcgggttttcagggcctcagcgtgccttgctggaccagttggcgcagtactggctcaggatcgccgcagtgtcgaagcgcgaggctgaggcgaaccccaaccccgaccggaagcgcgggctggagctgaggtacatggcgcactacaactgcgcggcggaattacagaatctgctccagaccggggagcttccgggccatctcggttttcaggtactcgcgcaaaagcccgaatga

SEQ ID NO: 340137 - DNA, 291 bp, Pseudomonas aeruginosa
atggccgccagtccctattacctacgccaaacccacgtcccggactgcgcctgctctgtgtgctggtccgcaaggcaggctatcccattgcacagcccgtcgccgtgttcagactgccggccccctgggctgccctatctggaagatggccgctggctctgccgtccccgttccttctgcgcgaaacacgacccgtcccggcgtccgcccaagtactggcacgttgtgtacgacagcgggaagcccacgccctttgtgcccgtgcgcgaagcattccaattggagggctga

SEQ ID NO: 340138 - DNA, 273 bp, Pseudomonas aeruginosa
atggaagagtctggaatagtggggttcaccgtcacaggtgctgtggaaaaggtcacggacttccgcactgcgccgttctgctcgcaggcggtattcgcgcagatgctgggcctggaagacatcacggaagacgtggtgcggggctgggtggaaaccaagacgatcccgactgccaagattggccgtcgccgcgtggtgaacctgcatcgcatccgccgtgacctcgaccggggcaagtcgatcttctgccagggggattacgacggtgactaa

SEQ ID NO: 340139 - DNA, 858 bp, Pseudomonas aeruginosa
atgactgtaattaaagatagtttagagcttgcgcgaatatcatctcgtgcattcgggcgccctgccttcgcagcattagcacgtggaggcgatcctcggaagatatttaaagccctatatgacgccgagctcgtttcctcaaatcaaagcgtcagcactctttttgagaatgcatttagcaacctccgctcaaattatagaaatgaatacatctacaaatgtgcaataaccaataaaatagtatttggaaagcacagccccagaactgcctcaatttctctagaacttccaattggaaagtcaattgttgatgccgcaatatttaacggcacctccactgcctatgagataaaaacggaattcgactcccccaaaaggctttgcactcagacccccgactatcttcgtgcttttgacaaagtatttatagttacgcatccagattacgcctccagctacctaaacaactctgatgagcgcgttggaattctgacaatagaccgcaacgacagaatcagagtaattaaagaagctattgaaaataaacagaacatcgacactcgaactatatttagagcattgcgcagagaagaatacattactgctctagagaagaccctaaaaatcaaaattgaaaagccaaacggaacaatttccggctattgcgaagagctgttttcaaagctcagcaaacaggacgcacatagaatatttgtgcactcaatgcgaaaaagaacaactgacatagaaacagttgattttataagctcgcttccaagccacttgcgtgtcctcggatactcgaccccactttctaggccgcagcgccagaaaatacttagtacccttagcatgtaa

SEQ ID NO: 340140 - DNA, 219 bp, Pseudomonas aeruginosa
atgatcgtgactgtacagcacctgcacaccgtcccgacttggactacccggcagggctactgccacggccgggcgcgggaattcttcaagcgccacggcctggactggatggcgttcttgcaggacggcatcgactctgacctgttgatcgcgactggcgacgcgctcgcgctcaaactggttgagcacgcgcgccgggaggtggctgatgggcgctaa

SEQ ID NO: 340141 - DNA, 240 bp, Pseudomonas aeruginosa
atggacccgatcacaatcaatctcgtcatcctggcggcgtcgtacatcctgtccagcgtcctggcgccgaaaccgcagaagcccaagccggcagcattcgatgccgctgacttcccgctatgcgaggaaggggaagatcaagcggtggtgttcggccagtgctggtcgaagtcgtggatggtgctcaccgtggacaatcgtcggctgaaggccatcaagaccaaggcgagcaagaaatga

SEQ ID NO: 340142 - DNA, 690 bp, Pseudomonas aeruginosa
gtgaggcacaagcccctccgttattggcactacgaactctttatgagttttctctgtctcgccgcggatgaggatcagttgattatcccagtcgatgtcgcgcttgcggatgcacagcagcgcattcaaccggatgccggtgtagtagaagacctcaaacgtgcaaagccagaaccaggcgggagtgatgcgtgcgcgatcgccggtgcagcgctcggcgccgacctgcatgttgagccaattgcgggcgcgcaggatggcttcggctgcgacggttttgcttgctcgcctgggggggatgacggtggtctttctgaacgggttgacttgggagtgcgtcaccagctcgtgctcgatggcatagccccagatcgttcgcagatgattcgaatacgtgttccagctcctcttcgacaggccttgttccaggaccttgcgccgccatcccagcacagacctgtggtccacctcctgtacggttgccgtagggccgaagtgcttgagcagcgccttggtcgcggcgcggtagatcttcgcgctggcttctcggagatcgtgcgcgaagatgtactcctcggtgagctgctgcggcgtcattccacacctccttcggcatcggtgatgaccgtgaggcttgggttgtccagaggctgcacagggaacagcagtttgggatcctggagcaggtaa

SEQ ID NO: 340143 - DNA, 1260 bp, Pseudomonas aeruginosa; identical to SEQ ID NO: 25685

SEQ ID NO: 340144 - DNA, 231 bp, Pseudomonas aeruginosa
atgagtttggggaacgtagtggccgacaggcttgaaagaatagctgttggtgggtttgatatttttaaaatatcaaaagaggcatttagcatttatcaagacccggggctttctctcacgaagggtttagacgtggcgttgttatcgctgatagcaatgggagaggggccggagtttgaaaagacagaaaaggagtttcaggatttgctggctgagattcgacagatgtag

SEQ ID NO: 340145 - DNA, 501 bp, Pseudomonas aeruginosa; identical to SEQ ID NO: 83644

SEQ ID NO: 340146 - DNA, 138 bp, Pseudomonas aeruginosa; identical to SEQ ID NO: 227476

SEQ ID NO: 340147 - DNA, 741 bp, Pseudomonas aeruginosa; identical to SEQ ID NO: 332610

SEQ ID NO: 340148 - DNA, 675 bp, Pseudomonas aeruginosa
atgaattttgctcaggcttgtcaaggagttagaaatgtccttaacagaatgcaaggtgtaactcaggtagataatattctactaaatgaggcggagaaatatattagttggagcggtcgaaggcctggaatattaaaaggggtttattatcccttggaatatcagtcgttgctggatcgccaagattattcaattcttctctctgatggttctttctttcaattttattatagttttgatttagagggtgggctgagcaaggctcgcttggcctactatcctaggccactggaaaccatggatagcttggatgatctttatgcggcggctgacgaggcgctggatagggaggatgatgatctctatgagtatctttataattggacggaggtcatggagtttaagggagtaaagccatcgaatacatcgcatattagatttgattatgatcgaggtgttgctgcacattgtgagtctcatattcaatttagtggtgtgaactccttaagggttggtgcagacttcttccctttgccgatggcatttgtaaagttttgcgagtctttagtttcagatgggcaatcacttgtctcagaggatcagcttggttttgagaagaataattttctcaggattaactctcctgggctcattatctctttacgtcatctttaa

SEQ ID NO: 340149 - DNA, 831 bp, Pseudomonas aeruginosa
atgaaaaacacaatacatatcaacttcgctatttttttaataattgcaaatattatctacagcagcgccagtgcatcaacagatatctctactgttgcatctccattatttgaaggaactgaaggttgttttttactttacgatgtatccacaaacgctgaaattgctcaattcaataaagcaaagtgtgcaacgcaaatggcaccagattcaactttcaagatcgcattatcacttatggcatttgatgcggaaataatagatcagaaaaccatattcaaatgggataaaacccccaaaggaatggagatctggaacagcaatcatacaccaaagacgtggatgcaattttctgttgtttgggtttcgcaagaaataacccaaaaaattggattaaataaaatcaagaattatctcaaagattttgattatggaaatcaagacttctctggagataaagaaagaaacaacggattaacagaagcatggctcgaaagtagcttaaaaatttcaccagaagaacaaattcaattcctgcgtaaaattattaatcacaatctcccagttaaaaactcagccatagaaaacaccatagagaacatgtatctacaagatctggagaatagtacaaaactgtatgggaaaactggtgcaggattcacagcaaatagaaccttacaaaacggatggtttgaagggtttattataagcaaatcaggacataaatatgtttttgtgtccgcacttacaggaaacttggggtcgaatttaacatcaagcataaaagccaagaaaaatgcgatcaccattctaaacacactaaatttataa

SEQ ID NO: 340150 - DNA, 294 bp, Pseudomonas aeruginosa
atgctgctgaccattcgcgatgttcccgaagacctggtgcgccaggccaagcttgcgaccggcaagggcaccggcagccaggcgttcatcgccggtattgagctgatgcttcatcagcgcgagcgcatcgaagagatgcaggaagagattcggtcgctgcgcgagaccctcggcgtgttccagggcgtgcttgctgatgcccatgccgccgctgtgcaactggctgagattgccgggcaacgcgatatgctggtgtccgacaacccgctgcggcctgggtatcgtcgccgctag

SEQ ID NO: 340151 - DNA, 327 bp, Pseudomonas aeruginosa
atgaccctgaccgcacatgacattgccagcatttccgaagaattgatgcgcgtaggcgtctgcaactccatgcaggcggccactcgtactgcaacctatgcaatggaatggatgaacggcaagacattcgatttcaataagtctgctgtacagacccatcgcgcccgtcttcgggctatcggcttcgacatcaagctgcctttcgacgcgtcgcggcacatgttcttcatccacaacgtgcgcgaagtctcccgcaccttcgacgtgcccgcgccgagcttctaccggcgtccggacgtgccgcgtcacctgcggttggtggtctga

SEQ ID NO: 340152 - DNA, 237 bp, Pseudomonas aeruginosa
atgaggacgatcagcttccagggcgacggcctgtcggccagccagtaccggtcgatccagcttcgccagcaggtgagggcggcggtgaatcagtccgtgttgcaacagcaagttgcggccacgctccaggccctggagcagcacaaagagcagggcggcaagcctgagcgcgtctggtccacgatctcgaacgaaaagggcacgccgttcctgggcgacgtgttcgggtggccgtga

SEQ ID NO: 340153 - DNA, 180 bp, Pseudomonas aeruginosa
atgcccacaaagcacatcgacgacgcgacatggcgaaaggtcgagaaagagaccgtcaaagccgtgatccacttgcaagcatcggtaaaggacaccgaggtcctacgctggctgatactgaagggtctcgaagaaatgaccccggaagaccttgagcgcttccacaaaaaaagggactag

SEQ ID NO: 340154 - DNA, 207 bp, Pseudomonas aeruginosa; identical to SEQ ID NO: 329405

SEQ ID NO: 340155 - DNA, 1704 bp, Pseudomonas aeruginosa
atggcgacctttccggggttccaagtgccgaagccggtggaggggatcgttgccggcatcacgccgaatatcgacgccctggagctgaaccaggacatcagcctggcagcggtcgcggcctcgacctgggccggcgtctacgcggcgcatcagccggtagaggtgatccattcgacgtaccaggctgtccaccaaagcgctctggaagagaactactacaaccgcctgtggctgatccctacgactatggagctgggcaacgtcgtcagcacccaggtacgaccggcatcagtctggaacgcttatttcagtccgcgcacgctgaccgccatcgagcgggaagatgcagacggcatcacgctatccggccaggcgtcgccgccgctgggttttgccgccctggaggaacgcacttggaccgtcagcattggcacggacggcccgcccgtcgtcaatgcgcggatcgcctggaggctccagggcgagccggacctggtcctggtcatcaccggcaatcgcatcatcgcttggacgttcgcgccggactggggcgacagcatcgtcgagcgcctgagcgcctcgacaaatatcctgcaaagcgaatcagccgtgacccagcgccgggctatgcgcctggcgccgcgccgggagttcgaggcgaacatgtacgcggtggaccgcgagcggcagctactggacatgacgctgttcggctggggcgcacgcatttgggcgctgccgatttggcctgatatccaactgctccaggaaccgctggcggccggctcgctgaacattccgtgcggcacggccggcctcgacttccgcgacggcggtctggcgatgctgcgcggcgaggacgcttttacttatgaagtcgtcgaggtcaggacggtgaccgccagcggcctggacctggtccggcccgtccaagccgcctggggaactggctcgcgactatacccagtgcgcactgcgcagctgaccgaacagcccacgctgacccggctgaccgataccgcacagtctgcgcgggtgtcgttcctggtgatggagccctgcgcctggcccgaggtaatgccggcgacgacctacaggggtcggccagtgctggagcagcgcccggacgaaagcgaagatctgacgtcgagctatcagcgcctgctgtccaccctcgacaacggcagcgcgattccccgcgtgaccgacgtcgccggcatggcactgccggtcttggggcatcgctggatcggcatgggccgagccgaacggtcggcgttccgtagcctggtctatgcgctgcgcggccagcagaagccgctatgggtgccgacccacgccgacgacctgaccctggtcgccaccgtctcgcaactggcgaccgcgctggatgtgcgcaatatcggctatgcccgtttcgcgaatggtcggccgggccgtcgcgacatccgtatcgagttgtacgacggcacggtctatcaccgccgcatcctcaccagcaccgagctggacgccgacaccgagcgtttggccatcgacgccgccctgggccgcctggtcgagccgaccgatgtagcgcgcatctgtttcatggcgctctgtagcgccgccaccgacgtggtcgagatagagcacgtcaccgatagcgagggcgtcgcaaccgccgcgctgacgttcaaaggggttcgtgacgatgagttttaa

SEQ ID NO: 340156 - DNA, 1329 bp, Pseudomonas aeruginosa
atgctcgccattcttcaacatgccacgttccgccggttgtttttggcgcaagttgtcgcacttgtcggcaccggactggcgaccgtggcgctggcgctgctggcctacgatctggccggttcgggggccggggcggtgctgggcacggcgctggcgatcaagatgacggtctatgtcctgctggcgccgctggcgggcgccatcgtgccgccggccaggcgcaaggcggtgctgatttcgctcgatgtcgtccgggcgggcgtcgtgctggcgctgccgttcgtcacggaaatttggcaaatttatctgctgattgcggtgttgcaatcagcctcggcgggattcacgccgctgttccagtccttgattccggaagtgctccccgaggagcgcgattacacccgtgccttgtccttgtcgcgtatggcctatgacttggaaagcctgctcagccccatgcttgcggcggccctgttggtttgggtcagtttccatgtcctgttcgttggcacggcttttggtttcgcgctgtcggcggggttgattctggcggccgcgctgccgaccgtcgctggcgactcgcgcagtgatgggcttggcgagcggatgctgcgcggcatgaggatctatctgcgcacgccacggttgcgtggcctgctggcgctgaatatgtgcgcggcagccggtggtgcgatggtgttcgtcaacaccatcgtgatcgtgcgggatgtcctcggcggcagtgagcaacagcttgcgctggcgctggcgaccttcggtggtggctccatggtggccgcactactattgcccaaggtactcgatcaggtcgccgatcgccgggtgatgctgtcggccgctatcgtgatggtggcggtgctgctgatcaccaccttatgttgggtcgcgttgccatcggggcgtagctgggcggtattgctgcctgcctggggcctgatgggcatcgcctatgccggtctggtcacaccgggcgggcgcctgatacgtcgatcagcgcacgaggaagacctgtcggccgtgtttgccgcgcagttttccttctcgcacgtctgctggctgctggcttatcccctggcgggctgggtgggcctgacgttcggtctcggcgtcgcgctggccgctttgagtggccttgcgctgttgggcatggtcgctgcgatccgaaactggccgagggaggagcaagcggttctcgttcacgaccatgatggtctgccggcgaaccacccgcacttcagtgcgcatggtgccgctcctcatgcgcatcctttcgtcatcgacagtctgcatcggcggtggccgggatga

SEQ ID NO: 340157 - DNA, 225 bp, Pseudomonas aeruginosa
atgcagattcgttcgatattggttgttgttgccgccagtgcctcgttggcgtccacgttcgttatggctcatcctggagggcatggttccgataacgacaagttgatgcccaagacctgcgagcaactggccgatggagagcgttatgtcaccgatgtggcttatcctgaagtcaggaagctgaaggagcaatgcgacgccgcgaaggagaaagaagagtcttga

SEQ ID NO: 340158 - DNA, 624 bp, Pseudomonas aeruginosa
atgtacaacgtaacaaagcccaccctcgacgatttgccaacctcgaagcagttgttgcgctcgacactcatcgcgctggttgccgccttcgcgattctgatcgcgatcgtgttgccttccgagtatgggattgatcccaccggaatcggtcgcgtgctcggactgagcgagatgggtgagatcaagacacagttggctgaggaagcggctgccgacgcagccagggatgcggcgctggcggcggagcagtcggcgcccgctgtaatgcctgttacatcgtccgcgcagcctgtggcgggtgctgcctggcgcgacgagatacgcgtggtgttgcagcctggcgaaggtgccgaggtgaaactcagcatgaagaccggcgagcaggcgcagttcagttgggttgccgaaggcggcgtggtgaacttcgacacccatggcgatggcggtggcggcggtcagtcgatcagttatgagaaagggcgcgcagtacccggcgatgacggtgtgctcgaagctgcattcgatggtaaccacggctggttctggcgcaaccgcgacagtgctgacgtaaccgtgatcattcgtacccgaggccagtacacggaaatgaagcgtgtcctgtga

SEQ ID NO: 340159 - DNA, 741 bp, Pseudomonas aeruginosa
atgagtgaaagagtatctgtagtggtgtcaggcctgcgacagcagcaggcttggctgcgaatgtccctgtttctcgccgccgtggtcgtacttctgcttgcgagcaccaatgaggcattggcacatgctattgccgagggcgacaagggttatattcaggagatcacaggtgtccaccttgtctccttcgcgtacctcggcgccaagcacatggcgaccgggtatgaccatattctgttcctgttcggcgtgatcttcttcctctacaggatgaagcatatcggcctgtacgtgaccctgttcgccatcggtcattcgaccacgatgctgctgggtgtgtacttcaatatcggcatcaacagctacattatcgacgccatcatcggtctgtcggtggtctacaaagggctcgacaacatcggcgcgttccagcgatggttcgggttccagcccgatacgaaaatcgcaacgttggtcttcggcttgttccacggtttcggcctgtccacgaagattatcgagtacgacatctcacccgatgggctgattccgaatctgctggctttcaacgtcggcgttgagatcggccaattgctggcgttgggcgcgatcctgattgtcatgggttactggcgtcggacggcgagcttctggcgccatgcctataccgcgaacgtcgcgatgatgtgtgctggcttcattctgatcggttaccagctcaccggctatttcgtttcttga

SEQ ID NO: 340160 - DNA, 3141 bp, Pseudomonas aeruginosa
atgcttgagcgtatcattcgcgcgtccatcgcgcatcgctggctcgtactcgctctggtgttggcgctgtcgggcctgggcatctggaactacagccgtctgccgattgatgcggtaccggacatcaccaacgtccaggtgcagatcaacacggaagcgccgggctattcgccgctcgaagccgagcagcgcgtcactttgccggtggagatggcgcttgccggcatcgcgcggctcgactatacccgctctatctcccgctacggcctgtcgcaggtgacggcggtttttgaagacggtaccgatatctacttcgcgcggcagcaagtcgccgagcgcttgcagcaggcggcctcgtggattcccgccggcttgaaccccgcgctcgggccagtggcaaccggcttgggcgagattttcatgtacaccgtggagcctgagccgggctacgaagaaacgtggtcgccgacggcattgcgcacccttcaggattgggtggttcgtccgcagctccgcaacctgaagggcgtgacggaagtcaacaccatcggtggctatgaacgccaattccaaatcacgcctgacccggccaagttactggcctacgggttgaccatgagtgatctgttggatgcggtcgcgcgcaacaacgctaacgtgggcgctggctacatcgagcgtttcggtgagcaatacctgatccgcgttcccggccaggtcgccgacatccaggggctgcgccagatcgtcgtggcgacgcgtgacggtctgccattgcgcattggcgatgttgctgacgtgatcgagggcggtggtctgcggactggagcggcgaccaaggatggcgaggagatcgtgctgggtacggtgttcatgctggttggcgagaacagccgtgctgttgcgcagcgcacgggtgagatgctcgcggagatcaacgaaacgcttccagagggcgtgcgtgcgcataccgcctatgaccgcactcaactggttgatcgcgccatcgctaccgtacagaagaacctgctggaaggcgctctgctggtcattgcggtgctgttcctgttgctgggcaacatccgggcggcgctgattaccgctgcggtgattccattcaccatgctgatgacgatcacgggcatggtgcagaacaaggtgtcggccaacctgatgagcctgggggcgctggactttggtctgatcgtcgatggtgcggtgattatcgtggagaactgcctgcggcgcttcagtcagcggcagcatcagctcggccgcctgttgacccgcgacgagcgcttcgacctgacggccaaggctggcgctgaggtcatcaagcctagtctgtttggcatgttcatcatcacggtcgtctatctgccgatcttcgcgctgtccggtgtcgaagggaaaatgttccatcccatggcgctgaccgtggtgatggcgctgaccgccgcgatggcgttgtcgctgaccttcgtgccggcggccgtggccatgatcgtcaccggcaaggtatccgagaaggaaaccagggtgatgcgcggtatcagccgctgctatgcccctttgctcaagcaggccatcaagttgcgcgtcgtggtcgtcgcagcggcgttggtgctggtggtgctgtcggccatgctggcgacgcgcctgggcaccgagttcatcccggatctggacgagggtgacattgccctgcacgcgctgcgcatccccggcaccagtttgacccaggcgatcggtatgcaacgccaactggaggaccggctcaagcagtttcccgaggtggaggaagtgttctccaagatcggcacggccgaggtcgcgaccgatcccatgccgccgtcggtggccgacaccttcatcatgctcaaggatcgcgacgattggcctgacccgcgcaagccgaagacggcgttggttgctgaaatggaagaagcagtcagcgcaatcccaggtagtaaatacgagttcctgcaaccggtgcagatgcgtatgaacgagttgcttgccggcgtgcgtgccgaggtggccatcaaggtgttcggcgacgatatggaccaactggccgaaatcggtgcacagatcgcggctttgaccgaaagcattcccggggcggcgggcgtggcagtcgaacaggtgacgggcctgccgctgatgacgatcacaccaaacctggaggcgctcgcccgctacggcctggcgatcgacgacctgcagcagaccgttgcgatcgccttgggcggtgccgtcgctggccaggtgttcgagggcgaccgccgctttgacatcgtggtgcggctgccggaagcgcggcgtcaagacccgaaggtgcttgaatccctgccgattccaataccggctgacatcgctgctggcctgggtcaggccgcctacgtgccgctcggtcagctcgcgtcgattgaggtggcgcccggtcccaaccagatcagccgggagaacggcaagcgccgggtggtcgtcaccagcaatgtgcgtgggcgcgacctgggttcgttcgtggaagaagtacgcgtacaggtgaaccgtcagatcgagttgccggcgggctattgggtcgattatggcggcaccttcgagcagctcattgcggccggtcaacgtctgtcggtggtagtgcctgtggtgctgttcatgatctttggtctgctgttcatggcctttggctcgggccgggatgcggcgatcatcttcagcggcgtgcccctggcattaacggggggtgtggtcgccttgtggctacgtgatattccattctccatctcggcgggtgtcggcttcatcgccctctcgggtgtggcggtgctcaatggcctggtgatggtgagcttcatccgcaagctgctcgacgatgggctgccgttgcaggacgccatcgtcaacggggccacgacgcgactgcgcccggtactgatgaccgccctggtcgcgagccttggcttcatccccatggcgctcaacgtcggcacaggcgcggaagtgcagcgaccgctcgccaccgtggtcatcggcgggatcatctcctcgacactgctgacactgctggtgttgccggcgctgtatcgcctgactcatcgaaataccgaacatgaggcgacaaaaacgacgtga

SEQ ID NO: 340161 - DNA, 1236 bp, Pseudomonas aeruginosa
atgaatcgtctacttcttctgactctcctctgccccttgttgttggccgcttgcagtccttccggcgaccccaccaacgaggcggcgggtatacaagcggcaaatgaagactacgagcgtgggccgcacaacggccgactactgcgtgatggtgacttcgcgttggaactcaccatctatgagaccaacgtgccgccgcactatcggctctacgcctaccgagatggcaacccggtcgcccccgaggatgtcaccgcaatagttgagctctcccggctggatggcgaggtcaaccgattcaccttcacaccggaaggcgactatctggcgggcagtggtgaagttaccgagccgcattcgttcgatgtcgccgtgacggccgagcagggcggcaagacgtctacctggacgtatgagtcttacgagggtcgtgtgaccatcccggcggccatcgcggaggatgccggcatccgtgtcgaaccggcgggtccggccgtcattcatgatgctgtgcgactgatgggtaccgttgaactggatgccaaccggcaggcattggtcggggcgcgcttccccggcatcgtgcgctccgtgagtgtgcaacagggcgacagtgtccggcgcggtcagacattggccgttatcgaaagcaacgacagcctgcgcacctataccatcaccgcacccttcgatggcgtgatactggcgcgcaacaccaacgtcggcgacgtggccggagcaggcgcgctgttcgagctggccgacctgtcgcaggtatggatagacctgcgtgccatcggtaccgatgccgaacgcttgaagccgggacagtcggtacgcatacgctcggcgaccgggagcgccgttgtcgaggcaacgatcggtcgtctgctgccggtggccggggcgggccagagtgtcattgcccgcgtcagcgttccgaactcagagggtcgatggcggccgggcatgaccgtggcggccgaggtcgcggtgggctcgcgcgaggtggcgctggcggtgaaggagtcgggcttgcagcgcttccgcgacttcactgtggtgtttgcgcaggtcggcgagacctatgaggtccgtatgcttgaactcggtgatcgtgatggcgactacgccgaagtgttgggtgggctcaaacccggcacaccctacgtgaccgaacagagtttcctgattcgccaggacatcgaaaagtccggcgccagccacgaccactga

SEQ ID NO: 340162 - DNA, 1248 bp, Pseudomonas aeruginosa
atgaaggtgctccgtttagtagtgtgggggatcatcggcttatgcggtacgtccgcggcccacgccgctgacccgttgcgattggaagatgccgtcgcgcgcgcgctggccgctcatccctccgtcgtcgccgaaatggctcagctccaggccgtgcaagcccgtgcggatcgcgagggcttgccaccgtcttacaccatcggtggcgaggtggaaaatgtcgctggcaccggcagcctgagcggagccgattcggctgaaacgacattgcgtatcggtcgggtcattgaacttggcggcaagcgagaagcccgccagacgctcggtcgggccgaggttcgcgagcaggagcaccgggccgatacggtacggattgatctggccagcctgaccgccacgcgcttcattgaagtggtcgccggacagcagcggctgaaatatatcgaagaacgtattgagcaggccgagcgtacccgccgggaggtcgctgccggcgtagaggcagctcgcaatccagagtcggatcttctggctgccgagatcgcgcttgcggaggcggagctggatcgtgagagcgcggaacacgagcttgccagtgccaggatggcgctggcatcgagttggggagcgctggtgccagacttcggcgaggttgttggagacctgaaagcattgccgacggtggtgccgttcgagacgctggcttcacggttgccgatgacgcccgagctgcaagcctcacgattgcaggccgacaccatcgttgcccggcgccgggtcgccgaagccagtgccaagcccgatgtcgacgtcagcctgggcgtgcgccgcatggaggcctttaatgaccagggtctggtgatgtcggtgtcggtacccctgggcagtcgcaagcgctccgggtattcggtcgctcaagccaatgcggaactcgccgcgctggaggcacgtcgcgaagtctaccgcttcgaacgtcatcaggcgttattcgagcgctatcaggaactgatgcgcgcgcgcacggaagccgaatcgttgtatacgagtttgattcccaaggccgaaaaggcgctggcgaccactcgtcacggtttcgaggccggccgcttctccttcatgtcactggcgcaagcgcagaagacgctatttggcctgcatacgcgcgttgtcgaagcctccagtcgttatcaccttttgctggtcgaggtcgaacgcctcaccgctaccgttgaggatatgaccccatga

SEQ ID NO: 340163 - DNA, 513 bp, Pseudomonas aeruginosa
atggcgctggcctgcggcatcgggcgtggccatattctgctttcgacctcgttattgcagcagctcgatcccacgcagttgcgcgtcgtgctggcgcatgagcaggcgcatatcgctcatcgcgacgtccagcaccgtttgattgccatcgtgctatcgagcattcaattgcctggcactcgccgtcggttgctgagcgacttggagcttgctctggaacagcgctgcgacttcgtcgccgcaacggctgtggggtgtccgttggtggtggccgagaccatcgttgcggtggaaaagatatttcggaaccacgccagggaacacaggccgttgtcgatggcgtttttctccgatttcattcccgagcgcgtcgaggccttgctggcgccggagcgcaaagcggtgtcgtacctgggggcgttcctcggtgtcggtgtgctggcgttttgcagtctatcgaccggctggctgcacttcttaaccgaatcgctcattgccgtgctgacaagataa

SEQ ID NO: 340164 - DNA, 354 bp, Pseudomonas aeruginosa
gtgcttgaagacatctggcgcttcggtgcatccgacgcgaagacggtctacgggcgcgtgggacgttcgcgttcgattacgttgaacaccgtgcagtccacgctggagcgtttgttccgcaagcgcatcctgcaacgtgagaaggtcagtcatgcttacgaatactcggccaggttgtcacgcccggagttgatccagaagttggtggagtccacggtgcgccgcgttgcaggccatcagccggatgcgttgctgtcagctttcgccgatctcgccgcgcgagcggacgacgaccagctcaagcgattggaggaaacgattgcgcgccgtcgcgccgagctggatgagaattga

SEQ ID NO: 340165 - DNA, 900 bp, Pseudomonas aeruginosa
atggaactacgctatcttcggtgcttcattgccgtggccgaggaacttcacttcagccgtgccgcggaacgtctgcacatcgagcaatccccgctgtctcgcacgatcaagaagctcgaatccgacctcggcgtgattctgcttgagcgtacctcccgtggtgcgcgcctgacttgggccggccaagtgtttctggaagacgctcgccgcatcctgctttccctcgatcaagccaaggccaatgccaaggccgccgcgaccggctatcggggcacgttgcgcgtcgccctgtccgatggcatcgcccgcgtccgtctgagcgcgctgctcgcgctatgccgggaggaagaaccggaggtcgaaatccgattgtccgaaatgccgttcgcccagcagttgaagggcttgcaaaacgatctctacgacattggcttcaccttcgccgatgggattgacgaaggcatcatcaccgagccaatctggcgcgatccattagtagtcgcactgccggccaggcatccgttgctggcccacaagcgtgtaccccttgatcaagtgctgagctaccctctggtgctttgccaccccgaagtctgcgcgggttgcagccttcaggtggaacgctatctgcgttcggtggatgtggagcccaccgtggccgagcgtgtggccacgcacgatctgatgctcgcgctggtcgccgccgggtacggcattggcttctcaagcgcggcacacatcgaggcgtgtcgcaccaccgacgtgattgcgcgacctcttgccggacgttcattcgtgctgacgacccatcttctgaggccagacaacgagccctccgaacagttgaccaatttcatccggcgcgttcgtaaaattgccgccgacttttctgtgtcgtga

SEQ ID NO: 340166 - DNA, 591 bp, Pseudomonas aeruginosa
atgttgcgtctcaacaccgagcgcatctttgacgcgctttggaatggcgatctcgcgtatggcagagcgggcatcaccattgacgacccatcgctgcttgacgatccggcactgacagtccgtcacgttgacctcaaaatttggatgtcgctcttctaccccgaccagaagcctgaattcctgttcgacgcggtagaacgacaaatgcacccggccatcggcgtcgaaaccatccagacgctgattgctgaaaaggaagcactcaggattcgtctggcggaccgggaacagtccttcaatattttgtacgagcaacatcagttgctccgcgagcaggccaagagtttgggggcggccgggcgtgaggtttcggccagaagcgagacgacctatctcaacatcctcggaggattgctgaacatgatgctcggcaagtcacccggcggcatgccgtactcatcgttcgagacgatggaatccgtgatcagcgcgctactcgcgcattacgaaggccgccctggcatcagcgagcggacgctgtgggccaagtttaccgccgccaagcggcacctggacggccacgcgcgctga

SEQ ID NO: 340167 - DNA, 219 bp, Pseudomonas aeruginosa
atgtcttcgcagaccaccgccccggcggcgccggttgaacgtcgcatcctgcgccgcgccgaagtcgaagccaagaccggcttcaagcgcgcgcacatctatagcctgatgaaagaaggcaggttccccaaggcactgcgtttgggcgtgcgcgcagtgggctgggactcgaccgagatcgaccagtggatcgctgatcgcctcaaagaacgcgcctga

SEQ ID NO: 340168 - DNA, 852 bp, Pseudomonas aeruginosa
atgcaggtggtatccatcatttcgaccaagggcggcgtgggcaagacgaccacggcggccaacctgggtggcttcgcggccgacgcagggctgcgcgtgctgctgctggacctggacgtgcaacccactttgtcgagctatttcgagctgcaaacgcgcgcccccgccggcatctacgaattgctggctttcaacgagcaggacatcggccggctggtgtcgcgtaccgcgatcgctggcctggacctggtgctctccaacgacgacaaagggcagttgaacaccctgttgctgcacgcgccggacgggcggctccggctgcgcaatctgttgcccgcgttccgcgaacactacgacctgctgctgatcgacacgcagggcgcgcgcagtgtcctgttggagatggccgtgctggcctccgatctggcggtgtcgccagtcacgccggagatcctcgccgctcgcgagttccggcgcggcaccttgcaactgatgcgggacatcgcgccataccgtcgcctcggcatcgagccgccgccgctacgcctgctcatcaaccgcgtgcatccggtttccagcaacgcgcggctcatacagcaggcactgcgcgacctgttccgatccgagcccggcatcgcggtgctcgataccagcatccccgccatcgaagcctatccgcgcgcatcgacccaggccttgccggtgcatcgcgtagaacaccgacgccctacggggcggacgacgccggccgctttcgacacgatgcgcgcactcgcctgcgaactgttgccgagttgggaaccctcgttcactcgactgacagcgggagcgcaccggaggagcagcacatga

SEQ ID NO: 340169 - DNA, 258 bp, Pseudomonas aeruginosa
atgaccatcgcgcgctccctccagcgtggcaacaagcggctgaaaccgctcatcgacttcgcactgaaggaaggctgggaggtcgctcgcacagcgggcggacatctgaaattcaccaagccgggcctgcctccgatctacaccggctcgacgcccggcgatcgccgcgccggcctcaacgcgctcgctctactgcgccgcaccgaccgcgccatcgacccgaaagcgacgacaagggaggccgacgccgatggctga

SEQ ID NO: 340170 - DNA, 1722 bp, Pseudomonas aeruginosa
atggctgaaccgaccccccaggacatcgcagccaagttgctggccgaccgcttcgagcgtagcggcccggtcaccgatgcactgagcgatcccatcgccgatactcccatgacggtgacgctggaccagctccagccgtatgacctcaatccgcgcgtcacgcgcaatccgcgctacgacgaaatcaaggcatcgatccgggagcgtggcctcgacgcgccgccggccatcacccgccggcccggcgggacgcactacatcattcgcaatggcggcaacacgcgactcgccatcctgcgcgagttgtggagcgaaacgaaggacgagcgcttcttccgcattccgtgcctgttccggccctggcccgaacgcggcgagatcatcgcgcttaccggccacctggccgagaatgaactgcacggcggcctgtcgttcatcgagcgcgccctgggcgtggagaaggcccgcgaactctacgaacaagagttgggccaggcgctgacgcagagcgagctggcgcgtcgcctcagtgccgacggctacccgatcacccaaccacacatcagccgcatgcaggacgccgtgcgctacctgctgccggcgatcccagccgtgctctacggcggtctcggccggccccaggtggaacggctgacggccctgcgcagggcgagcacacggatatgggaagcgcgcggcgcgaacaaacggctggccgtcgatttcccgtcgctgttcaacgacgtgctcgccctgttcgacggcgacaccgacggcttctcgatcaagcgggtgcaggatgaactcatcgggcagatggccgagttgctggaggccgactacgactgcctgacgctggagatcggcgagaccgagaaccggcagcgtgcgctgaccagcgatccggtgccccccgcaccgcagtccggcaatgccgcggccgcgcccgtgacgccacagccaccgcgctcgcccgacccggcgccgacagttcccatggcgcagcccccagctacatcgccgaagccaccacggatgccggaaccgctggcatcgcccccgccctcggaaacgcccggcagtgcgcagccttcggacgacgatcacgacgaacgcctgcgaggccatatcgtgtcgccggcgccgaccaccgaacgcttgcaggcgatccagcgcctggtggccgaccagaccggcgaggcactgccggacttcgaggcgaacgtcttgcaggcgattccggtgcaggccggcggtctctacccgatttccgatgtctggtacatcgaaccgggcctggacgcgccggaccggctgcgcgtgcatatcgcgcagttcgcgcgcgagatcgccgaggaagccggacaggccgaacgcatcgaggccatcgacgatggcatcggcttcctttgcgacataggcgccctatcgacggacccgcaggcgatgccgctcatcgcccgcgcgacgctcaccctgctgcacgccctcagtgcgggataccggccggcggttgcagcacccaccgcactcgacaacctgcgcctgaccgatgccctggggcctctgctgcagggtcggaagaatggcgacaaggcgcaggcctcgcgcctgagcgacagcggcctggtcaaactctttcgcctgctgcggctcgcgcgccggctgctggagctggaatccggcatggcatcgggcacgcacgcctccactgaaccgtaa

SEQ ID NO: 340171 - DNA, 561 bp, Pseudomonas aeruginosa
atgtcggcaccgcatccactcaaccaggccgtgatcgcccaggcgctgcacgatctgcgcaacggccagttgcgccgctgcaaggcgatgggcttcggcgaccgggagctggacgcactcaaacacccggagctggtcagcatgctggtcaacgccacggtgtcctggtgctcggtcaaggtgaaccgcgaagtgctgcaacgcctgttgcaccaggtggaggacgtcgagaaggagattgcgaccgtcgatcgcatgctccgcctgggcgcaagcacggagatggtcagcaagttctacggcctgacccatcaggaagtggcgttgcgccgggacgttctcggcctgcccaaacgcaagggccgccatccggtattgagcgaggaacaggacaccggcttgtgggggcgctggaagcccgccgtcgagcaacgcggcatcgcgctggacgacgacatggcgatgctccatctcaccctcgatcttgccgaagaactcgccctgccggcctccgtcatctgggcgacgattcgcggctggatcgatcagggattggtgtag

SEQ ID NO: 340172 - DNA, 1209 bp, Pseudomonas aeruginosa
atggcgatcgacaagcctcatcggggaggcggtccggtctcgctctcggccctgctggacgaagccgctcaacacctgccgccccgacaggccggaccgacggtcagcgatggattcctgttcagcggcaaccgccatgagagcgtgccgcgcgcgctgtttttcgatcatcgcctcacgccactggaacgcaacgcctggcaggtgttccggctgctgctcgacgacgacggtatcaccgcctttcccacctatgaacaactccgcccctacctggcctcgacaccgtgcgcgccgaaggcttcccacgaaacggtggcgcgcgcgctcacgctgctgcgcctgacgcgctggctcagtctggtgcggcgccggcgcgatccgcgcaccgggcgcatccagggcaacctgtacgtgctgcacgatgagccgctgacgcccttcgaggccatgcagctcgatcccgattacctggacctggtaagccaggcgctgacgcatgcgagcaaggcggtgcagcacgtcggcgtccacacactccaggagatcgccgaagacccactgctcaacggccgcgctctgcccacgcgcctgcaggtgctggcgcagcggttggcaagccaggggtggaaggctctcgaaagttatccacaggacgagacgattcacgaaaccgaagaaggcccgaaagcccttcttcggcacggagaacagcagtcttcggaatccgaagcgggtcgcaaagccccgtcagacgcccttcttccgaatccgaagcaggaccgtacagtacgtaaagaaagtattaaaaataataaagtacgtacagtaccgcgcgcgagcgaaaaccttcgtctgcctcagcgcttcctcgccttgaaagaggaacagcagtccggcgcgctggtcgcacttcagcgggtggacgacaccctgcaacaggcggtgctcgacgaatgggcggcccgctgcaaggccggcggcatccgcaatcccgccggttatctcttcggggtcatccagaaagcgatcaagggcgagttccatgcctgggctggtcagccggaacacgcaccgaccgctatttcaccgtcgtctctggaatcgctgcgcgcgcccgagcgcgactggtctccgccagcgatcgatcacgaagccgcgcagcagcagcatctgacccgcctgcacgatctgttcaaggagtcttga

SEQ ID NO: 340173 - DNA, 789 bp, Pseudomonas aeruginosa
atggcaaacgaacccctgcaactgaatctcgggtcgctacgcagcgcgatggcgctgacgctgcacacgcatcacgcctcacgcatctggcacggccgcgcgcccgccgaaggccggcccggcatcatcggcctgaacggcttcatctccatcatgaacaagctcaagcgcggcgccgagcaggacgacccctactcggactggtggatgctgcgcatcgaggaaaagatcgccgacaccaagacgcgcctgcaaacgctgcgcgaacaggttgaccaggccctggccgacgtaccgcccgcactcagcctgggcgagaacctcaacgtgcagccggtcaagctgcccctgttcgtcaattctcagttggggttcatggcggtctacctgctggccgactacgacgacctggcgcggcgcctgatcctggcgcatcacacggcgttgatcgatcgcagcaccctggagcgctggctcaacgacggtgcgcatgcgctgcgcagcctgttctccctggcccagcagtaccgctattccggcacaacgcgcgatgacttcgcggcgaagaacgcagcagcgcgtgcggcactggagaagttcggcgagctgccgaccgacgtgctcgaaggcacgcaccgctcgcgcttcgcgccgccgatcaaccgccggtcatcgcaggatggcaggcaggaaaggacggataccccgagcgctgcgccagccgacgaaaccacggaagacgacgcgaacgacgacggcaccgcatccgatgaggatgagccagcatga

SEQ ID NO: 340174 - DNA, 552 bp, Pseudomonas aeruginosa
atgacggaatctgctctcaccgacacaccgacacgcttcacgccgctggaacaggcggacttccagcgcctggaacacgcagcctacctaaagggccttttacagccttttaagggtaagggacgtttggagacctgggccaaccagtgcgcggcgctgcgcgacgacctgatcgtgctggcgcagcggcgggtactgccccaggcgcgcggctatcccttcagcctgctcggtgtgcaactggcccagcagaccactggcgcaggcacgacctttctgcgctggcgcaatctcgaccgttccagcatgggcgtcgccttgtgggaggcgctgctggccgaccccgcgacaccggcgtcgctgatcgacgacctctacgcgatggagctgcagcgcatcgcgctgaacatgcagatcagcctcacgcacagcatcgcccgccaaaccctggactgcgccggaaagatggcccaggccgaagcggcttacctgcggcgtatccaggggcacgccgcctcgatcaaccccaccacttccaaggagtcaccatga

SEQ ID NO: 340175 - DNA, 399 bp, Pseudomonas aeruginosa
atgagcacgcatttcttcggcgagggcaacatcggctctgcgccagactatcgcgagtttgccaacggcaacgacgagccgcgccggctgctgcgcctgaacgtctacttcgacaacccggtgccgatgaaggatggcactttcgaggatcgtggaggtttctgggcgccggtggaactgtggcaccgcgacgccgaacactggcagacgctgtaccagaaaggcatgcgcgtgctggtcgaaggtcgcaccgtgcgcgacgaatgggaagacgccgacgagaacgagcgcgtgaccttcaagatcgaagcgcgccgggttggcatcctgccgtatcgcgtcgagggtgtaacgctgggtgccaagggacaggccgtggagcaaccccacgacgagtag

SEQ ID NO: 340176 - DNA, 429 bp, Pseudomonas aeruginosa
atgacctggttacggcattgcagaactctggcgcccccccgcgcgcaggacatcatcgccaagatcaacgactcggccgaggcattccgggcgacgccgcccgactacaacgcatcgctcgtcaacgcccgagtggcgctggaaaccttggccgttgacgtggccacccatgtcgcttcgctgcagcagagtcccaccacctacaacccgtcaaaatggggcgaggtgctttcgttcctgcgcagcagcggcgagatcacggtcgaagaggaaaaggggctggctggcgtgttcggttttctgagccctggcgcccatcgcccggttggcatcccggaagaccagatgacgcggcttggccgctccttcgcgctcaatatgtgctggttcctgctcaagaaccatctcgcgcgaagccaccagccttga

SEQ ID NO: 340177 - DNA, 1002 bp, Pseudomonas aeruginosa
atgccgtttgaaatcaggtcttgggaagaaatctccagaagctacggatgcacgatcctgctcggcaacggcgccagcattgccgtcagcccgagcttctcctatggatcactgctcaggcatgccgttgaacagcgcttccttcccgacgacgcccaacgactgttccagttctttcagaccaacgatttcgagttggttcttcggatcgtctggcaggcgtcgaacgtcaatcggtcgttgcaaatcccggaccaccgaacccatgccgcctacgtgagtctcagagactgcctcattcagacagtccgcgacattcacccggaatacgatcaggtcagcgcgcacctgccgagcatctaccaattcctgaaacgcttcagcactatcatctcactcaactacgacttggtggtgtactgggtcatgacctatggcctggagatcgaggatcagcatgtgttcaaggattgcttcataggaggcggcgtcttctccgacgactggcaacggttcaggcagccgatcggcagggagcgctcgaccacactggtgttccatgcccatggcagccttgtgctgtgcaggaatttggtcgagcaagaactgaagatacacaacagggacgctggtcttctcgaagcgatacttcagctctggcagagtgaaagcgttgtcccgttgttcgtgagcgaaggaacgtggcagcagaagatcacgtccatccagaacagctactacctctccacggtctacagagaagttctgaagtcaccgcggaacactctcgttgtttacggctggggattcgctgaacaagatctccatctcttgcaacggatgagtggaacagggatcaatcgtgtggcggtggcggtgttccgaggggatcaggcctattgcaacagggtcttccaggcgatccgcgataccttggggtggcacgttgaggtagagtttttcgacagcgagagtcccggttgctggatttacgctgattag

SEQ ID NO: 340178 - DNA, 2016 bp, Pseudomonas aeruginosa
atgcgcgtttttctgtgcgaaaagccttcgcaaggcaaggacatcgccaggatgttgggcgcccggcagcgcggcaacggctgctacagcggttcgggtatcacggtgacctggtgcatcggccatcttgtcgaggcggcaccgccggaaacctacggcgagcagtacaagcactggtccatcgagcagttgcctattcttcccgagcgctggcgcatcgaggtcaaggccaagaccgccgcgcagttcaagatcgtgaagcagttcgtcgcccaggccggcgagttggtgatcgccaccgatgccgaccgcgaaggcgaaatgatcgcgcgcgagatcatcgatctgtgcggctaccgtggcccgatccagaggctgtggctgtcggcgctcaacgatgcgtcgatccgcaaggcgctgactcagctcaagccgggtggcgaaacgctgccactgtatttttccgcactggcccgttcgcgcgcggactggctgatcggcatgaacctgagccgcttgttcacggtgctgggtcggcggtccgggtatcagggcgtgctgtcggtcggtcgcgtacagacaccgacactgaaactggtggtggaccgcgaccgcgagatcgcacgcttcgtctccatgccgtattggaccatcgacgtcacgctatcccacgcgggccagtccttcgcggcaagctggatgccgcccgacggcaccacgggtgcagccggtcgctgcctgcagcagccagtggcgcagcaggccgccgaccgcatccgtgcgggtcgtgaatcgaaggtgctgtcggtggaaaccgagcgtgtgcgcgaaaccgcgccgctgccgttcgacctcggcaccttgcaggaagtgtgttcgcggcagctcgggctggacgtacaggagacgctggacatcgcgcagtccttgtacgaaacgcacaaggcgacgacttatccgcgcagtgactccggctacctgcccgagagcatgctggccgaagtgccgaccgtgctcgacgcgctgctcgccaccgatcccggcctgcgcccgttgatcgaccggctcgacaggacacagcgctcgcgcgtctggaacgacagcaaggtaacggcgcaccacggcatcattcccacgctggagcctgcgaacctctcagccatgtcggagaaagaattggcggtatacgcgctgatccgggcgcactacctggtgcagtttctgccgcatcacgaattcgaccgcacgctggtagtgctcgactgtgcagggcaatcattacaggctgtcggcaagcaggtgatcgtgtctggctggcacctggcgctccccggcaaggggcaggatgcggcggacgacgagcaggctcagcgcagccagatcctgccgccgctggacatcggggcgcgctgcggtgtcgggcaggtcgaactgaaggcactgaagacgctgccccccaagccttacacccagggcgagttgatcagggcgatgaagggtgtcgccaagctggtcaccgatccacggctgaagcagaagctgaaggagacgacgggcatcggcaccgaagccacgcgcgccggcatcatcaacggcctgttggttcgcggctatctggtgaagaagggccgtgccatccgcgcgtcggatgcggccttcacactcatcgacgcggtgccggcggcgatcaccgatcccggcacgacggcgatatgggaacaggcgctggacatgatcgaggccggccagatgacgctggacaccttcatcgacaagcaatcggcctgggtcgcgcagttggttcagcaatatcgaggcaccgtcctgtcgatcaagctgcccgaaggaccggcctgcccggtgtgcggtgcggcgacgcgccagcgcaacggcaagaacggtgccttctggtcgtgcagccgctatcccgactgcaagggcacgctgccggccgaatcctcgacgggcaggcgcagggcttcgcgccagcggcgcgctgcgcccaaggcgtcctga

SEQ ID NO: 340179 - DNA, 234 bp, Pseudomonas aeruginosa
atgtccttcgatcctgtcgcactcaagcccacaggcccttcgggtctgctggcgctggcgtatgtaggcaaaagcctgcccttgcaggtgctgtgcagtgccgccgggcactacatcggcaccttcgacgacgacggccccgtctcccgcgagtccgtcgagtatttcccgagccacgaggccgctcgccatgccctggaaaccagcgcatggacgcagcgccagtacccgtga

SEQ ID NO: 340180 - DNA, 393 bp, Pseudomonas aeruginosa
atgaatccgatgagcgagcaggcgatctttgacgagatcgcgcgcaacgatctgcacttctcgaaagcccccgatgcctttttccacgcctggaagcgcggcgtcgaactggtcggccccggcctgttcggcaacggcacgcaggaatgtctgaacctggccgtggacaagtgggacttgtgcccaaacgtcgccgtcatcaagaagaccatcggcgccatgagttccggcgaaagggtctttctcgccgcgatggtgagtttctacaactccaaggacggcggtgcgctgctcaagcgcgttggcgtccacggcctggccgacctgggcggcctggacctggagcgacgcaagatcatcgccgcgctgatcctcaactacaccggctggtaa

SEQ ID NO: 340181 - DNA, 726 bp, Pseudomonas aeruginosa
atgaaccccactgccaatcccgtttcaaatccctttgtccgtggctacaacggcctttccattcagcgaatgatcgccatcgcctacgatgacgactgcccgctgacctatcttccgctgcacgtctcgcagtcccatctgcgggacgaccagatccagcgttttgaatgtgtcttctgcgacgacttcaccttgatcactcaaggccaagccgtgccggatgaactggacgctcaatgccggaaccatggcatcgcgcgcacggtgatctatgccgtcatggcggacgacttcggaacgccggtgcatgtcggcgatacctattccgaggaagccgcccgcgacgtggtgcgccgtctgaccttcgacactggccactacagccggtgctgggagatcagttccgggcaccttcccgaggaaacgatgcagtacctcgaagacctcgcggatgcgtccacgctcaccggcctgttgtttgaagccttcaggattcccgacagcgatgccgtgggcgtgaagttgatcgccacgccctggaccgacgccaatctcgaaatcgtcgatggccgcaatacccaggcgctgcacaacgatcagacggatgcgtgcgtccccacgccgctgctgaacgtgatgcacttggccgccatggcggacgtgcgcatactggtcttcgatccgaacgccgcgatactggacggcctgcctgtctacgaagactga

SEQ ID NO: 340182 - DNA, 531 bp, Pseudomonas aeruginosa
atgaccacttcatccgaaaagtccaacttcttcgatctgcacatcaccggcctcgggtatctcaatcgcatccgcgaagtgaagcccaagaaaggcgatgccttcctggcctgcgacatcgcggcgctcaatggtcccagcgataagccggagtaccgccgtttcgacgtgcgcgtatccggcagcgaagcgcagcacctgatccgccgttgcgtccccgccgtcgaggccgaacgcaaagtgctgatcggctttcgcctgggcgatctgtggaccgacctcttcacctacagcaaggggaagcgtgtcggcgaacagagcgtcagcctgaaggcccgcctgctcttcgtgagctggatcaaggtcgatggccagctcgtctacaaggccgaacccaaggcctccgaggaaacggctcgcgacgaagcgcccagcgtttcgagcgaacccactgcccaggatgcacccgcatccgagacggtttccgacgacgaagcagccgaagtaccggcgttggccgagtcgttctga

SEQ ID NO: 340183 - DNA, 612 bp, Pseudomonas aeruginosa
atgattacgcttcccggccaattggccatcaagaccatccacggcaggaacggcgacttcaacgtcggccgcctcgccacctccatcggcgagttcgtcatcaagaacgccgagctggatcagtaccgcgaaggcaagtacgagggcgatttcgtcatcaccgagattcgtccttcgacgtacaacaccagcggccgcatggtcatcgagatccgcgcgcacctgggcggaatgaccttatcgaacatcgaccacctgagccgcgatgaagccaaccggctgagtccgcaggaagtcgatccgatcgacgaggaagcgcagacgccagtcccgtccacttcggcacctgccgaagcgaaggcggcaacgtccagcgatcccctggtcgataccacgccgttcggcgccgacgttcccgccaagccggcctccaagccggtgacgcaggacgatgacgccacgctgttcggcgctctctggccgctgggcgagatcgtcaagctcgatgccaccgtcgatcgccgcctgttgcgtcagcaacgggaccgtcttggtgccttgggctacgagttcgcgccgctgtcccaggactggcatatcgcctccgcctga

SEQ ID NO: 340184 - DNA, 381 bp, Pseudomonas aeruginosa
atgggctggtatttctcgcggcaaacccgcgaccaactgatccgcgaactgatcgaaccgcaggagagcgaaagcgctcgctcggaggtcatcgcccacgccctacgcggcaacgtgctgtggtccgtggtgcgcatcaccgccaagcagtcgggattcatgaagctcgctgccggcgattccatcaacgtcatccgttgcgacctgctgcaaggctcgggtggcgaatggggccacaagcccctggatgaatccatgcacccctactactactcgtgcccgttgcgctatctcgacatggcgccggtgcaatcccccgagtggcgggaaggcgtgctcgcccatcacgcacgtcggcgcatgccggcgtcagtggcctga

SEQ ID NO: 340185 - DNA, 261 bp, Pseudomonas aeruginosa
atggacccgatcctggcctctctcccggcgtcgttgctgcgtctcgtcgaagatcagttgtccaacaacgaagtttcttccgacgaggaactgctcgatcacttcatcagcgacggtctcaccgaggaacaggcacggcaggcgttgacctaccgcaaccagtacctcgccaacctctacctagacggtttcacaccgatcctcaaggggagcgaagcgcttcgcttcaacccctacagccggcaattcgagccggaatga

SEQ ID NO: 340186 - DNA, 828 bp, Pseudomonas aeruginosa
atgaaactcgcatcccgcttttcttatcgttctccggtgctgcgttcggatcacccgttgtcggatgatcagatccgcaccgtcgccccatccatcttcgcggagaccccgcacgaaagccgttcccagcgctacagctacatcccgactgcggccgtgttgacggagctgcgcagagagggttcccaaccgttcatggtgtgccagacacgtgtgcgccacgaggatcggcgtgactacaccaagcacatgctgcggcttcgtcatgcgagccagatcaatggcaccgaggcgagcgagatcatcctgctcaactcgcacgacggcaccagcagctatcagatgctggcgggcatgttccgcttcgtctgccagaacggcctggtgtgcggcgacaccttcgccgacgtccgcgttcctcacaagggcaacgtcaccgatcacgtcatcgaaggcgcctatgagatcttgcagggtttcgagcaggtgcaacactcgcgcgacgccatgcgtgccatcacactcgacgacggtgaggccgaggtcttcgccagatcggcgttgactctcaagtacgacgatcccggcaagaccttgccgatcacggagaatcaggttctgcggccacgtcgtttcgacgacaaccgttcggacctgtggtccaccttcaatcgagtgcaggagaacctcgtcaaaggcggcctgaccggccgtaccgcaaacgggcgccagcaacgcacgcggcccgttcaaggcatcgaccagaacgtccggctgaaccgggcgctgtggctgctggcggaaggtctgcgtcagttgaaagcctga

SEQ ID NO: 340187 - DNA, 648 bp, Pseudomonas aeruginosa
atgcctgcatccacatcatccagtgtgctctatcccatcgacgaatgccccgacctcatggccgacggctgcatcggcgatgagcacggcaacctcatcttcctgtccgtctgggcgcgcgatacagccatccaggagttcctggctcgcctgaccctcggtcggtccgaacagggactggaccagttccatctcgtcaccgatcaggcgtcgattccggtctttgtcggcaacaccgacaacctggagaagcgcaccacgcgcgccttccggcgcacgctgttcggttccatgtctcatctgtggctgttcgacaagcgctgcgtgaagcccgacaaggccaacgccagcgcattggcgctactgcccaggacagtgaccgaccacaccgaacgcctatgggcgctggtgcgggagacctgccccctgccgctgctcgatcactggcgcgatgccgtgctggagctgctgcaatcacgggacatgctgacgcgccttccgttcgccctcgggccgctggaaggccatcggctggccctggacgttccggcgctgaccacggcgctgggcgaactgatccgcaacggcacccttggtgtttcgcaggtcgagctggcctcgggcaaaccgctgcggcgggtggcctga

SEQ ID NO: 340188 - DNA, 1110 bp, Pseudomonas aeruginosa
atggctctcatgtttccgcgccttgcgcgcaacttcatcaagaacggctacttcccgacagacgaacccacgttggaaagagccctgaccgcgctggcaccctcatccggcgccatgtgcatcctcgatccctgcgccggcgaaggcgtggcgatcgccgaagccgctcatgccctcgggcgcgaacaggtgaaggcatttgccgtcgagtacgacgcggagcgcgccacccatgcgcgcagactcgtcgatcgttgtctgcatggcgacctgatggactcgctgatttcccgccagtccttcggactgctgtggctcaatccgccctatggcgacctgacgcggggcgtcgatggcaacatcggctaccagggtcagggccgcgcacggctggaaaagctgttctatcagcgcagcctgccgctgttgcagtaccacggtgtgctggtgctcatcatcccggcctatgtactcgatgccgagttcgtcggttggctgacccgccacttcgccgacctgcgcatctaccgtgcggtggacgtgcagttcaagcaggtggtgatcttcggccggcgcgtgcgtcagcgcgagcaggtgccggaggacgccaagacggcgcgcagccttttgctgcaagtcgggcaaggcgacatcgaagccgaggaattgccctgcgaatggccgttccagccttacacggttccggcgtctcccgtcgaaccggagcacttctatcgcgtcacgctcgaacccgagcaattcgccgacgaggtacagcgcctgcaagggctgtggccgtcaatcgacacgcacctgggcgccgcgcagcaattgccacggcccccggcgcgcgccctgtcgcactggcatctcgccctggctttggccgcaggcgcggtttcaggcgtcgtgcaatcgaagaacggccgcacgctcgtcgtcaaaggtgatacccacaaggagaagtctcaccagacggaatacaccgagcgtgacgatggctccgtggccgagacgcgcatcctcaccgacaggttcgtgcctgtcatcagggcgtgggacatgacccttggctctcccacatggggccaggtactgaccattcgctga

SEQ ID NO: 340189 - DNA, 297 bp, Pseudomonas aeruginosa
atggcactcgcagttctgtctcaaccacgctttcgggccggaaaattgctcatgaccgcaggcgtgaatgaccttgttcaacggggtgtgttcaaccccggaccctatctccagcgccatctcgatggcgattggggcgatctctgcgacgacgacaggcggcagaacgatgccgctttgaagttcggcgaggatcgattgttctcgtcctaccaagtcacttccgacctgaagatctggatcatcaccgagtgggatcgcagcgtaaccacgctgctgttgcccagcgagtattga

SEQ ID NO: 340190 - DNA, 2271 bp, Pseudomonas aeruginosa
atgtccctcgatcttgaaactgttcccgataccgccgtgcggggcgacctgctggaagcggcggcttctccactcacgatcagcttgcaggacttcgtatcggagttcggcgacgagttgctcgattctctcaaccgcgccaacccgcccgtctacgctgggcaggcacgggcgcatcgccagaccatcctggccggcctgaagcggaagttgtttcccgcccaggccgaagtcgtccatgccgtcaccgagctgctggtcgatcgtggcgaacgcgccgcgatcgtcaacggcgagatgggctgcggcaagacgaccgtcggcatcgccacggccgccgtgctcaacgccgaaggctaccgccgcaccctggtgctctcgccaccccacctggtctacaagtggcggcgcgaaatccaggagacggtggccggtgccaaggtctgggtgctcaacggcccggacacgctggtcaagctgctgaaactgcgcgagcagttgggcgtaccaccccaggggcaggagttcttcgtcctcggccgtgtgcggatgcgcatgggctttcactggaagccggtgttcgtgcgttggcgtacccgtcacggcgacgtgggggcgtgcccgcattgcggccatgtcatcaccgacctggacggcgagccgatcaacccggtggaactcgaagcggaggaaacccgccgcaagtgcggacactgcgcctcgacgctgtggacgctgatccgtccccggcgcctgtcggtcaacgaccagtcccacgccgtgctcaaggcgctcaagcgtattcccaccatcggcgaagtcacggcgcagaagctgatgaagaagttcggcgagtcgttcctggcttcgatgctgggcgacaacctgtacgagttcatcaatctcatggacgacaacggcgagctggtgttttccgaccggcaggcccagcgcatggaacgtgcgatggcctcgatggagttcggcttcggcgaaggtggttatcagccttcggaatacgtcaaacgctacctgccgcaaggcacgttcgacctgctcatcgccgacgaggcgcacgagtacaagaacgcgggttccgcccaggggcaggcgatgggggttttggcctccaaggcgcgcaagacgctgctgctgaccggcaccttgatgggcggttacggcgacgacttgttctacctgctgttccgcgccctgcctgggcgaatgatcgaagacggctaccggccgagcaagcaaggcagtctgacgccggccgcgatggcgttcatgcgcgatcacggcgtgctcaaggacatctactccgagagcaacggctcggcccacaagaccgccaagggcagcaagatcacggtgcgaaccgtgaaggcccccggcttcggtcccaagggcgtgctgcgctgcgtattgccgttcacggtcttcctcaagttgaaggacatcggtggcaacgtgctgccgccctacgacgaggagttccgcgaagtggcgatggacgcggagcaggcgcaggcctatggacgcctggcggggcaactgaccgccgagctgaagcaggcgctggcgcgccgcgacacgacgctgctgggtgtggtcctcaacgtgctgctggcctggccggacacgtgctttcggtccgagacggtcaagcatccgcgcacccgcaacctgctggcgttcacgccgtcgctgttcaccgatctggaggtcatgccgaaggagcgggagctgatcgatatctgccgcgaggaaaaagcggcgggacgcaaggtgctggtctacagcgtctataccggcacgcgcgacaccacatcgcgcttgaaggtgctgctggagcaggaaggcttcaaggtggcggtactgcgcgcgagcgtggatgcctcccgccgcgaagactggatcgccgagcagttggatcgcggcatcgacgtgctcatcaccaaccccgagctggtgaaaaccggcctggacctgttggagtttccgaccatcgtgttcatgcagtcgggctacaacgtgtactcgctgcagcaggccgcgcgccgttcctggcgtatcggccagaagcagccggtcagggtgatctacctgggctacgcggccacctcgcagatgacttgcctggggctgatggccaagaagatcacggtgtcgcagagcacgtcgggagacgtgccggaatcagggttggacgttctcaatcaggacggcgactcggtggaagtggcactggcacggcagttggtacattga

SEQ ID NO: 340191 - DNA, 507 bp, Pseudomonas aeruginosa
atgctatccattcgccgcccatacccggccggaaacgccgcgcttgccgccggcctgatcgccgccgccctgaccgccggatgcgccacgtcatccgtcgcgccacccgtcatcgaaccggagccggaaacacaagcccggcccgtgccggacggctggattcccatcgttcggtatgggcgctacacgctggtggagctggtcccggaggccgcccagcaagacctgctgttgcaggtcatcgacgtgtcgatgccggcgaccctgcccgcgacggtcggcgaggcgctgggctacgtgctgctgcgttccggctacaccctttgcgaagccgatcccgacgccgcaccgctccaccatcttcccttgccggccgcgcacctgcggcttgggccgcttttcctgcgcgacgccctgctgacgctggcggggccggcctgggagcttcacgtcgatgatgtggggcggcgggtgtgcttcacccaggaacaggagcctctgccatga

SEQ ID NO: 340192 - DNA, 660 bp, Pseudomonas aeruginosa
atgaccctgcctcctgacttccatccggcatcccgtacccgcctgctgcgagtcgccgcagcaacctggctgctgctggtcagcgcggccgtcgtcgtcaatcacgtggccctgtcccgtctggccggggatgtgcgagccagcgcgccggccatcgacgttgcgctgctcgatggccgcctcaccgaactggaactgctgacggacagcaccgggcacgagccggaaccgctgacccaggccagcttcgacacggttcgccaggcgctggaggaacggctcgcccggctcgaacaggcggacaccgaaccgcctgccacgaccgacattgcacacctgcaaagccgcctggatcagctcgaagcgcgcttgaaggaagtccgccagccgccaccacccgctgccgcgccggcacgtcgtccgcccccggccgaggccgcacggcccgcgaccgtcgaaccgccattccggctgctggacatcgaactgcgtgccggcgagcgcttcctgtccatcgcgcccgccgattcccgctcgctcgcggcggtccgcgtgctgcgtctcggcgagaccgagagcggctggcggctcgaatccctcgaagggcggaccgcgacctttctgttcaacggacaggcacggcgtttgagcgtgccgtag

SEQ ID NO: 340193 - DNA, 732 bp, Pseudomonas aeruginosa
gtgaagccgtggttcgttcgtttcgttctggcggtcgccgtcacttcgatggcttcggcggtcgccgtcgcgcagaacgcgcccgccgccgactcccgcatcgtccagagccgggacagggccgccatcgacgccgatcttgacgaacgcctggcgcgggattgggggctgcaaaccgaggagtgggcgcgctaccgccagttgatgcagggaccgctgggtgtgtactcgcccggtctcgatcccttcacggccctcggcatcgaggcgcgcacggacgaggaacgccgccgctacgcggagcttcaggtgcaggcggaggcccgccgcgtcgagaagctgcttgcgtaccagcgtgcctatgacgatgcctggaagcggctccatcccacgcttcagcccgtcgtcctgaccgatgccggcacccctcccgccacgtccggcgccctggggcggctggcggtcttcgtcaaggacgactgcccgccctgcgaacagcgcgtgcggcaattgcagaccgcaggcacggccttcgatctctacatggtcggcagccgccaggacgatgcgcgcatccggcaatgggcgacgaaggcaggtatcgagccggccaaggtgcgcgcacggaccatcaccctgaatcacgacgccggccgttggctgtcgatcggtgtgccgggcgagctgccggccgtcgtgcgcgaggtcaacgggcaatggctgcgtcagtga

SEQ ID NO: 340194 - DNA, 585 bp, Pseudomonas aeruginosa
atggctgcgtcagtgagcctttgccgggcaggcgtcctgtgcctgctctgcctcgctgtctggaccgcgcccgtcctggcgcgggaggttccgccgccggcctatcaactggccgcgcacgacgccggcattccctcggcggtgttgtacgccgtggccttgcaggaaagcggcatcgcgctgcgcgggcagcgaactccgtggccctggaccttgaatgtcgccggccaggcacggcggttccagacccgcgaggccgcctgcgcaaacctgcggcgcgtgctgcgggaggtgccggcaacgcgcatcgacgttggtctggggcagatcaacctcggctaccaggcgcaccgtttcgatcacccctgcgaactgctggacccgtaccggaatctcgcggtcgccgccgcgatcctgcgcgaacaccacaggcccggcgatgactggctgctcgccatcggccgctatcaccgccccgccggtggcgcaccggcagcccgctaccgccgcagcgttcaaaaacatctggcgcgtgtgcagggcagcccggttccgtccatcgcatcgaggagtcatcgaccatga

SEQ ID NO: 340195 - DNA, 537 bp, Pseudomonas aeruginosa
atgaacatccgcctgtgcgtactgccgctgctgggtctgctggccctcaccgcccatgccgccgaccagacccttatcgtcgtcgaggatcgcggcggcgcgtccgccttgccctactaccaggcgctgaacctccagccccgaaaccctcgccaggcactaccgccaccgcatatcgaggtgccgccgctgccgggggaacgtcacggcgaggccgacatgctgccagtgcgctcgacgctgttgacgccgggcacggtggagcgtcgggtgatcgaggcgcaggggttgcgcccgctgttcctcgtcggtgatgacgaacgctcacgcgcctggctgcgtctgcgcgtggaagtcttgcacgaactcggcgcggtcggcctcgtggtcaacgtcgagtcccaggtcacgctggatgccctgcgacgcctggcgccggaactgatcctgtccccgatctccgccgacgacctggcccgacggcttggcatccgccactaccccgtgctcatcaccgccacggggatcgagcagtga

SEQ ID NO: 340196 - DNA, 2166 bp, Pseudomonas aeruginosa
atggcccagccgcattcggtggaagtcctgctgcgtccggcggtcgagctttacaccgtcgcggtctgcctcggcgccgccgttctctgcctcgccgccccctggtcgctggcactgagcccactggtgggcctggccggtgcgctggcctttctgaccttcggcaccatccgcttctatgaagcctgggcgatcctgcgctatcgccgcaacattcgccgcataccgcgctacgtgatggccagccgcgacgtgccggtgagccagcagcggctgttcgtgggccggggttttcgctgggatcagcgccacacccacaggctgatgcagacctaccggccggagtttcgccgctacgtcgagctaacaccgctctaccgatccgtgcgccggctggaggagcgattggagttcgcgcctttcccgctgcctctgctgacccgcgtgacggcgtgggacaacccgttgaacccggcgcggccactgccgccggtcggcggcctgccacggttgcacggcatcgaaccgcacgaggtcgatgtgtcgctgccgctgggcgagcgtgtcggccacacgctggtgctcggcaccacccgtgtcggcaaaacccggttggccgaactgttcatcacccaggacatccgccgcaaggtcaatggcgagcacgaggtcgtgatcgtcttcgatccgaaaggtgatgcggacctgttgaaaaggatgtacgtggaggcccagcgcgccggacgcgcaggggagttctattgctttcatctcggctggccggacatctccgcgcgctacaacgcggtgggccgcttcggacgaatttcggaggtcgccacgcgcatcgccggccagctctccggcgaaggcaacagcgcggcgtttcgcgagttcgcctggcgtttcgtgaacatcatcgcgcgcgcgttggtggagttgggacgacgccccgactatctgctgatccagcgccacgtcatcaacatcgatgcgctgttcatcgagtacgcgcagcactttttcgccaaggccgaaccgaaagtctgggaggtcatcgtccagctcgaaggcaggctgaacgacaagaacattcctcgccacatgatcggacgggagaagcgcgtggtggcgatcgagcagtatctgtcgcaggtgcgcgtctacgacccggtgctcgacggcctgcgctcggcggtgcgctacgaccgcacctacttcgacaagatcgtcgcctcgctgctgccgctgctggagaagctgaccaccggcaagatcgcgcaactgctggcgccgaactatgccgatctcgatgatccgcggccgatcttcgattggttgcagatcatccgcaaacgcgcggtggtctacgtgggcctggatgcgctgtcggacgccgaggtcgcggcggccgtgggcaactcgatgttctccgacctggtatcggtcgccggacacatctacaagttcggcatcgacgacggcctgcccggcgcctcaaccggcgccaaggtgccgatcaacgtgcatgccgacgagttcaacgaattgatgggcgatgaattcatccccatggtgaacaagggtggcggcgctggtatgcaggtcacggcgtacacgcaaacactcagcgacatcgaggcgcgcatcggcaaccgcgccaaggccggccaggtcatcggcaacttcaacaacctgttcatgttgcgcgtgcgggagacgatcaccgccgagctgctgacccggcagttgcccaaggtcgaggtatacaccacctcgattgtcagcggcgcgacggatacctccgatccccaggggcacactgcgttcacgtccaacacgcaggaccgcgtcaccaccaccagcgtgccgctgatcgaaccgccgcacgtggtcaatctgcccaaggggcaggctttcgcgctgctcgaaggcggcaacctgtggaagatccgcatgccgctgcccgcgcccgacgccgacgaggccatgcccaaggacttgcaggagctggccggctacatgcgtcagcactacgtcgatgccggcgactggtgggaaagccagggcctgccggcgctgcagcacgaagcgctgccggcagacctgctcgacgacttcaagcaaatggccttcgccgatactgccgaggatggaagggcatga

SEQ ID NO: 340197 - DNA, 750 bp, Pseudomonas aeruginosa
atgagcgatccggccgtcgcggcgcaacgccaacaggtacgccagagaggttttctcgccagccttgtcaccttgccgtttcgcttcttcggcgtgctttgtgggtcgctgctgctgtgcatcctgatcgaatggatcggcatgcacctgttctggccggaacagggatggcgtcatgcgcaggacatggtggcctacgagctggaccagctatcgacctacttcacgcgcagcgtggtggtgcaggaaccggggcgcaccgcccatcggattgtcgagtgggcgtatgaatgggtcttcctcaagaccgggctgctggagtgggtgcagaacgcctccgcgcaggccagcgccggcagccacggtcagaccagggatttccggtactacctgagccaggtctatgtccacctggaaagctatctgatcgcggcggcgtacacggtgctggtgttcctcgtgcgcctgctggtgctgtgcctgatgctgccactgttcctcatggcggctttcacgggcctcgtggacggcttggtacgccgtgacatccgccgcttcggcgcggggcgcgaatccggcttcgtctatcaccgcgccaaggcggccttgatgcccctggtggtactgccgtgggcggtctacctggcgctgccgatcagcgtgagcccgatcctgattctcttgccgagtgccgtgctgctgggcgtggtcgtggacatcgcggccggaagcttcaagaaatacctgtag

SEQ ID NO: 340198 - DNA, 2070 bp, Pseudomonas aeruginosa
atgaagctgcgtcatgcaaagatcaagaacttccggttactcgcagacgtgcagcttgctctggaggatttgactactgttgtcgtggggcgaaacaacagtggcaaaacttcactgtccgagatcatacggcgactactagccgaaggcagcgcagcatttcaactcgaagatttctccagtgcctgctacgacaggttctgcacggcactggaagctcataataatggccaagatgacgatgtagtcagggctctgattccgttcatcgagttgcgtttgacgtttgaatatgaccctgctcagccacagttggggcctctcagtccattcgttatcgacctcgaccccgactgtaatgaggtactcgctgtagtccgctacgagttgaaggatggacagctcgcccaatttttctcgggtcagccggatacccccctgaccgatgaaacgaggatagctttctttcgctcgcttcgagaacgtattccaaccagctttgccgtcagggtatgggcggaagatccgaatgatgcggagaacaatcgtcagttgcagccgagtgcactgaaggctctgatcaaaaccggcttcatcaacgctcaaagaggcctggacgacataacatcccgcgagtccgatgtactcgccaagactgttgaactcctctttgccacagcttcttcatcttcggcagatgaggctgacaaacagattgcccaagcgctgaaagaggccgttcaggacattcaatctcagatagacagcagcttcggcggccaactgaacaatctgataccggcattgaagaactttggatacccaggattgggaaatcaggaactgcataccgagacattgcttgatgttcgcaagctgctctccaatttcaccaaggtgcgctatgccggctacagcggtgtgactctgccggagtcctacaacgggcttggagccagaaacctcattttcatccttttgcagcttgcgggattctataaatcgtttctggccgaaccaaattctccaggggtgcacctggtcttcattgaggaacccgaggctcatttgcaccctcagatgcaggaggttttcatacgtcagctcgcgaagactgctcaactgctggttgaaggcacggaaagtaagacggcttggccggtccagttcgtcgtttccacgcactcatcgcatatagccaacgaggccggatttgaaagtatccgctatttcctcagtggcgaagtacaaggcgcagccgctggcgttcgccaaacgagggtcaaggatctacgcgaggggctggacggcgtttccgaaccggacaagaagtttctgcatcagtatatgacgttgacccgctgcgacctgtttttttccgacaaagcgatcctagtagaaggtttgagcgagcgactcttgctccccgcgatcatcgaaaaactggaaaccgcagagccagatcggccaaagctatcaagccagtacgtaaccactatggaagtcggtggagcatatgctcatcttttcttcgggctcctgcgctttcttgagttgccaaccctaatccttaccgatctagattcggtagaaaaaccgggcggaagcgcgtgcgaggtccacaagggaacctactccagcaacgcctgcctgaaagcctggttctccgatgataatccattcaccctcaatggcctcttgaccaaggatgaatccgaaaaggcaaagcatggcaactgcatcgcctatcagtgcgcggagaaagagaacgggccatgcggtcgcacctttgaagatgctttcattctcgcgaaccgagcattattcggcttgaatggagccacacgggaagagcttgaagcgggagccagaagccaagccagtaagatcaagaagtccgagtttgcgctgaagtacgcaatagaagaaaaagcctggacgacccccaagtacattctcgatggaatacgccggctagcggctggcatcgagccagctatccctgacccggcgcttgccctggcggccgaggcgatgatcgccaacgaggaggatgccgctgatgcctga

SEQ ID NO: 340199 - DNA, 1740 bp, Pseudomonas aeruginosa
atgcctgatccgcagtcaccggccgaggttgccagccagcgcgctcttgatgccatgtttcgcagcctggatgccggagagcacttccggctagaagctggagcaggcgctgggaagacctactctctcatcaaagcgctccactatttgatcgagcgccacaaaagcacatttccaaggaaaaacaagcagattgcgtgcattacatttaccaatgtggcccgcgatgaaattgccgcccgtactgacagaagcccaatggtgtactgcgacaccaatcatgccttctgttggtcattgatcagtggcttccagaaacaactccgtggtttggttgaggcgatgccggcatggcaagagagaattgcggaagctggaggcggcctgggtaaccgtgtaatcgagtacaactttgggcaccgttccattcgtgaagatcgcgtgtctctccatcacgatgatgtgttgcccctcactgtttcattgatggagcatgccaaatttaggcatatagtgacagatcggtttccaatcattcttgtggatgaatatcaagataccgataaggattgggtcgaggcgattcagcggctgtttttggggaatccgccttcacccctattcggcttctttggcgaccattggcagaagatatatggcaatggatgcggaagacttgagcatccgcaagtcaaggagattggcaaggaagccaacttccgatcagtcaaagccattgttgactgcctcaaccggatgcgcccggagctacaacaatttgtcgaagaccctgacgctattggacaggtcagcgtatttcatacaaatgcctggactggaggacgacaaaccggtgcccattggggaggagatttaccttcggaagtcggccacgacacacttgagggagtgaaggcctcgttgacacaagagggatgggatttttccccggaaagtacaaaggtactcatgctgacgcataggcttcttgccagtgagcagggctatgccagcttgccatcagtctttcgttacaacgattcctttgccaagaaggaacatccgtatattgccttcttcgtagaccagttggagcctgcgtgcgatgccttctccgcgaataggttcggcgccatgttcgatgcgctgggcggtaacacgccgctattgcggagtcaggccgataaggcagcctggcacgatgcgatgagccagctactggcgattcgcgaaaatggcacggtcggagaagtcatcgaccacctgctcaaccggcggaagccaagactcccggaagccatcgagaagcgtgagcgggaactacgcgagttcgatcgagcaagcggcgaagagatgccggccgcactggcggagatagagaagctacgcgcggtcagatacgcagaaatcaaaacgctacggagctatctggatgggcactctccctttgaaaccaaacacggagtaaagggcgcggagttcgagaatgttcttgttgtcatcggtcgcgggtggaaccagtacaactttggagagatgctcgaactggcaggaagcgcagccatcccacccgggaagcaggcggccttcgagcgaaatcgaaacttgttctatgttgcctgctcaagaccgaaacgccgccttgccctgctgttcacacagcagctttcgccagatgccatcgcaacacttgaaaggtggttcttgccagagagcatccgtgctgtcgctttttcgtag

SEQ ID NO: 340200 - DNA, 351 bp, Pseudomonas aeruginosa
atgggacataccaacagccacgaacttgcccggcgtcttccgatcgccgcgctattggctatccctctattggcgttccaagcctcggtgttcgccggtgatgctacggaaccagagcgactggccgtcctcatgcgtcagctcgacatgctcgaccggctggccgagcacagcgagcgcctgccgaagcaggacgcctcccgctaccacttcgactacgcgcggctgcgcgaggacatcgagcgtgtccgcagcggcatccgtaactacctgacgccacaacgcgcacagccgcgcgaccccacaacgctgatcggcgattaccgccaagaggcggaggacgcgccatga

SEQ ID NO: 340201 - DNA, 234 bp, Pseudomonas aeruginosa
atgacgggcgatcaggtcaccgcctttcaggccaacagcggtttcggcccttcggatgtttccgtcgtcctggtcggcggcgtgttcgtcgtgctgttgctgtggggcgtctgggcactgcgcacagcctatgtcggctgggccgaaaacagcatctcccagcgccagttcctcggcgtcgcggtgcgattcgtcgcgatgtacgtcgtgctgacgtttttccttctctcttga

SEQ ID NO: 340202 - DNA, 369 bp, Pseudomonas aeruginosa
atgactttccgttccatctccactcgcttcgcccgcctggccggcctgcccgccgtcgccgtgatctccgcgagcctgtcgccgatcgtgcaggcccagggcctgccgaccatcgaagacccgtcgcggggcaccggcagcggcatcatggagacgctgcgcaattacggttacgacatcgtgatgctggtcgcgctgctcgtggtcgcctcgatgttcgtcggcgtctgctaccacgcctacagcacctattcggagattcacaccggccgcaagacctggggccagttcggtttgacggtcgcgatcggcgcgatcctgctggtcgtgggcatctggctgctcaccgaagccaccggcgtcctgtaa

SEQ ID NO: 340203 - DNA, 399 bp, Pseudomonas aeruginosa
atgttggggagccaggacagcctgcacgacggcacggtgacgttcctgccgcatcgtctgaaccgccaacccgtggtggtgcgcgggctgacggccgacgagctgtgggtctgcgtggggctctccgccacggtcggcctggtgcttggcattccgctggcgtggctggcgtccacgctcgcgatggtgccgaccctgatcgtagcggccatcggcatgggcgtgttcgttggcggcggcgcgttgcgacgccacaagcgggggcgtcccgatacctggctgtaccggcaccttcagtggtggatcgcgctgcgccatcccgccttcgcgccctacacgggcggcaggtcgctgatcacgcggtcgggctactggacggcgcgcaggagtgcaccatga

SEQ ID NO: 340204 - DNA, 669 bp, Pseudomonas aeruginosa
atgagccgcttcaagaacgagatcacgcacctccaggcgcacatcaagaccttgcgcctgggagccggcgcgctgttcgtcgtcgctctggtgctgggcttcggctggtggagtgcgccccgcgatctgaccatccacgtgccgccggacctgcgttcgggcagcgtgcgcaagtggtgggaagtgccgccggagtcggtctacgccttcaccttctatgtcttccagcaactcaaccgctggccgacgaacggcgaggacgactacgcgcgcaacattcacgcactgtcggcctacctgacacccggctgtcaggtcttcctgcgtcgcgactacgagcagcgccgcagcacgggcgaactgcgtcagcgcgtgcggggcatctacgagattccgggtcgcggcttcggcgacgacccgacggcgcgcgtccgcgtggtgtccgaccgcgactggatcgtcacgctggacgtgacggccgacgagtatcacggcgccgaacaggtcaagcgcgcgctggtgcgctacccgctgaaggtggtgcgtctggacatcgacccggagcgcaatcccttcggcctggcgctggactgttacagcagcaccccgcaacgcatcgcgccgcaggcggcagccgcctccgccgtcgatggtcctggcggtccgtag

SEQ ID NO: 340205 - DNA, 888 bp, Pseudomonas aeruginosa
atgaaacgtcttgttcttaacttcctggcaaccgccaccttgaccttgggcctgatcccgagcgctctggcgctggagattctgcgctgggagcggttgccgctggccgtgcctctcgtggtcggccacgagcgcgtgatcttcatcgaccgcaatgtgcgtgtcggcgtgcccgcctcgctgggcgaccgcctgcgtgtgcaaagcgccggtggcgtcctctacctgcttgccagcgaaccgatcgagccgacccgcctgcaattgcaggatgccaacacgggcatcctgattctgctcgacattgccgccgagcctggcgaggcgccgctggaacccgtgcgcatcatcgaaggcgaatcgcacgcgaagcgctacggtgacaccggccaacagccggccgccgatgcggcgcggctccccgcacgggagacgccggttcccgtggtgctgacgcgctacgccgcgcagagcctgtacgcgcccctgcgcacggtggagccggtgaacggcgtcgtgcgcgtgaacctgcgccgcgacctggcgctcggcacactgctgccgacgctgccggtgcgcgccagggcgctggccgcgtggcggctggaagatcaatgggtgacggcgatccggctgaccaacacgtccgcccggtggatcgacctggacccgcgcgccttgcagggcgatttcgtcaccgcgacgttccagcaccccgacctgggaccggcgggcgattcgcgcgacaccagcgtggtgtacctggtgacgcgcggccgcggcctggcgcaatcgctgctgccagccatcagtcccatcgacgctgcgcacaacttgccggcctccgcagcggccggcagcgcggaaggagccggcgatgcgcagtaa

SEQ ID NO: 340206 - DNA, 1419 bp, Pseudomonas aeruginosa
atgcgcagtaacggtttgctcaagtggttgatgctgccgatggcgctgttgctggtgttcgtcggcatcaagctgttttccggcgaccgtggcgcatcaccgctccccggcgatgccggcggccaactgacggcggacgagatgcgggcgctcggcatcgaaggcgacacgccgcacgatacggtcgccacgctggtggcccaggtgcggcagttgcgcaccgaattgcagaccgcgctgtccgacaaccgcaaccagcgggcggagaacgaccgcctgcgtcaacgcgagcggtcgatcgagcagcgtatccagaatgtcctggacaccgaacgcgcccaactgcgtcaggatcgcgaacagacggccagcgaacggcaacaggcccaggggttgttgcaggacttgcaacgccagtttgaaggcctggggggcagggccggccacaccgacctgccgatcggtctcgggctggaggacggcgacggccagcacttcggccacgacggcgtgcgctggatcgagccggacgacgccaggcccgccgaaggccgcagcagcggtcgtagcggcttcagcttccccaatgatttcagcccggtcggggaaaccctggacgccgcgtccgagaccctcggccgcgccaccggcggtgccgtcggcacgtcgtcgcttgaggcggtctacaccgtgccgtcgaactcgaccctgatggggtcgatcgcgatgacggcgctcatcgggcgcgtgcccatcgacggcacggtgaacgatccctatccgttcaaggtcgtgatcggccccgacaacctcacggccaacggcatcgacatcccggatgtggccggcgccgtggtcagcggcacggcctcgggggactggacgctttcctgcgtgcgcgggcaaatccgctccatcacctttgtgttcgaggacggcaccatccgcacgctgccggaagagtccggtcgcagcagcagcaaccggagcgacaccggcacccagggaggtctcggctggatcagcgatccctacggcatcccttgtgtcagcggtgaacggcgcagcaacgcccagcagtatctcggcacccaggccctgatcacggccgccggcgcgggcgcagcctcgctgatcgattcggacagcggccgggtgtcctacgtcggcagcgacggatcgatcggaacggtaggcatcaccgccaacgaggccatgggccgcatcctggccggcggcgtgcaggagatgtcgcagtgggtgaacaagctctacggccaggcattcgccgccgtctacgtcgagccgggcgccaaggtcgccgtgcatatcgagcagccactcaccatcgactacgacgccaaggggcgccgggtcgatcaccgtctcggaggttcccatgtcccggatctggattga

SEQ ID NO: 340207 - DNA, 435 bp, Pseudomonas aeruginosa
atgtcccggatctggattgaacggctcgccgtcgtgctcacggtcgtcgcactggccggctgcgcgaccagcaaggagaagctgctgacccacggcgaccagaccatgctcgacatctggaatcaggaaacgggcggaccggcgggcggcggccgcgcatcgcacgagctgctggacgcccggcaggctttgcgccggccgctcaccgacacggacgtgcaggccgcgcccggcgtgcagacccgctacacccgcacggcgcagaacgagatttaccggcagttccaccgcctccccaacccggacctggtgatgtacgtgttcccgcacctggcgggcaccgatccggtgccggtgcccggctacagcacggtgttcccgttttatcagcgcgtgcagtacgccctgccaggcgagcgcgtggaggactattga

SEQ ID NO: 340208 - DNA, 2883 bp, Pseudomonas aeruginosa
atggcgtggtcgctgccgtggccgcgcaaacctgtgtcggcatccgaggaatccgaggcacagcaggccgacgcctgggaacgccatgtggccgacctgaaagcgcatggcattcccgaacccggcacccgcctcgatccgaaacaccgacccgccacgcaggcggatgaacaggccctctacgacgtggcgccgtccttcgtggacctgttgccgtgggtggaatatctggccgacgccaagagcctgttgctggaggacggtgaatcggtggcggcgttcttcgagctgacaccgatcggcaccgaaggacgcgaaagcgattggctgtggcaggcccgagacgcgctggagaatgccctgcaggacagcttcgacgaactcgacgagcagccctgggtggtgcagctctatgcccaggacgaagccgactggacgggttatctgaacgtcttgcgggactacatccagccgcgcgcgcagggcagcgtgttcagcgacttctacctgcggttcttcgcgcatcacctgcgggccatcaccaagccgggcggcctgttcgacgacaccaccgtgacccgcctgccgtggcgcggccagacgcggcgcgtacgcatggtggtctatcgtcgcgcgccgggcgcctcacaccgtcgcggccagtcgcccgaacaggccctggcgacggtgtgcgaccggctggccggcggtctcgccaatgccggcgtcaaggcgcggcgcctgggcgcggcggacatccacgcctggttgctgcgctggttcaacccgaacccgaccttgctgggcgcgacggctgccgatcgtgagcgcttctaccagttggccgcctaccccgaagaaacgaacgaaggcgacgtcgaactcgccagcggcacggacttctcgcaacggctgttcttcggccagccacgctccgacgtggcgaacggcatctggtttttcgacgacatgccgcatcgggtcatggtgctcgaccggctgcgcgcgccgccggcaaccggacatctgaccggggaaacgcgcaaaggcggcgatgcctgcaacgcgctgttcgaccagatgcccgaggacacggtgatgtgtctcaccctcgtcgccacgccgcaggacgcattggaagcgcatctgaactacctgggcaagaaagcggtcggcgaaacgctggcgtccgaacaggcccgccaggacgtgcagcaggcacgttcgctgatcggcagttcgcacaagctctatcgcggcgcgctggccttctacctgcgcgggcgcgacatggccgaactcgatgcgcgcggcctgcaactcgccaatgtcatgctcaacgccggcctcctgcccgtgcgcgaggaggatgaggtcgcgccgctcaacagttacctgcgctggcttccctgcctctatgacccggccagggatcgacgccagtggtacacccagctcatgttcgcgcagcacgcagcgaatctcgcgcccgtgtgggggcgcaatcagggcaccgggcatcccggcatcaccttcttcaatcgcggtggcggcaccgtcgccttcgacccgctcaaccggcgcgaccggcagatgaatgcccatctgtttctgttcggcccgaccggctcgggcaaatcggccacgctcaacaacatcctcaaccagctcgtcgcgatctaccggccccggctgttcatcgtcgaggcggggaacagcttcggtctgtttggcgaattcgcccagcgccttggcctgacggtgcatcgggtgaagctcgcgcccggcgctggcgtgagcctcgcgccctttgccgatgcgtggcgtctggtggatacgcccagccaggtgcggacgctggacgccgatgccctggacgaggaacaggaacccgaagacgcatcgggcgaaagcgatgaacagcgcgacgtgctcggcgagctggagatcaccgcccgcctgatgattaccggcggcgaggacaaggaagaggcgcgcatgacccgcgccgatcgcagcctgattcgccagtgcattctcgacgcggcgcatcgctgtgcgccggagaagcgcacggtgctgaccgaggacgtgcgcaacgccctgcgcgagcgcgccagcgattccgcgctgcccgaagcccggcgcgctcgcctgctggaaatggcggacgcgatggatatgttctgccagggactggatggcgaaatgttcaatcgtcccggcacgccatggccggaggccgacatcaccatcgtcgatctggcgaccttcgcacgcgagggctacaacgcgcagctttccatcgcctacatctcgctcatcaacactgtcaacaacatcgccgagcgggatcaattcctggggcgccccatcgtcaacgtcaccgacgagggtcacatcatcacccgcaatccattgcttgccccttacgtcgtcaagatcaccaagatgtggcgcaagctcggcgcctggttctggctggcaacgcagaacctggacgatctgcccaaggccgctgaaccgatgctgtcgatgatcgagtggtggatctgcctgtcgatgccgcccgacgaagtggagaaggtcgcgcgcttccgcgaactcaatccggcgcagaaggcgctgatgctgtcggcgcgcaaggagtccggcaaattcagcgaaggcgtgatcctgtcgaagtcgatggaagtcctgttccgcgccgtgccgtcgagtctctacctggccatggcgatgactgagcccgaggagaaggccgagcgctatcagttgatgcggcaatacggcatcggggagcttgaggccgccttcaaggtcgcggagaaaatcgaccgggctcgcggcatcgagccattgccgctcgacgccctcggttga

SEQ ID NO: 340209 - DNA, 750 bp, Pseudomonas aeruginosa
atgcgcgcgccaagccttcttacccacacgccacgacgttacctgggaccgatgctggccgggatcgcggtgctgctcgtgctgctggcctggtcgcttggacgcagcccacacactggagatccggcatccgccgaggctgccgcgtcggcaggcccgccgtggcgctacggtcgcatcgacgcgcggttcacgctgatcgagtacgccgatctggaatgcccgtactgccaagcctactttcctgtgctgaagcgctggatcgacgccaatcccgacgtgaactggcaatggcaccatctgccgctgccgatgcacgaaccagccgccacgcaatcggcacgcctggcggaatgcgcgggggaaaccggcgggcgggaagcgttctggaacaccgtcgcctggatttaccagcatacccacggcagcggtcggggcctgccgcccggcatccagccgtccggcgcgacgcccgagctgcacgagtgcctggccagcgcacggcccgacgccgtgatccgggcacaggccgaggaagccgcgctggccggcatcaccgcgaccccgatgctgcgcgtaatcgacaaccgcaccggccaggcattgctgctgccgggtgccgtcgaaggcgatgccttgctgtcggccattgatctgctgacgtcatcgggcgatgagccggcgatgaccgaaaccttgcccgagatacccgagatgcctgctgacaacgtcagcgacatgcccaggtag

SEQ ID NO: 340210 - DNA, 501 bp, Pseudomonas aeruginosa
atgaatccgtccgataccgtcgccgacggtgcatcatcagcgctcgtccggtacgcgagcatccacgaagatccgttgatccggcaagccatcggtgtgctggaggaacgtctattcaaacacggtgccgagctaaccagcccggccagcgtgcgagaatatctatggctgaaactcgccagcgaagcactggaagtctttgccgtcgtgtttctcgactcgcagcaccgcgtgatcgctttcgagccgatgttccacggcaccatcgatggcgccagtgtgtatccccgcgcggtcctcaagcgggcgatcgagcacaattgcagcgcggtcatctttgcccacaatcacccttcgggcgtgaccgagccgagccatgccgacaaggcaatcacgacccgattgaaatcggttctcgaattggtggacgttcgtgttctggaccatttcatcgtcggtgaaggaacgcctttttccttcgcggaagccggcttgctgtag

SEQ ID NO: 340211 - DNA, 459 bp, Pseudomonas aeruginosa
atgtacccacactctgaacacgtcgagacacaacgacaccggctgcgctgccgcccaacgctggcttcgtgcatgctggcaatggccgcagccgcgatggcccacgccgcagcggcggacgtccgggtattcaccgaccggcatcacgccgtagaggctctctccggcgtctacgttgtcgagttggacgcgcctgcccgcatcgaagcggagctggccgctaaccttcccgccgatccggcacaggcggccgccatcgtccggcaacgattgcaggatggcggcacgccgctccaacgccgcctggccaacgcctaccagggcttaaccgacgcctggagcctgggcgtcaccaagattcccgccgtggtcgtcgatcggcgctacgtcgtctacggcgaaaccgacgtgccccgcgcgctggcgcgcatcgaggaataccggaggatgcagccatga

SEQ ID NO: 340212 - DNA, 939 bp, Pseudomonas aeruginosa
atgaagctatcccgccgcgcatggcgcaccggcatggcgtccgtcctgctgggtaccgccgcttccgccttcgcgctcaacaccgccaccatcaccggctcggtgctgtcgcccgattgcctgtcgtatcgcgtgcagggcatttgctattggctgtactgcacgctcaccggctgtacggtgcgcacctcggtcaaggtacagcactacgttcccgatgccgtcgtgtcgagctactcgaacaccggggagaacccctggctggaagtgcgcgcgatgagcatgccgaatcccaccgctcaaggtgggggtgacggcacgacgaacgaagaacacgagaacaacctggcgaagttcaagaacgccgacgtgatcgggcatccaggcgctaccatcttcagcgagttagtcagccagttgggttactcctgcgccggtgcgggcacggcgttcatgccgtacctgctgagcacgctcgataccgtggcctggcgctacaacatccccgaatccgtctatcccgaggcgctgatccctgggatgcgcgagatcggcacgcgcaccggcctgaacctgtggggcaacgtctatccacgcggtgggctcctgcatcatgtggacgactacaaggcggctgccgtcgtcgcgcagcgtgccggcgacatcgtgacccggcgtgggcaggtccatgtctatcagccgctgcttgccaatgcgagcgcgggctactggcccgcaggtgccttggtggaaagcgatgcctccacgggaaagtggcaggaattgacgcctcggctgtcatcctcctgcgcggtcttcccgcacaacaacgtccgcatccaggcgcagcaaggcgactatgcctgggcgctgtggcgcccgtactcctgctgtcagcggcgcgggcaggtgtttctgggcagcacggatttcaactga

SEQ ID NO: 340213 - DNA, 1413 bp, Pseudomonas aeruginosa
atgagcatgtcctcgcattcacatcctttcaccatgacgcggctggcgcgcagcatcctgtttgccggcattctggccgcgatgagcaacccgctgtgggcacagaccagcgtcaatgactacggcgtgcatcatcgcggcagcgtcatcggcgatgacgtgctgtacagcatcggtggcggccgggcggtgtcgatggggccggtcggccagatgcagcacctcggtgtcggtatcggctggaacagcaacctgatctgcggcgacatgagcatcaccaccacgctgcagaaccagctcaacggcatcaccaacggcttccagaccatcatgagccaggtgatccagaacgccacggcggccgtggcgtcgctgccggcgctcatcatccagcgcgccgatcccggtctgtacaacctgctgaccaacggcatcttgcaggcacggctcgatttcgaccgcagcaaactcacttgccgcgcgatcgccaatcgcatggccgacgcagcgggtggccaactcggctgggaccagttggccgagggcatggcgctcaagcaggccgtggccagcaccgacgccgtatcggcgatcgaacaggccgagaccagtcgcggcaacgacggtgtgccctgggtcggcggcggcaatgccggcggcgccggacagaatcccatccgcgtggtcagcgacgtgacccgcgccggctacaacctgctcaacggccgcggagcgaccgatacctcgccgatcgacagcatcacctgcggtaatcgcctgagctgccagacctggccttctcccgaagccgccaccgattgggcaacccgcgtgctgggtgagcaagagcatcggacctgcgatggctgcctcaagacccaggccaccgccggcgtcggcctgacgcccctgattcaggaagagtacgagaccaggctggaggcgctgcgggatctggtgacgggtgccagcgcgaccacgttcgagaacctggaagcggccggcagcacttcactgccgattacgcgcggcgtcatcgaggcgctgcgcgacgaaccggaccaggatgtgctcgcgcggcgcctggcctccgaagttgcgttggccagcgtgctggagaaggccctgctgttgcagcggacgctgctggccggccgcaaggaacccaacgtcgcggccaaccaactcgcgcaggacgccatcgcccacgaaagcagcctgctggaacaggagatcaacaacctcaagaccgaactggacctgcggcgcgaactggcggcgaactcgccgatggcgatcatccagcggcacggtacgcgcagcgccggctcgcgcggcatctaccagggcgacaccgagcgcgatcgcctcgacgccatccagcgaccgcagaaccccggcaatccgccatga

SEQ ID NO: 340214 - DNA, 345 bp, Pseudomonas aeruginosa
atgaggatcgggctgccgaagtggctgttcaaccggcaactcggacgcacgctgggttggattgcactgatcgtgttcgtcgccgtggtcgtcaacctggtcggcattcgcctcgtcggtgatgcgaacacctggagccggtggctggacgagcatgccggctacttcctcgtctggcggctgtgcctgtatggcgcgacggcctacgggtggatatggatgcgtcgccgcctccgggaacgcgacacatcccgcgaagcgcatcagcgcctgctgcgcgcggaggtcggcgccgtcgccgccatcgtgctgctcgaaatcagcgtgctgctgcgacaaccgtag

SEQ ID NO: 340215 - DNA, 1521 bp, Pseudomonas aeruginosa
atgaccctctacaccacggactatcttgagtattacctgacactggttgcctggatcatcaacaacggcatctggaatgtgctggtggccagcggcatcttcgcgctgccgttcctcgccatcgtcgtgcaggaatggctcaaggcccgtgcggaaggcgcggacgaaggcaacaagggcgtgctctcgtccatgcgcatcgagaaccgcgtgtgggtggcgatcgtggtcatcatgttcgccggcattcccttcattcccgttgacctgagcaccatccagttcgatcgcacgcgctcgacccaatgccaggtcaatgtgccgctgccctcggaaacgaactggtccgcttcgttcacgacgatcaacaaccagagtgcccatgtgccggtctggtggttcttcatgcactcgctgtccaaggccgtcaccggcgccgccgtggcggcgatcccctgcggcacggacctgcggcagatgcgcatggagatcgacagcacgcgcatcgccgacccggtgctggcccaggaagtcgccgacttcacgcacgactgctacgggccggcccgcgccaggctgttcatgagccggccgacactcagcgaggagcagatgaacgacgtgacctggatcggttcgcgcttcttcctggacacggccggcttctacgatacgtatcgctcgcgcggaccacgcgacgcctggccctatgacgacacgcgcgacgccggcctcgccgaagtctccactggcggcggctatccgacctgtcggcagtggtgggcggacagcggcgacgggctgcgcgatcgtctgttagcccaggttgatccgggcctgctgtcccggctcggccaatgggccggtttcctgagccagacccaggccgacgatgccgtgatccgtgccatcgcttcaccacggcaacaagtcatgaaccaggggcacgtctacaccgactacggtggtcagatcggtatgacgctccccaacgtcgccacccgcgtcgtatcggatgtggggctgacggtaggatcactcggaatgtttccggccatggatgtggtgcgtcaggcgttgcccatgatcctgtcgttcctgaagatggcgatggtcatctgcattccgctggtgctgatcttcggcacctacgacttgcgaacggtggtcacggtgactgccgtgcagttctcgctgttcttcgtcgatttctggttccagctcgcacgctggatcgattccacgatcttgaacgcgctctacggctggcactcgccgcacagcaacttcaatccgctgatgggtttgaacaacgccttcggagacatgctgctgaatttcgtgatggcgacgatgttcatcatcctgccaggcttctgggtcgttgcattgacgtgggccggggtcaggacggggaacattctcggcgggttcatcactggcacgacggatgcgaagtcggcgggcggtagcggctcgcgcctcgccatggcggcggcgacgaaaggcgctgcgaagtaa

SEQ ID NO: 340216 - DNA, 360 bp, Pseudomonas aeruginosa
atgaacgcgacgccccgtaccacaaaagcagaacgcgccggcagatggctcggccgtgcgtggcgtggccttgcacggcaagaggcccgtgccatccaatggctggggggcaagggactgccggccggcgtagcacggctgctgttctggatcgtgaaactcgtcgtgttcggcgtgctgctgtacgcagcgttctggctggccctgctgatcgcgttcgcgctgatcgcagcctggcttgtgcgcaacgccgacctggatgaagagaagcagcctgaactcagggacggtcattcgggtgccggcgtctacgacaaggacgactggcgcatcgacctgggcgatcccgacgacccgtag

SEQ ID NO: 340217 - DNA, 465 bp, Pseudomonas aeruginosa
atgcagcgccacggatgggtgctgctgttccatgagtgcatcgtggagcagcttcagaagctgcacgcggcggccggacgcgccgagcgcaacgatccgaagggctttgagcgcaacgccaacgtcaagctgtttcgtgcgttgagccagttgatcctggagacggtgccgagcgatccggcacgggacgaataccgccagggtaatacccttgggccagcctatcggcactggcggcgcgcgaaggtcggacggcggtttcgcttgttctttcgctacgactccaaggcgaagaccatcgtgttcgcctgggtcaacgatgagcagacgctgcggtcggcgggcagcaagtccgacccctacgccatgttcgagaagatgctcgaacgagggaatccgccggacgattgggacagcctggttgccgcgagcaggtctgattggtccacacaggagaagcgataa

SEQ ID NO: 340218 - DNA, 318 bp, Pseudomonas aeruginosa
atgcccggcatccacgaactcgccacactcacgtccaagggacagatcacgttgcccaagtccatccggcaggcgctgggtgtgaccaccggcggcaaggtggccttcgagctgcgcggcggcgaagtcgtcgtcacccgcgccgaggccgagcacgaagacccggcggtcagcgccttcctgggcctgctggaagcggacatccgcagcggcaggaacgtcggagcgctgccggtggaactcgcccaggccatgctcgccaacatgggccacgcctcagacctcgatgaagacatcgagggagaagtggcactttga

SEQ ID NO: 340219 - DNA, 816 bp, Pseudomonas aeruginosa
atgcgttttccgtgcggagcgcttctgattgattggattctgtgctatttttcgtacatgaacggaaatcctagacatcaggtaatcaagcgtctgcaggcggaactaccgcgtggggcgccgttcgaccttgccaccctgaaccagttcggggtgtcgccccaactcgccgcccactacgccgatgggggttggctcgtgcgcctggctcagggcgtctatgcctttccgaacgatgacttcggggtctacggtgccctgaagttcctgcaacagcgcgtgcccggcctgcatgtcggcggcaagagcgccctggccctgcaaggcgtgcagcacaacctgggcagccgggacaccctggtgctgtggggcgatagccgcttcacgttgccgcgatggttcacctcacgatttccggcccgctatgtccatgctcgtctgttcgattggccggacacgccactggccaacaagaccctgatcacgccgccgggcctgcccgacctcctgcgggtggcggttcccgagcgcgccgtgctggaactgctgtacgaggtcggcgtcaagcaaagcctcgaagaagcacgcaatctcttcgatgggctgcgctcaccccgcaaggagttgctcgggcaactgctgtcctgctgcaccagtgtgaaagccgtgcgcctgtttctcacctgggcgcgcgagacggggttggtggaggtcgatgccctgctggaacagtacccggtccgcaccggcagcgccgcgcgctggatgggccgactcgatgacggtagcctgttgagtctgagacctcatggataa

SEQ ID NO: 340220 - DNA, 921 bp, Pseudomonas aeruginosa
atggataagacctacgcggacactgttcgcctgctgctggccatcgtgcccgacgtgttcgccaacgacatctttgcgatgaaaggcggcacggcgatcaatctcgtcgtgcaggacatgcctcgcctgtccgtggacatcgacgtggtgtatctcccgtggcaggtgccgcgcgacaccgcgctacaggcgatcaaccaggagttggccgccatcgccacgcgcgttgcgtcgctcggcgtacagacacgcctggtccgcagcaaggatctgggggataccaagctgatcgtcgagaacgagagcagccaggtgaagatcgaggtcaacgtggtgtttcgcggcaccgtgctgcccgccgaacgacgctcgttgagcgccaagaccagcgacctgttcggcgtcgaactggaggtgccgatcctggcgccggacgagttgtacgccggcaagctggtggccgcgctggaccggcagcatccgcgtgacctgttcgacgtgtggcagctctacgaatcgggcggcatcagcgacggcatggtcgaatgcttcgtggtctacctggcggggcacaaccgaccgacccatgaggtgctgttcggcaacgacaagaacatcgctggcgagtacgagcgggcctttgtcggcatgaccgaagtggactgctccctggagacgctgctggaagcccgcgcccggttgcggcacgaattgcctgggcggttgagcgcgcagcacaagcgattcctgagcgggttgacgcgcgcgcagcccgattggtccctgctgcaatgccagcacgccgcgcaattgccggcgctgcgctggaaactcagcaacctggaaactttccgcaagcgtcgcccggaagacttcgcagcccaagccgatgcactcgacgccggcctgggtcaagcctga

SEQ ID NO: 340221 - DNA, 1848 bp, Pseudomonas aeruginosa
atgttctcgctgttccaacgcaaaagggtgccaaccgccggcacaccgtccaccgcctccatagcgatgccccaagggctgacccggccggagtcggccgcctcgctgctggcgacgccacgccggcggaagctgctggaacacatctggcaacggacctcgctgtcgcgcaagcaattcgccacgctgtacctgacacccctggagcgctacgccgagctggtgcaacagttccccgcctccgagagtcaccatcacgcctatccgggcggcatgctggatcacggcctggagatcgtggcctacgcattgaagctgcgacagtcgcatctgctgcccgccggggtcacgccggaagcgcaggcggcccaggccgaggcctggactgcgggcaccgcttacgcggccctgctgcacgacatcggcaagatcgccgtcgatctgcatgtcgaatatgccgatggcactctctggcatccctggcatggcccgttgcagcggccgtatcgcttccgctaccgcaaggatcgcgagtatcggctgcacggtgccgccaccggactgctgtacacccggctgctggaccgcgagattctcgactggctcaacggcttctccgatctgtgggcttccctgctgtacgtcctggccggccagtacgagcacgccggcacccttggcgaactggtcgtgcaggccgaccaagcctccgtcgctcaggaacttggcggcgacccgaacaaggcgctggccgcacccaggcacgcgctacaacgcaagctgctcgacggcctgcgctatttgctaaaagaggagttcaagctgaaccagccccaggcttcggacggctggctgacccaggacgcgctctggctggtgagcaagaccgtctccgacaagctgcgggcgcatctgctatcgcagggcatcgatggcatcccggccagcaacacggcagtgttcaacgtgcttcaggaccatggcatcgccctggccacgccggacggtaaggcgatctggaaagccacggtcgcgagcgatgccggctggtcgcacagcttcacctttctgaaactgtccccggcgatgatttgggaagcgtccgaccggccggcagccttcgcgggcaccgtacaggtggagccggaagggtcggcggcacagacacccgcacccgaggccatcgacgtggaaacaggggaatccgccccggtgactaccgagtccaccacatcaacgactgccgacagcagcgtcgaggagctgctggaactgctcgattcgtctcccgcgtccactgctacggccatgccgcttcagcccctcgctgagaagcccgcgccgttgccggaccataagcccgccgacaccacgccggtccaggcagtacaccaaggcgacgccgatccatccggtgctcattttctcgcgtggctgcgtcagagcatccagacgcgcaagctcatcatcaacgacgccaaggcgctggtacataccgtggccgacacggcgtatctcgtgagtcccggcgtgttccagcgctacgcgcaggagcacccgcagatcaccgccctggccaagcaggacaagctaccggaatggcagtgggtacaaaagcggttcgagaagctgggcctgcaccgcaaacaggccagcgggctgaacatctggaattgcgaagtgacggggcctcgcaagtccaggcggctgcacggatacctgctgaccagccccgatacgctgttccatgagatacccccgaacaatccttacctgcgcctcgccaacgccgaggcacagcgtgacgactcggcgtttcatgccaagaacgatgacgagcaggaatag

SEQ ID NO: 340222 - DNA, 147 bp, Pseudomonas aeruginosa
atgggcaagatcgagcggggcgagcacattcccacgcttcctctgatcctcaagatcgcccgcgccctgaagtgcagctctgcccacctgatggctgcgatggaggccaagctggccgaatcggacccgcccaagcgcggcaactga

SEQ ID NO: 340223 - DNA, 627 bp, Pseudomonas aeruginosa
gtgagatcgatcgacgtctccactgaaatccgcctggcagtcctcggcgattgggttcctccccaactcgccgacgtgctcgccatacagcgcgccgaagaacctgaaaccctggcagttctgatcgacacagcggccaccggacaacaacaggaacgacctggtgacggcttcgacttcgcgttgtccgccacccatcgggagtggcctggctggctctgcgaaccgctgtggcacgacaccctggccgtcgctgtggcaaagcgatcccacttgctggcctaccgagaagtaccctgccaggaagcgctcaaacagccgctgatctacgcgcgatcaacggccgaagagtcgtggcgcacgctcgcacagagcgcattcgagaacgaattgcgggaccgcgaagcagccgtcagtacgttcgaggtcgccatgacgctggtcgcagcggggtacggaatcgccgtggccccatccacgagacttgccgggtatcgatgccagggcatcgccctgcggccgctggcgagcgcaccgatgatcgtgaccgcctacctgattagacccgacgttgccctgacggagcctcaagagggctttcttcgacgcgcccgctcaatgtcctga

SEQ ID NO: 340224 - DNA, 1269 bp, Pseudomonas aeruginosa
atggccatgaacctgctctcggccaggaaggtcgagaccattccttcccaaaaagaaccgtactggctcaaggacgggggtagtctatttctgtacgtcacgcccagcggaagcaagttgtggcgctaccgctatcggcttggcggaaagcctgccatctacgcgatcggcaagtacccccaggtctcactggaggcggcgcggaccgagcgggatcgcgcgcgggaactcgtcaagaagggcgtacaccccgtggtggagaagagagtcaacatctccactcagcttgaaaagaacgagaacacctttgagccagtggctcgcagatggatggcgagcaacgtgcagtggagcgagggttacgccgatcaagtcaagcgcactttggagaacgatgtttttcccaaagtgggcaagctgccggtcagctcaatccggactgctcacctgcgccccgtcattaaggatgttgcggagcgcggcgctcccaccgttgcgatcctgatcaggcaattgtgcagccaaatcttcgcatacgcggcgggtgaagagctttgcgacagtgatccgacggcgctgctgaaacggtcggtcaagcgcccccgagttcgacaccatccaccgctaccgtggcaagagatcccgaagttcttgagccgtgtggatgatgcaggttaccgggtcactgtcattgcactgcgattgatggccctcacttatgtccgcacggccgaactgcgcaaggcgcactggtccgagttcgatctggacagtgcgatgtggacggttcctgcggggcgcatgaagatgcgcgaccctcacatcgttccgctctcgaagcaggccatcgtgctgttgaaagaactgcacacgctgacaggcggagggaaggtgctgtttcccggcttcaggaagccgggaacggttatgtcggctacgacgctcaacaaggtgttggagcgcatgggctacggtggacagttttcttcgcacggcttccgctcaacagcgaccacgctgctcggcttgttgagctacccagagaaccgggttgatctgcaactggcccactcgaagcggaagaaagattcgtcgcgcgcaccctacgaccacaccaagtacatcgcatcgcggaagatcatcatgcaggattgggcggacatcctcgatgcgatggctcgtggcgattcgatgaacgaggtcatggcaaccttcgggccgctgtcgaaacggcgcagggccttgctgcgggtcatcgagcgggagtga

SEQ ID NO: 340225 - DNA, 597 bp, Pseudomonas aeruginosa
atgtcgaacggttatccatatcccaaatatcgcgcggatatcgatggattacgtgcggtggcggtactttccgtcgtcgctttccatgcctttcccgaatggtttcaggggggcttcatcggtgtagacgtatttttcgtcatttccggcttcctgatttccagcatcattttcaaaggactggaaagggggacgttccgcttcgtcgatttctatgtgcgtcgaatcagaaggatcttccccgccttattgctggtgctggctgccagcggtgtgatgggatgggcagtgctacttcctgatgagtacgcacaactaggcaagcacatcgcggcgggtgctggattcgtttccaacctcgtgctatgggcggaggctagctatttcgacagtgcggcggagttgaagccgctgctgcatctatggagcctgggcgtcgaggagcaattctacatcctctggccgttgctggcctggatagcatggagggtccgtatcggtttcctctggcctgtcgtgctgttggccggagcttccttcggactatgcgtctatcggctggacggcgatccggtcgcgcgttctattctccgttga

SEQ ID NO: 340226 - DNA, 1614 bp, Pseudomonas aeruginosa
atgcgtagaaacgccgtcatccgctccgcgatcattccctcgctgctcggcgcagcgctggtcgccgccgttccccaggccttcgccagcaacctgatcttctgctcggaaggcagcccggccggcttcgatcccgcccagtacaccaccggtaccgatttcgacgccgcggcggaaaccgtcttcaaccgcctgacccagttcgagcgcggcggcaccaaggtccttcccggcctcgcggaaagctgggacgtcagcgacgacggcaagacctataccttccacctgcgcaagggcgtgaagttccacagtaccgactacttcaagccgacccgcgaattcaatgccgacgacgtgctgttcaccttcgaacgcatgctcgacaaggatcatccgttccgcaaggcctaccccaccgagtttccctacttcaccgacatgggcctggacaagaacatcgccagggtcgagaagctcgacgagcatacggtgaagttcaccctcaacgaggtcgacgcggccttcatccagaacctggcgatgcccttcccatcgatccagtccgccgaatacgccgcgcaactgctcaagcagggcaaggccagcgacatcaaccagaagccgatcggcaccggcccgttcgtgttcagccgctaccagaaggatgcgcagatccgcttcaagggcaacaaggactactggaagccggacgaggtgaaggtcgacaacctgatcttcgccatcaacaccgacgcctcggtgcgcgcgcagaagctcaaggccggcgagtgccagatcaccctcaacccgcgccccgccgacctcgacgcgctgaagaaggacccgaacctgaacctgccgtcgcaggccggcttcaacctcggctacatcgcctacaacgtcacccacaagccgttcgacaagctggaagtacgccaggcgctggacatggcggtgaacaagaaggccatcatcgacgccgtctaccagggcgccggccagttggcgagcaacggcatgccaccgacccagtggtcctacgacgagaccatcaaggacgcgccctacgatccggccaaggccagggagctgctgaagaaggccggcgtcgccgaaggcaccgagatcaccctgtgggccatgccggtacaacgcccctacaaccccaacgccaagctgatggcggaaatgctgcagaacgattgggcgaagatcggtatcaaggcgaagatcgtcacctacgaatggggcgaatacatcaagcgcgccaagagcggcgagcatgacgccatgctgatcggctggagcggcgacaacggcgacccggacaactggctcggcaccctctacggctgcgacgcggtggacggcaacaacttctccaaatggtgcgacgccggctacgacaagctggtcaaggatgccaagcgcaccaccgaccagggcaagcgcaccgagctgtacaagcaggcccagcacatcctcaaggaacaggtgccgatcaccccgatcgcccactccaccgtgtaccagccgatgcgcaagacggtacacgacttcaggatcagtcccttcggcctgaactcgttctacgaggtcagcgtcggcaagtag

SEQ ID NO: 340227 - DNA, 606 bp, Pseudomonas aeruginosa
atgagataccaacgagtgaccggcgcgacgctgggactggccttgatggcatcggccgcgccaggctgggcggcggacgagcaggcaaccccgccgaccccggacaatcccagctacgccgcccaggtgcagagcatccccagcgtggagaaaccgatcaagggccaggccggcgccagcgggctgttcgaggggcagagcctgaccctgaccacccgcaacttctactcgcgggaaaacatgaaggacagcttcaccttccgcattcccaaggccggcggcggctcccagcgcatccaccagcgcaacgcctgggtccagggcacggtgctcaagtacagctcgggctacacggcttcgacgtcgcagccttcaacgagatcgccctggagcgcggcaagggccgcatcggcggcggcggcaaccggaccctggcgaacagcgatggcgaggcgatcggcgagtggtccaagctgggcgtcgccaacatccgcctgcgcgcctcgaataccgaattcaaggccggtcgcttcctggtcaacactccagtgttcagctatatcgacaaccgtgccctgccctccagcttcaccggcttcgccgtga

SEQ ID NO: 340228 - DNA, 498 bp, Pseudomonas aeruginosa; identical to SEQ ID NO: 319036

SEQ ID NO: 340229 - DNA, 723 bp, Pseudomonas aeruginosa; identical to SEQ ID NO: 319037

SEQ ID NO: 340230 - DNA, 1332 bp, Pseudomonas aeruginosa
gtgatcatctcgaagggaaacctgatcaagttcgtcgccgcccccctcggcgtgctcgccctcggcttcggcctgttcaacggcgtgttcttctataacgaagccggcttcatgacccacgtaaggaccatcttcggcgacgagaagatcgtcgatgacgtcggctacgcgaccaagtggttcggtcgcgccaccacctggaagaaggccatcagcgtgcagtccgtgctggtcatggacgataacgacaccaatccggacaacgacggcctcggcgccaccatcgaggctttcccgatcgtgttcctcggcaacgtcgacgccaaggtcgaatcttccgcgcgctttcgcctgcccggcggcgagccgttcctgaagatggcccaggaataccgcaacccggacaatttcatccgcaccgcactggtgccggcgatcaaggaaaccctccaggccaccgcttcgctgatgagcgccgacgactactacgccggagcccgcagcgaattcgccgccgagttcgagaaccagctcaacgacggcctgtacctgatcaagcgcaaggaagtccgcgggccgcgcggcgccattccgcaccagaccgcgatcctccaggccggcaccgagcagggagcgttcggcgacaacaacgccagccagttcgtcaccgagaaggtcaccgatgccaagggcatcccggtacgcaagcaacagcagttccgcaagttcggcgtcgaggtggtggaagcgcggatcaccaacgtcgatcccaacccgcagtacaagcagcgcatggtcaaggtccagcaggcgctcgccgagctggcggtggcgcggcagaaccgcctgaaggaagaagaggaaaagctgctggtcaccgcccgcggcgagaaggaagtcgaggccaagcgccaggaaaccctgcgcgaccagatcgaacgcaccacccaggcggaaaccgacaagcaattggcggtgatcaacgccgagcgcgagaagcagcgcgccgagatcgagaagcagaccgccgaactgctgcgcgacaaggccacggtgaccgcccaggccaccaagatcaccgccgacgccgaggcttacgcccgcgaagcggtgatcaaggcggacggcgcgttgcagccgaagctcgacgcgctgatcgcgatcaacaaggtctgggccgaagccgccgcccaggcccccgtccccagcgtaatgatgggtgccggcgccaacggcgcggcgagccgccaggacgagatcggccagctgatgggcgttctggcgaccaaggccgcccgcgacctggccctcgacctcaaggtcaaggactga

SEQ ID NO: 340231 - DNA, 852 bp, Pseudomonas aeruginosa; identical to SEQ ID NO: 132315

SEQ ID NO: 340232 - DNA, 942 bp, Pseudomonas aeruginosa; identical to SEQ ID NO: 132316

SEQ ID NO: 340233 - DNA, 1371 bp, Pseudomonas aeruginosa; identical to SEQ ID NO: 132317

SEQ ID NO: 340234 - DNA, 600 bp, Pseudomonas aeruginosa; identical to SEQ ID NO: 132318

SEQ ID NO: 340235 - DNA, 450 bp, Pseudomonas aeruginosa; identical to SEQ ID NO: 132319

SEQ ID NO: 340236 - DNA, 828 bp, Pseudomonas aeruginosa; identical to SEQ ID NO: 329116

SEQ ID NO: 340237 - DNA, 195 bp, Pseudomonas aeruginosa
gtgaggatggcctcaacctcaccacccaaccgccctaccctcatcaccgaaatcctcaaaaccagccccggcgaatcgatactaccgtcgctgcacgacgtacagattcacggcatggcaaccaacgtactagtcatcaccggcatcaagtacatcgacggcgtggcctatcgcagtcctagcattgccgagtga

SEQ ID NO: 340238 - DNA, 699 bp, Pseudomonas aeruginosa
atgaaagcagactgggaagacgccccgcagcacctcaagcgcaatcgccaaagcgctggaaagtgggtagttgccattaccatcggagctaccttcaccgctctggccgtctacatggccgactacaagctctcgtttccacccgagccaccaatcactcaagcgcaccccgctgaaagctactcaccgaaatacgagtccaacaagcctaccggccagcccgccacgacgccggagcaactgttctgggacaacgtaaacgagcgtaaccgtcagcaagtccaaccaaagcaaaccgtttacaacaacaccaattacgttcccaaaggcgcaacaaatgttgtcaacatgaaagccgtgcgccaatcagaggcgtaccggaatcccactgtcgcatcgagcaaattgtcccgcaacagcatcgagcaatcaggtgcatgggtcgataaatggagcggcggcgctcattactacgcaggttggacaatactcaacaactacattgaccacacttcggtatgtgccaaccacaaacgtggatcaattgactaccgtgagtgtagaaaaggggcgaagcagtttttcaaaaaagaatgtagatattgggaaggcaaatggaagagtaaccgagaacccaaaagcgatcaaatgaaacaacgatattgctctgctgcaagtagcttcagccctatgggttag

SEQ ID NO: 340239 - DNA, 1056 bp, Pseudomonas aeruginosa
atgcccagcatatttcaagaccttaattttaagagaataatcctccataacgttcataaaccaaatgaaaaaggcgctgtaaatcccacaattagcacagcattaacaaccctggcaccagctggccgtgaaaaactggagcagagaattagctcagttctaggtagtggttccagctctctagaaatggatatcgctgatacttcgagcggctcatgctacgaaatcgccagacagttaatcggagctacggaatcacagtttattaacgactcggcggaggttgcaaaactacatacaaaaatccacacaagtagacagtggccggatggaactcttgtaattatatctggaacaatcgacacagacaaaaaacgatgcataataataattaaagcagaacagcaattcggattcactgaaactctaaaaaaaggaaagatagttcttgattacctagaaaacctaatccttacaccacaagcaaaactatataaaattggcgtattctacgaatccgcgcctcagaagaggggagttcccgcaaaacttcttgcacatgttttcgatagcaacatcaaggcaaacgatgatcgccaagctgctcgctacttctatgctaattttttgggattaaaaatacccagcaatgccgtacagagaactagagacttctatgaccttaccacttactttatttccacactgaaagtggacgatgagaaaaaactagatctacaacaggctctttatacatacttgaaagttgacaaccgacaaacaatagaagtcagcgaatttgcaacggattacctagacaaggatatacgcgatgactatgcttattacatgaagaggaaatcattccctgacagcgcggtagcaaaagatactaaactaatcaatcgaaagctttcaagaaggaagctaacttttagtggagacgtaaagctaactgcaccttcagccaagttctcagagcttgtcgaaataactgaaaccactgacacccatacaatccttaaaatagtaggaaagttgataggccaagaatag

SEQ ID NO: 340240 - DNA, 1005 bp, Pseudomonas aeruginosa
gtggacgagaaagagtatctattaaaatatagatcggaaatcccctttcttaaagcatggggaaattatctcgtcaaaaatataaacaatcttatccagaacaagtacggcaaggaggcttattcaaactggataaaaattcctccttccgtacgtataaaggaagaagactcactcatactaaaagctttccttcgcaacaaaggatggttccaaaatatctacgacgacattaccgacaaaattggaattcggtatgttgttgggctcaccgatcaggtcgagataatatccagtttaatctgtaactctgaattatggatctgcactcaaagcagagagttcaacgactgggtaacttccgacccaagaatatttgattaccagtccgttcatttaatattaaccagccataaggaaatatgctttgacggaacaaaaatcccttctggcacgaactgcgaactccagatcaggacgttgctgcaacacgcatatgcggagctaagtcatgacactctatataagacaagcataacgaatcagccggaggtgcaccgactattcgctaaaagcatggcattgatggaaacgacagatgacatgctgctaagagcaaaaaccaagtcagaagaagttgcagcaacattacttaaatggaagcaaagagtatacagcctaaacaaaacacatcttcccagcttggacttcaatgcgacagaaagagaagatgactatctactagataaaatccgagaaattctttctgaggacctcgctaaagatttttcaaaattcatagcaaataaccgagatcttttgagccgaaaaataaaggctagacaagagtcaaatggcgcatttcgactaaactctatctcccttatatattttctatccgatagaaaacgcgtactacttcccgactacttccctcatgatatatctattctcgaaaaaacatatagcgaccttggaatatctccaccttggacttcaaagtag

SEQ ID NO: 340241 - DNA, 1677 bp, Pseudomonas aeruginosa
atggcttccattcaagccattacaaagcagcagggtattgaattgccgcccgagaatatctactcggatacaggcatatctgcacacgatggaagcaacaaacgaaaaggaaaactaaaagaactcattgatatgattagcgatatgcatatcaaagaaggtgactacatattcgttgaaagtatcgaccggttaagtcgccaaagacttctccaagcaaaagaattagtcaatggcatacttgaaaaaggggttattttaataaccaccattgatggtcaacgatatgaaaaaccaaacgaaacaaaccgaattgatgacttacaacaagacattcttttaagtgtcatcgcaaagcgagcatacgaagaaagtaagacaaaatcagttcgtagaaaatctgcatggaatagagccaagaagttagccgaagaagaaaaggtcatttttaatgcccataatccaccctatggtattcgatataatacagagcttaactgctttgaaatcgaggaagaagaagctcaggaaataagagatttctttgagagcttgaaatatgttggcgtatcattgtcaattaaaaagctcaacgcttattcaaaacgaaaatggtcaagtagaaatataaagcatctaatagacacgaaatatgttctcggtgcctacatggctcaacgaagagacgaaaacaaaaagaaagtatttgagcgatacattgaaaactattacccccaaattgtttcatatgaactatttaatgaagcaatagcggcaatgaaaaatagagcacagaggaaaaactacggcaaccaaagtgttgggagcttgaacattttccgccacagcatcaaatgtgaatattgccaagcgtccatgctttttgaaaaacaaacaaaccccaaaggcatcgtctacccatatttccaatgctacacacgcaaagagctaaaaaatggatgtgaccagccacgctttcgttttgacttggctttcgggttatttcttgaactcatatatcaatccacaacaggtgaagacttcgacgttcatccatggcaaaacgaaatcgaaaatactgaaattcaatatgagtggataactcgcgaaagcggcatgaggtatcgccttccaacacaagaagatattgatgaggaagaacgagtagagaactttaaagagttactaatcaagctactttcaaacagagagaaccaaaccaaggacaataagaaaattgttgagctaaacaaccttttgctcgaacaaaaaagttacagagaaaacctaatgaaatcttttgctggcttcaccagcggagttatcccaaaagaattcttagaggtagttagcaaaacagaagcaagcatcaacgatattgaacaaaaccttgcagaactacaaacacaaataaacatcaagaaaaccactataaatatttactcggaaaacgacataattgatttatataaaacagaagatggccgcttaaaaataaatcaattctttgttgctaatgacatcactttcaaattcaacttcgacaaaaccacaagaactttgtttgctaagattttccagaatggttttgaaattgaccgcattgcgaaacagttcagcctacataatccactcaaagagtttggcatcaacaatctcaaccaatactttaattga

SEQ ID NO: 340242 - DNA, 1986 bp, Pseudomonas aeruginosa
atgataaggaaaaagctcagcacacagaaaagtaaaggagaaacacaaaacacactcgggtatggtttaaaaaaatctcttctaatagatagcaacagacttcaaaccggcacaacgcaagaattcattgagttcttagcgaagaaaatagataaatcttgtaaaggaaaacagaaaaataccagctttcacgaaatggtatcttttgacccatccgacaaaatcacacccgaacaagcccttgccatagcaaaagaactttattcagatactcacgggttaaaccgtgagcacgcttttgctgttcatacagacactaaacaaattcacgttcactttatttgggcacccagagacttcaacaataaaatatataatcaggttgatgattatctcgccatagagcagaagctaaccgaactcgaaaagaaacacggactatttcaagtcactaacagaaaatctttaaaccctgacttagaaacaaagccaccagagagcagcaacgaaaaagctcttgaagtcagaggtataaaatcccacaagaaagcattcaaagaagaaattgaaattgcttttaaagatacactcacaactactgctttccttgctaaccttcacaagcaaggctttgatattatcccgaatggacagaacgcctattcattagaaaaagaaggccaagtatttaaggccagtgagttaggtattcaacactcgaagctaaaaaacaagcttcaagaacagcatcaatttagtgaactgatggagcactattcaaagaaagctcgtagatacaatgtggaattaaacctttctacaaatgaagatgttgagtttcttaaaaagaataaatacaaaaccgtccttgaaaagaaatttacacatcaagaatccggcagcaatgtggagcacttctttaaaaactctaccagccagaaggcttttgaataccataaagacccttcaaaagttacatttcaagacttatcaagggacagtataaaagctggacttcaacggctaacaactgacatgaaaaagccggggccgttatatgttcatggcccagactacgcaaaaaagaaaatgtggatggagttcaagatgatgaaccttgaagataagggtttcacattgtcaggatataaacctactcaacaagacttgaaagagcttgaacaaagaaaagctgactatgaattacaagctcaaaaatggaaggccaagaaagtcgtagaagagcctaaatcagttgagcctgtcattgctccacctgtcatgcctacgcctgctcaaaccgcaccagagacactagaagagcccatcaagcaggttgaacaggaaagaaatttcgatagcttatttgatgagttggaacatgagttcagtgacaaaacatcaccagtggatagctttaaagacattttgtcaaatgtcacaaccgatatgctttgcgtcacccacggcagtatcacttgccgcacctgctttggttcaaacatggaaaatgcacctgcatttaaacaacatgagttcattaatatcaatgtcgaaatagcagccgcatatgctgacgctggtcgagtgttgaaagaagaatttaatcagctattaagtgacagggttgatgaattgcaatcaacaccagagcatcaagaacaagttgaagctgcatacattgcaaatattgaaactgatttccatgagtttattggaagccttattgataaacataccagctacgacaagattgaaatattaaagcatgttcacaacgttttagaagataatgatgagattgttgccgacgcaaccctatactatgacattattgaaaaggttgaccagttggacaagcgtgagcgtgaaatatgttcggcttatgttcaaaagctaattgatgatgattcaggtgctccaattgatggagaattaaagaacacagatgtgaaaagtaaaagaagaacgaaatacaagtattaa

SEQ ID NO: 340243 - DNA, 876 bp, Pseudomonas aeruginosa
atggacctaatattcaaccagcatgaaaccaacaaaaagatttacgcacaagatacatatatgacattcgccaagtcaattcttcacttgcctatatttcaatcagtaaagaactcgaagagcccgagagtcatactaaaaattgcaaggctttatgcatttgaagacgttgaaatggacttcgtaccactatccgttgatttcgattttgatgttttctattacatcctgcaaatgaaattaaaatcggacaaactaacatttactataaacatgaagaaattcatgaagttccacaaggttcatcccagcaacaagaaggtttacatagaaaagctaagaaagtccttgaagaacatgatgaagttctatcttgaatttagatatgattcgattacttacaagtgccacttgttgaataatgttgtggaagatgcgaatgataaagagaatactgtaattacgtttaaccgagagtttgaaaacttttacaagcatgacactgacttgatattcaattttaagtttgatgagttcaaagaaataaaaggcgattatgctaaggcactatatatgttctatttaaccaatagatttgatgatgcagttattttcaatactggcgacataataacaagattgcaagcaggaacgtcggtaaaaaatgaagcgttaagaagtataaaaaaagcacacgacgaattaataagtattgattttttgaagcgtgtagaaccgattaaagatggcagggaactggttgcttacaaggtcgaatttaagaaaagaagagagaagccattgcctgagccaaaagaaagagaaataaatatcaataatgacttgtcattatgtgatgaagagcttcctttttaa

SEQ ID NO: 340244 - DNA, 2142 bp, Pseudomonas aeruginosa
gtgacgagcatgattagccacttgattgtggtgccgagtgacacccagacgcgacggacgacgttctttcaagggttctcagatttctggcatccggattacctaaacatcctgaaatgcataactcattttccacacgacattggtgacgcctatttattcggggatgcctatatcttatcgaaaaacataggaagtagcttgcaagtcaaattattaagagcagacctttgtggtttttatctgtcggccacgaaagataaaaatcttgtagtttggagtaccgacctaacggtagatgctgtgctggcagctatatcagctcttgagattaagccgcttcatatatcaacttcatataaagatggagctgtgcatatcggtgatctcaacaaaaagaaagttcgagaaatgatctcggagttactgtcacgccatgctcaaagcgatccggaaatggctgagtttagggcgtttctagaaatcgctgaacagagacacgatgatgagaaactctgtatcgaggcgaaatatcataactgtaccgaacctctgctggacgtcgttgcgagctatggcgcagagctacgggtaacgcccattgccccgtctggcgaaaacgatgaacatgtcttaggaatgttacaacttgcagggataatcgacagactgcgccccgatgaattgagtgagttcccgcttagaaaaaatgacgccattatctattgcccttctgtgtatacctacctctaccgagctgacagtgttcactggcgagagttgaatagacgtttaaacaacccaaagcgaaacttccttagagcgggtcttattcgtacaaaaggttacggtaattcgtccatgataacgtctcaggaggatctctttaatccgtatgaagacgaagttctaggtcctctacttagggatcggcaggtcgaattaaaagtattcaccgctgcagtggcgcttgtggcaaccaaccagtttgtcccagccttcaggcttcctaattctgtaatgctgcaccatgacaagctacgagaaataggaaaaattctctcgtcaaatgataggcaatggcgggagaaactgaataggaacatttcagcatatgggcgtgctatcagagagaacgtcggcgctggtctgctggctgcatcctttgaaggtcgagagaaaattttagctgtatgtgacttcccaattgagtgggtagcagtcgaccacttgccagcgatgttcagattcgaattgtcacgcgttccatcaacgccgggcaatgtcgttatcgatgcactggtgtctcacgcgaaagcggcatatagctaccaaaatctctgcaacgtattggttattcgctcatttgacgaaaacgacgccatcaaggatcacctaattagtgggatacgcggtcgtgtggagtctggccgatttgccaggatgagcgttacaattgtcgatatttcaaccaagcaagagctggtggatgccttgaactccttctacggcctaatggtgatatttgattgccatggcagccatggtggagaagaaggttttgcgtggctaaacatcggtggagagaaattagatgtttggcatttgtatcagcaagcaagaatcccgcccattgtcatattggcggcgtgtagcacccatcccatagaaggctctcatgcgtctgtggccaatgggttcatagagtcgggggtatgcagtgtaatagggacatttgcccccgttgattcttctcacgcagctgtctttgtaacccgcctcctagagcgcatcgctgtgtacttgccgatcgtactaaagcgacgggaatacacgtggagagagatcataaccggtcttctgcggatgtcctatgttcgagatgtaatggaagggctgcgtgatcggttgggtttagttactcaagagcaatatgagtcgatccacattcaagccaatatgctgattaatacccacgaagacaaactctggttcgaaaaattcagggcattgattgccgaggctgcgaggctggaccaagacgaaatcgataaactgtgggaagaacacttccagtttgtcgaaagtatgctttatgtccaactgggaagaccggaaaacattgttataacggctgaataa

SEQ ID NO: 340245 - DNA, 2148 bp, Pseudomonas aeruginosa
atgacgctggacatccggggaagcctaaagaacaccaagctcagtaccaattcgtatgtcgtatttgaagagcttatttctaacgcaatagactcatatttaatacgaagggctcttgatccgcacacccccgacatgaaggtaaatgttgatgtgacattcgttcccgccgggctcgatgagaaccaggaggacatgatcgtctcctgccatgataatggttgcggcctgggcgacgagcaacttaaggcctttctaactaaagatacatcttacaaagatgatctatcaatctcggggattggccaatgtaaaggcgctggtaggattcagtttttccatcacttctctgaattattacttgaaagcacctacccggacgggggtgggttcactgagagaaagcttcactacttggagcctcagaaacagattgaagctgaaaatttcagctccaattccggcagtagagctaacgtcgggacgcgcattacattaaaacaactcaagcctcatgtgcacgccaaagtaatgcgaggagatgagttaagctctcttttttcagcttcttccttgaagaaaaatgctctcctaacatttcttcagcggttgatcgggcttgataatagcctgggtgattttgaaataaaatttaatagccagcactggaaaaaagactctcaaatctccactctaaagcgcgccgacctacctagcgtcacgactgtagagacagtgacagccgaagagtacaacccagtaaccggcgagaaagtggctgagtcccaaaatttgaagatatctcactataagctcgacgctaagcagtacgaccttcccaagaattccattgcactgtgcgccaagtcatcccccgtcaaggatattacatcgagatacttgcgaaccaagaccgagcaaaataatccagtaggcgactatcaccacatcatcttgatagaaagcgattatcttgatctgcgagtcaatgagcagcgggatgactttgagtgcatttcttcggagtacgtacctgacgacatgttcttaccagatggtatttcatacgccgctatctacgacgcaattgatcctgtgattcaagggatggtcactccagcagattggaaaaaagagactgtcatcaaagtagtttccaatcagtttggaattagtgaggatatgcttagagatacgtcaacacgcatcgtttatggcgatacccctctggcagttgcggagcgtgttctaaagaaatatcaagagcgagttattgatgaaaccgcggagatcatgaatctcaaagaggaaattactagatccgagcctgactccgaagatttcagagaaaagataaacgagttgtcgtggaaatacaccgcgtcactcaaaaatatcgatatggcgaatttatctcaactcatcgttcgccgcgcggccatcgtccaaatactagacctggcgtgcggaaagaacctagcaatgcagaagattgatagtgatgcacgccgcaaggatgagagagtaattcacagcatatttttcccaatgcgaagagacagttcagaggttgctgaccacgatatctggcttctgagcgaggagtatcattactacgactatatttcttcagatcttccgctctcgaagcttacttgggatgatggcagcaaaatattttcagaggacattgatcagggtattcagaaaatacttgagaaacgtgccgatgaaaatggtggcaagcgtcctgatattgccatttttagcaaggaagggtcagctattattgtggagttcaaagctcctggcgtacagatggacgaacatataggtgaccttcaagagtatgcctaccttctgaatgcaatgtcaggtggcaagctaaagaaattttatgggtatttgataggcgacactgtcaatccacttcgagtgggtggtagttggacaaagtttccgatgggcaacggatggttccaatcgagtccactgagcgaccctgaaagcggggtcaagcttggcgaaacctatttcgaaatcctgcactttaaggatgttattgaacgggccaagaaaagaattagcgtatatcaaggcaagctaaacctgaagttagactttcaagaggaaacacctcgaaactag

SEQ ID NO: 340246 - DNA, 513 bp, Pseudomonas aeruginosa
atgaagcagctctggcagcaactggaaaaccacctaagcgctcacaaccccgagctgcttgccgacctaaaccccccggctaccgatgcccagattcgcgagctcgaaaagaccctctgtgtgcaattgccagccgactttgtcgactgcctgaagattcacaatgggcagaagggcaaagcagactggttgttcgaggggcacgagtttctctcaatagagaaaattctgatggactgggtggcattgaatcggctgcttaaaggtggtgatttcgacggggaagccgcaaaaccagatcctgaagtaatcgctgagtggtggagcccaagctgggtgccatttacttccaatggtggtggcgaccatttctgcctggatcttgcgccttcttcaaagggcacgcctggccaagtcatcaagtattcaggtgagttgccctctaggcgtttgaaggcatcgagtttctccaagtggtttgagttgtttgtgaaagccaaagtcggctgctga

SEQ ID NO: 340247 - DNA, 873 bp, Pseudomonas aeruginosa
atggggctccggcagtcgttgggtttactgctgaccgagctagtgaatggtctttttaacgagttcaaagtactgatcaaggctggcgttgaagcaggcaagacgctcttcgaggagatcaaagagcgtcttcagcgcgtgatagcctctgtggtcaagaaaatccccgcagctgcttcccaagcctttcagggcggggtcagtggctttatgagcaacctgatcaccttcttgatcaacaacttcctttcgacggccaagcgcttcgtgaccatcatccgcgaggggctgctggggctggtcaaagctttcaagatgatcatgttcccacctaaaggcatgacatcaagtgaagcactgcaagaaggattgaaggtcctgaccgccgtagtggtgaccagtgttggctttttgctgcaggagagtgtggcgacctttctaaagacgctaccttttctgattcctgtcgcggatgcggtctctggggtattgattggcatcatgacggggctgctgtccgcgttcctggcttaccagctggataatctcttcgagcgttatcgttacgcgtatgacgagaaactcttggatgctattgcaaccgacgcaaagctctccgatagatttgccagcgatatggtcagccatgccgaggcttcgcttgcagcaatcgccatgtatgccgagtcgatcaagagctaccagcggacaggtgagacgtttgctgctgctggtatggcctcacaggcaacagtttttagcctgtaccatgttgtgtcgagcgcggaggctcaggttgaagaaacgaaagaaatgatttcgtatcttgatgaaactgaggccatgctggacgatttttttaataaaaggtag

SEQ ID NO: 340248 - DNA, 870 bp, Pseudomonas aeruginosa
atgagcagtttgacaggtaaggaagttcagattgttaatgccctatcctccgcagatttgccagagagtttgatcggggaaagttgtgttaaagaattgatttcggcagtcatcggcgctcaacaagaagctagtagcgccgccgatcgtttgcattgggcaagaatggccaaagccaacagtaatgctattagtaattggtggaataacagtgaggatgctgtcaaggatgctcagttaaggctaaccaccacagtggcgaatctgaatcgccattcttcacagctcttgatatttaacactgctatttccaaggtgttgtgtgatcagcaaaaggtcttgttgcgtcagcaggaaatgctagaggaacaggcggagcaacttaagctgcagaaccaggaaattcttgagcatcagaagaaattacaaattcagcaagaagcaatacgtgaagccaaccaagggcttatggaagccaagggcgttacggccgatcaagcccgtaagttagttggatgcgtccagcgtgttgaagccactgaagagcgagttgcagaagtcaatcgacagctcctgcgggaaattgaacagcagctccaacaagttcgtgatgagtccgacgcatcccaagccaagcttctgcagaggcttgaggaacgcttgcggcagtttgaaacaactcttccgcaactagttgaggtggctgtaaacaagcagatggttgcagtatcgcagcgtgctgaagctctggagctgcgtttgaacgagctgggcttgcagcattcggttctgagcaaacgcatggtcattggtatgagcctgcttaccattgcgttggtgggcgtaggggttgcaggttttttactgtga

SEQ ID NO: 340249 - DNA, 1638 bp, Pseudomonas aeruginosa
atggtgcgtatctctagtccatccaacaagggtgggcctggggcaaggcaaggcttcaagtatcaagatcacgttgcagtcagctttattttcaagatgcttcgcgacaacacctatgtgcaggtcgagtgcgagacagccgacgatatcgttgctgtttcccagcgttcggggcagaccgtctacgagtacatccaggtcaagaccactgaaggtaaccaaaagtggaactggaaagaggtgaccgatcttgagaataagaaggcggagtcctccctgttgcagaaatcgcttaagtgtgacgtccgaaccggcattgcacgcttccggatagtgactaaacgagatgtagccaccatattggaaggcttcaaaacagagctggataagcgagttttgcctgataccaccacggagcgtggcacagcactactcaagaaattcaggaattcccgctcccctcagaaccgagacttctcttactgggcagaaaatttcgtgtggcaggtctacggcgaagtggatgccctggcagcgatcaacgtcaacaagctcgcgaagctggccgagcagtatggcaatcgacccaactacaaccaactcaaagacatctacgaagaattcttggagctggccgacaaggccgcgaccgccgatgtaaagaccgatgccgcgaccaaaatcattcaccgcgaaaccaccttagctctcctcaggcagcgattggacgaagccgatgcggttgcaacgtctacctccaaaccctacaagattcgacctgagccgtttctggtggagtttcacgccagtgccgaggaggggttactccgttcggttaccgctttcgacgtgcgctattcgttgaagaaatggcgatgtgatggcctggcaaagcacctcatcgaatggttgccagagttctcgctcaaggccagcgagattgtgaacattcaggcccacaatgctgaggccatcatcgcgcggtcgatctgcacctttaacaataatgacctgccgcgagacagactcgttgccgaactcattctccatgccattctgcgaagccggacaaatagcgagcctattggctgcaaggtcttctacacagccgcaggcaagctttctgaattcggtaatgcccacatcgtccaggtacctggccaagacgaccaactgtggcttgggcttgcgcggctgatcgaggcaggcaacatggacgttactgtggagcagatctgcaaagtcctagatgccaccatctccgaagccgttttgtccgcagagcgcgagatcatcattgcgctacgcgaaccccatcaccacctgcccaaaactgaaaaattcaatcaggcattgcatcgaaattcgcctgtggacgatatgctcagcgtcctctgctttcccatccttttgacttacgacagcgcagcgctcgcctccggctggctggccgactacgtcaacaacctcaagagagagatcgttgaccactacagcgccctgaaggcgcaactccccgaaaacatcgagcaggtgagggtcgccgtcttcctggtacctatggagagtgtcacgaagctaattaaagcgttcaacgaccgctgcaagacccttgaagatttacagatattgagctga

SEQ ID NO: 340250 - DNA, 546 bp, Pseudomonas aeruginosa
atgccaaaggaacaggcgctgttggacctctgcctcgaggagaaagcgaagggccgcaaggtcctggcctacacggtctacagcggaacgcgcgacaccacgtccaggctgaagaaagtgctcgagcaggctgggctgaaggtggcagtgctacgtgcttcggtcgttacctctcggcgcgaggactggatcctcgaccaggttgaacgcggcatcgatgtgctgatcaccaacccggaactggtgaagaccggcctggacttgctcgacttcccgaccatcgcgttcctgcagacgggatacaacgtgtacaccctgcagcaggccgcgcggcggtcgtggcggatcgggcagaggcacccggtgcgggtggtgttcttcggctacgccggcagctcgcagatcacctgcttgcaactgatggccaagaagatcgctgtggctcagagcacgtcgggagacgttcccgagtcaggtctcgactcattgaaccaagacggagattcggtggagatggcgttggcacgacaactcattgcagcatga

SEQ ID NO: 340251 - DNA, 1191 bp, Pseudomonas aeruginosa
atgcttgacgatctccggtcggaaacagcagtccggccaagccagcagcacgttgaggaccacgcccaggagcgtggtatctcgtcgcgccagagcctggcggagctccgctgtcagcgtggccgccaggcgctgataggccgaagcctgatccggcgccatgggcacgtcgacgagctcttcctggtagtcgggcagtacgttgccaccgatatccttgagcttcaggaacacggtgaacggcaatacgaagcggtggatgcccttcgggccgaagccgggagccttcaccgtgcgtaccgagagcttcttgccccgggctgtcttgtgcgagtcaccatcgcgttcggtgtagatgtccttgagcacgccgtggtcgcgcatgaacgacatggctgctggagccatgctgccacgcgcgttgggccggtagccgtcctcgatcatgcgctgggtgaggatgcggaacaggaggtagaacaggtcgtcggcgtagccgcccatgagcgttcctgtcagcagcacggttttccgtgccttggctgcgagaacgcccatggcctggccctgggccgaaccgctgttcttgtactcatgcccctcatccaccaccaacagatcgaagtagccgttgggaagttgtctttttatgaactcggtcggttggtagccgccttcgccgaagccgaactcgatgttcgccatcgatcgctccatgcgtttggcctgccgatcgctgaagacgaagttgcccttggcgtccatcaggttgatgaactccgagacgttgtccaccaacatcgtggccaggaagtcctcgccgaagtcgttcagcaggcgctccgccctgaccgggccgatggttggaatccgacacatcgacttgaggatcgttgcgcgccggttgccgccgtcaggcttgcctggccggatcagcgtccagagcgccccacgacaggaggaacaggtacgtcgacggtcaccacgctcgaactcctcaaccgtgaccaggttgccttccaggtcctcgaggacctggccgcaatccgggcacgcagcgaacagttgaccgccggcggcgcgcttcttccagcaggcgagccgccaatggaaacccatccgcatccgcacgcggccgaggatgaagaactcctggcgtccgtcgtaggcgtcgcccatctgatctcgtag

SEQ ID NO: 340252 - DNA, 1446 bp, Pseudomonas aeruginosa
atggccctcatgttcccgcgcttggcgcgcaacttcgcacgcaacggctacttccctaccgatgaggtcaccctcgaacgcgctctgcaggccctcgctcccgccccgacgggcaggatgaggatctgtgatccctgcgccggtgagggggttgccctggctgaggcagcacacatcctcggccgcgaccaggtccaagccctcgctgtcgagtacgaccgcgagcgcgccgaccatgctcgaggcttgcttgaccgagtgctgcacagtgaccttttcgacaccatgatcagcaggcagtcgttcggactgctctggctcaacccgccttatggcgacctggtggcggaccactccggtgcgtcgcagtaccagggcagcggccgcaggcgtctggagaaagcgttctaccagcgctgcctgccgttgctgcagtacggcggcgtcatggtcctgattgttcctcactacgtcttggacgatgagctgaccggctggttgagcaaccacttcaccggcctgcgcatctacgcagccgcggatcctaccttcaaacaggtggtgatcttcggcatccgggtccgtcgacaggacctggcccgggcggacgccaatcaggtgaggtctcgcctgcaggcgatcggcgcgggccaggaaaaggccgaggaaattccagcggcttggccgtgggaaccctatgtggttctgccggccaccagcgagctggagcacttctatcgagtaaccctggagccggagcagttcgccggcgagatccagcggctgcgaggtctctggcctgacttcaacctgcacttcgcgcaagcggggctgcagccccgcccaccagtccgcgagctgtctcgctggcacctggccctggccttggccgccggcgcgatttccggcgtcgtgcgctcgaagtcgggccggatcctggtcgtgaagggtgacacctacaaggacaaggcccgcaagaccgaattcaccgaagacgaagacggcaacatcaccgaggtgaggatcctcacagaccgtttcatcccgatcatccgggcatgggaaatgacaccctcctcggtcaatcagggccgcgtgctgaccatcagctcgtcggctgcgaccacggaagaggctgaagagccccaacctgagccggcccccgaaccgctgctgttcagccctggccaagtcgtaatgaccgctgccgtgagccacctggtggaaaccggtcaactcaacccagcgcctttgctgaaccgccatctggcgggagattgggggacgctggaccaggaagactggaacaccaaccagagagccctgaagttcggcgataggctgctgtcgtcctacgacatcgacgccggcggcgaatccaggctctggatcatcactgaggccaatcgcagttcgaccaccctgttgctccctagcgactactga

SEQ ID NO: 340253 - DNA, 606 bp, Pseudomonas aeruginosa
atgcccagtcccaccccgctctaccagatcgaagagtgcccagacctgtacgtcgacgcctgcgtgtgcgacgagcagcgcaacctggtctttctttcggcctggggccgcgacaccgtgacacaagagttcctggccaggctgacgctggaccgggaagaaaatggcatcgaccatttccacattatcgtggacggccggcgcttacctgtcttcccaaaccaggatctcctggagaaacgcaccacccgccagttccgcggcacgttgttcggcagcctgctcaacctctggctgttcgatcggcgcgcctcggcgcccgaccgaggcaatcacctcgccttcgcactcctgcagcgcgatgaggatccacaccaaaggctctggccgctagtgatggagacctgtccgctccccctcctacagcactggcgcgagccagtgatggaggtcctcacccagcaccagatgttgaccgccctgccagggacgatcggcaacgtctgcgcctggcgactcgccctgcgggtcgacgtgctcgagcccaccctcggtgagctgatccgcgaaagcattcttaccaccgatgctcaggcacaagcctga

SEQ ID NO: 340254 - DNA, 534 bp, Pseudomonas aeruginosa
atgcgaactgagccgatcggcatggccgtggccgtgctcttcctcctcgcgtccggccaggcctgcgctggcaccgttggcgaactggcggagatccaggcccaggccatcctcaccgaggccaaggtgcgtctggccacggcgcagcggcaattggaaggcaaaggcgaaaccggccaggtcgtcagcgcccaggggcagacgttcgccatgccggtgccggcggcgccgccgacgatcacgcagccggttccgccggtggtgcggaccatctacggcgccggcggcaagatgactgccacattcttgttcccgggcgggtacgaggttgacgccgccagcggcgcggagctgccgggcaactaccgcgtcgagtcaatctcgctggaccaggtcgtgctcaccgacaaggacggcaaccgcgtgcccgtgggcttctccagcgttgccccctcccaagcctcctctacgacccaaggcgcctcggttccgccggcgctgcccggggctgtaccgcagccgttcattcagtag

SEQ ID NO: 340255 - DNA, 336 bp, Pseudomonas aeruginosa
atgagattcgagcagccctcaccgactatcgactacagaagaaatatggtgctgcaagcattgctgaagatcgaggcgctctacgagctcgcgcatgccgcctctccagagctgctagcgaatattaaggaggcgctggccgacccagatagactttgcgaaatggcgacagcaatcgccttatattaccttcaccgggaacctacagttccagcgctatacgtagaactcgtcgaggatgaagttgcacgctaccccttcacctacgatgagatagagtcagtgatgaactcaaaggttagggaagtcctactccctaggtatgagcattgttga

SEQ ID NO: 340256 - DNA, 291 bp, Pseudomonas aeruginosa
atgaccgagcaaatttatgattatgaccccgcgcaagcgctggacagcccggaggccatggctctgttcatcgcagacgccttggatactggagacaccgcctatatcgctaaggctatgggagtcgtggctcgcgccaaggggatgacggagttggccaaggaaacgggtttggccagggagcagctttacaaatcgtttagtgagcgcgggaacccgacattgaaaaccatgctggcagtaatgcgagctttgggcgttgatctgaccgcccgcccgcatgctcagtga

SEQ ID NO: 340257 - DNA, 957 bp, Pseudomonas aeruginosa
gtgagtgtgaacccgatcgtccaggctcagttcgtcgacctctacctcggtgaaggcttcgccgacgtgaaaggcctggccggctccggcgcgcgccgagtcgaagtgcctcgcgagtgggagtcgcacgcccaggaactgctacagatctgccggcaaacgctggaggagctgcaggatcctgagttcgccatcgtcgtcgacggcgtgctactgcgcgttacccaactggaagatgctttcaacggcgggagtgtcttcgtgctgcgccggtcgacggcccaagtcagaagcttcgaagacatcggctatccgagcgaagtggtctccgccctgatggatccgcagttgcagggcctggtcctgttctgtggcgatatggcgaccggaaaaacctcctctgccgcctctctgatcctcgcccgactgcaaaccctgggcggggtgggcttcaccgtcgaagatccgcaggaaaccaatctcagcggccagcatggactcggccgctgtatccaggtcaggacctcgcgacgctcgggaggctacagcgaagccctgttgcgcacgctgcgtaccggagccgacctggtgctgattggcgaaatccgcgacgaagacaccgcttatcaggcttgcaaagcttcgctgaacggcaacctggtcatctcgaccatccacgcgaaaaactgcccccaagccatcgaacggctgatcaccctggccaaaccgctcgcatccaatgcttacgatgtggtcgccgagggcattcaggcggtgatctgccaggaactggtaagtgatggcgccgctcgacggctgcacgcggaaccgttgctcttcaccagtgtggattccgtcgccatgcgagacaagattcgccggcagcagattcacctgcttgaggacgacgtgaatcgccaggctcgcagaagcctgtgggagccaacctatgaataa

SEQ ID NO: 340258 - DNA, 384 bp, Pseudomonas aeruginosa
atgttcgacaactcgattcccgatgggcaaggcggctacaaggatcgcggcggcttctggtgcagcgtcgaatggtggcatcaggatgcccagcgcttcgccgaactgttcacgaaaggtatgcgcgtcaaggtcgaaggcagggcgatcatggaccgctggccggacaaagagtcaggcgaagaagtccaggcgctgaaggtcgaagcctcgcgcatttccatccttccgcatcgcctggccgaggtcaccctgttgccgtctaccaacggccagtcgacacaacatcagcagtctcggcaggtgccgcagcaacctgctcagcaggatgcgcaatcgcagcaggactacgacagcgccttcgacgacgacatccccatgtag

SEQ ID NO: 340259 - DNA, 753 bp, Pseudomonas aeruginosa
atgaacatgcaaaccagcaccgacaggaacctcaatttcgactttgtgcgcaggcaagtcgagcaaccgcctgcttgggcctctgaggtcctgctgtcatgggaggaagcctacccccaggaaaagcacgccttccttcaaagccactactggaccgagacgggatcgatcaatgtgttccgcgtcgtgggtacggaccactgggattaccaaggaaggtcctggctcgacttcctcactggcggcaagcgaatgcagcgaaacctgcaggccttgctggacaacccgagctactacctgcagccaacggagcgcaggcccgcgatccactacaacacgctcgatggcttgagcttctacgtcggctccgacggcaaccaccgcacctgtattgcccgattcttcttggccgaacagcagaaaagccaacttcacgacgtgacgctcaaccactaccaggtcaacgacagcttctaccgcctgtacgggcaactccggcaacaactcctgctacaagggctacctgtgcaaatccatccggagcgtgtgcagttgggccgggaagatactgctggctggaagatggatacctaccagaccacattgaactggttgaacctcaagacccaggaggaaagatccctgaatgaagcacaggcgagggcgcaactcatcgacctcatgcggggaaaaccatctgaagagcaaccgcgaggctggaaggcaaggctgaaatgtctcatttcaggctga

SEQ ID NO: 340260 - DNA, 1398 bp, Pseudomonas aeruginosa
atggcggtcagtatcacgcccgacgcgctgaacccggccgccttcgccctacaacctcagcagcgcgcgagcaacgccccgccgcccatccaaggcggccaggacatggccaccatgctgtttcctgcctccgtcgccaacggcatgtcgctcggtgccggcggcagcatggggtcgagcttcgggtcctacggcccgcggtctctgtacaacatcaaatggaacggcaaagtcagcgggttcctcgatctcatcgccgcccgcgctggcgtgtcctggcgctacaacccaaccgagaaacgggtcgagttctactacctggacacgcggaccttccgcatctacgcctttgacgacgtcaacacggtggactccaccgtgcgttccggtatgacgacggccgccggcatcagcggggacggctccggatccaccggacagaatggcagctccggcatcagcggcgactcaggcagcaagcagaccaccagctcggagctgaagacatcgatcctcagcgacatcgagaacagcatcaactcgatgctgacgccgagcatgggacgcatgtcgctgtcgcgtgccacgggcaccctgaccgtcaccgaccgtccagaggtcctcaaccgtgtccagcagctggtcaaccgggagaacgagagcatcaccaagcaggtgctgctgaacgtcaacgtgctctcggtcgccctcaccgacaaggatcaactggggatcgactggaacctggtctacaagtcgctcaacaacaagtggggcatcggcctgaagaacaccatgccgggcatcgaccaaagtgcgatctccggctccgtgagcatcctggataccgccaacagcgcctgggcaggatccaaggccatggtccaggcgctggcccagcagggccgcgtttcgaccgtccgctccccgtccgtgaccacgctcaacctccagtcggcgccgatccagatcggccgctacgacagctacctggcctccagccagatctccaacgtcgcccaggtcggcagtaccacctcgctgatcccgggcgccgtgaccagcggctacaacatgagcctgctgccgttcgtgatggaaagcggcgagatgctgctgaagatcaacatcaacatgacctcccggccgacgttcgaaatgcagaccagcggggactccaaagcccagttcccgagctacgacatacaactgttcgaccagaaggtacgcctgcgcagcggcgagaccttggtactctccggcttcgaccagaccaccgaggacaccaacaaggtcggcaccggcgacgctgggttcttcgggcttggcggcgggctgacccgcaataccaaacgcgaggtcatcgtggtgctgatcacccccgtcgtgctgggctga

SEQ ID NO: 340261 - DNA, 582 bp, Pseudomonas aeruginosa; identical to SEQ ID NO: 329850

SEQ ID NO: 340262 - DNA, 351 bp, Pseudomonas aeruginosa
atgatctctctcaacaaccactccagcgcaggtcacactgctgcgtacctcaaactcccgatcgtcctcaccaacgcggcctggctgcgcctggtctatctcgccaaccctgccagggtcgacgagatgggcacccggctggccagtgtcgttcaaaccgcctggcaggagctttcgctcgagccgaccgcgaagcacatccaattccacctgtaccacaaggaggaagaggggcaggaccgcgcgctcgcgctgctggtcctctcgatagtcgagccgtccgatgagccttcctacctgcgcatcgagctgcaggaagaaagcctccagggcaacccggataccgagtag

SEQ ID NO: 340263 - DNA, 693 bp, Pseudomonas aeruginosa
atgaaacgcccatcccctgcatcaatgattcttggcctctgcttgacagcaatggccggcctgctgggctaccagcagtaccaactcattcagctccgatcaggcgtggacagtgccgcggaaaagacctcgctagaggcgatcctggcgcgcttgaatcgagtcgacgagcgcctcgacgccgtggatggacagcacctggtcagcaacgaggacttccgctcaggccagcaggcgctgtccaaccgcattgacgccgcgcaggccttcgccaagcaggcctccgacgccgtcgagaacctggctcaaaccaccgcctcggccggcgatctcctggtgctcaaggcaacagtggagacgctggacggttctgtccgcacgctgcaagagaagcaagccaaggctccgccgctgatcgtgcctccaccgaagcgcggtgccttccctgtcaagcccaagccgaaacccaagccgatcgagcctccgcccttctcaatcctcggcgtggagtatcgcgggggcgaacggtttctgtcggttgcacctccgggatccacccagctcagccagatctacctcattcgccagggcgatgccgtcgccggcacgacctggcgcctgaccgaccttgacgatcgtaccgcgcacttcgacgtcgccggcgcctcgcgcagcgtccgcatccaaccatag

SEQ ID NO: 340264 - DNA, 234 bp, Pseudomonas aeruginosa
atgggcgtcggggtgtgggcggaaatgctgcgccaggacaagaccccggaatacctgctgcaagacctctacgagatggagctgcagcgcatcaccctcaacatgcagatcagcctgatccactccatcggcaagcaggccgcagagtgcgcggaaaagatgggccaggccgaggccgagttcatgggccgactgcagcagagtcagacccgccctggttccgtgggcatgtag

SEQ ID NO: 340265 - DNA, 276 bp, Pseudomonas aeruginosa; identical to SEQ ID NO: 324419

SEQ ID NO: 340266 - DNA, 222 bp, Pseudomonas aeruginosa
atgcaaaccatccagaacttcggctatgacggagcgatgttcctcgcggcactcatctgcgtggctgtctttttgggggtcgcttggcatacctacggcacctatcacgccatccatgacgggaagaagaagtggtcggatctcggagcgggcgtggccgtaggtgtaggcctgctgatcttgatcatttatctcgtcaccaaagcctccaccatcatgtaa

SEQ ID NO: 340267 - DNA, 234 bp, Pseudomonas aeruginosa
atgggcgtcggggtgtgggcggaaatgctgcgccaggacaagaccccggaatacctgctgcaagacctctacgagatggagctgcagcgcatcaccctcaacatgcaaatcagcctgatccactccatcggcaagcaggccgccgagtgtgcggaaaagatgggccaggccgaggccgagttcatgggccgactgcagcagagtcagaaccgccctggttccgtgggcatgtag

SEQ ID NO: 340268 - DNA, 159 bp, Pseudomonas aeruginosa; identical to SEQ ID NO: 329011

SEQ ID NO: 340269 - DNA, 447 bp, Pseudomonas aeruginosa
atggccaacctgctcgccgccctggaggtcgcactgggcgacgtaacagccctggctattgtcgaccgggtaagacaggtcgcagaccgaatccaccccacctcgagcctatcccctgttccccaagcatggctcgatgtgcaagcagagcgccggcgccagatcaccgtcgaaggtttcgataccagcaaagacgacgcaagcggtggccagatcgcccaggcggccggctgctacgcgctccatgccggcggcatcggcaccgactggccgggcggcattcggaatggttctgccctgttctggccctggaacgaagagtggtggaagcctaagtcggcgcgcgagaacctggtacgcgccggcgccctagtgctggccgagatcgagcgcctggaccgctccgccaccgagcagggctcaacctgctgcaaggggggcgcgtaa

SEQ ID NO: 340270 - DNA, 225 bp, Pseudomonas aeruginosa
atgaaaaacaagattgaggatctgcgtaatcacctctttgccaccatcgaaggcctgctggacgaagagaagcctctggatatcgaacgcgcgaaagcggtggctcatgtgagttcggtgatcatcgagtccgccaaggtggaggtgaaagcgctggagatcatcggcgccccgggcagcagcggaagcacattcctgcagatcggccaggaggactcgaagtga

SEQ ID NO: 340271 - DNA, 225 bp, Pseudomonas aeruginosa
atgaagaacaagattgaggatctgcggaatcacctctttgccaccatcgaagggttgcttgacgaagacaagcccctggatatcgagcgcgcgaaagcggtggctcatgtgggttcggtgatcatcgagtccgccaaggtggaagtgaaagcgctggagatcatcggctccccggacggcagcggaagcacgtttctgcagatcagccgggaggactcgaagtga

SEQ ID NO: 340272 - DNA, 294 bp, Pseudomonas aeruginosa
gtgttcatctgcaccacggcggccgccgggacgggcaacaacctcactgccgcgaactacgtgttcttcctcggtctgccctggactcccggtcagcaggaacaagccgaggaccgcgcgtaccgcaacggccagctccgcatggtggtggtgaagatcccactggtcgagggcacgatcgacgagcagctgtggcaactgctcaacgcgaaacgccaggtcgcccaggacctcatcgagccagagcaggttgacggaaaccgtgcgcttttagccgcaagcctaactggataa

SEQ ID NO: 340273 - DNA, 222 bp, Pseudomonas aeruginosa
atgcaaaccatccagaacttcggctatgacggagcgatgctcctcgcgctactcatctgcgtggctgtctttctgggagtctcctggcatacctacggcacctatcacgccatccatgatgggaaaaagaagtggtcggatctcggagcgggcgtggccgtaggcatcggcctgctgatcttgatcatttatctcgtcaccaaagccaccaccatcatgtaa

SEQ ID NO: 340274 - DNA, 1488 bp, Pseudomonas aeruginosa
atgaccaaagcaaatgaatgcacctgcccttccggcgacggctccctccgccatccgtgcccggcacacatcggtccattcgacaaactcttcggctccccggtacacaacgaaagcgagccagacttgcctcctctcgacgaacatcttgcacaagttttcgagacaggtatggcgctcagcgaatcggtagagcaggcaggcggggatgaacgtgcagttgatggaaagccccgcgcgacccgatgcccgcattgcggcgaaagcgatctgatgcccggcgacctttgcgcctgcgggtatgaaaccgatccggcagccggttacgcatgttccgaatgtgacggctcaggcgaaggttgtgtcggagaggtctgccgcgaatgcgacggcagtggctggttcgtaaccccggagcaagcccgcgccgccctggcgcaaccctccccgacgctaccgcctttcgcggagaaggtgctggctaagctgcgccgcttctatgactgcgccgaagacttcgaatcgggcggtgttgatatcggccggcactggctagacctgctgactcagctcgggctgctcaatcgcgttcagcgcagcccggcgctctgggagatcagccagcagggagaggatttactcggtacgccgcacccctccccggcgcaggccgagcaggccgaggcggagcggccggaggtggttgacttcaatccgtaccgctaccacgccgagaagattcggcagcgagcagatggggcggccagcgcgtacgaagccggtcgcagcgcactcggctacatggaggacattgccgaatccgcgctcatagtccgcaatggcctggatgaactgagcgcccagcatgagcgcatcgtcgaggctcttcggttcgaacgccagcagatggaccgcgctttcaccgcgtgcatcaacgagcgcgacgctgccaacgcccgtctgcacgaagtagcaacggcctgcgcaacggcagagcaagagcgcgacgccgccctggccagggtcgccgaactggaacgcaagctacgcaacgaagagaacgcgcataccacaaccatcgagcagcgcgacaacgccgagcattgggcggatcagttggccaatgccattgctgaacggtttggcgtggatatcggcgagcacagcaacctgaattgcccgtggaatgaagcgctggtctggatgcagcagccgcccgcccaggctcagcacagcgtgccggaactcgaccagctctattccatgctcggcgctgaaagtcaggtagacgcagcgaagaagattgccgagctgatcggctgccggatgagccgcagcgcgcttaccgaagcgcagatgcgccggatctacgagaacagcaccgagatcgaaaacgagcggcttgggttcgcagcgttcgcacgtctgatgcgccgcgctgaggccgtgcaccagatcgccgccgcgcccggcaaggagggggtgtga

SEQ ID NO: 340275 - DNA, 681 bp, Pseudomonas aeruginosa
atgaaagaacgtccgatcctattcagcgggccgatggttcgagccatcctggaaggccggaagacggtcacccggcgcatcgcaaagcccgtcaagcatcctgatctaggaaacatctacgccccgggcgccttggtgctggagcacgagcctcagcatgttgtcgaccgagcatgcccctacggccagcccggcgatcggttgtgggtgcgcgagacgtggactgacgtgaacatgtgcggcgcaccggcgctggcatatcgggcggacgaggatatccgcgatcttatggaggagccgggctttctggatgatcgcggagccttcaactacgacgacccgcgcgtcaagccatatccattcgcctgctggtacgccgaacttgatcaggcgcgctggcggccgagcatccatatgccgcgttgggcctctcgcatcctgctggagatcacctccgtgcgcgtcgagcgcttgcaggacatcagcgaggagcaggcgttggcagagggagtgcacggcgagccatgcgaccacgctcggcaggcatgctcggacattggctgctggggcgataccgccaagggcgcattcggcttcctctgggagcagttgaacggagccggcgcctggcaggccaacccctgggtctgggtcgtcgagttcaagcgggtgacaccatga

SEQ ID NO: 340276 - DNA, 192 bp, Pseudomonas aeruginosa
atgaaactcgataagctggaagtggtcgtagagcctccgaagcatggcagtgcaaagctcgagatgctcggcctgccagtggcgcttgggctgtcgcctgagtggggcgctgaagccaagaaggctgcggaactgctagagaagcggcttgctcgcttggagcaagcgctgggtctcatgcctctaagctaa

SEQ ID NO: 340277 - DNA, 234 bp, Pseudomonas aeruginosa
atgaatatggacgtaaatcaactaattagagccattgatgagttggcttctaaggtgaacgccttaatggcggtcagtggcgggctagctgcccaagtgtaccaagcagagggggagcagggtctcgagaacgccagggcaaaggccaatacgatagccaggcaactcgaacggcctggggtgcgcctagacaagaccgtgctcaataacatctttgacagtgccaagcgttag

SEQ ID NO: 340278 - DNA, 1320 bp, Pseudomonas aeruginosa
atgagcattctacaaaccagattcaaatttacgaacctcaaagtgaaggcgctaccagcgcccaccgacaaggatcaggccttctattgggacaccgagacagccgggctggggctgcgcatcactgccgcaggtgccaagagctacatcgttcgcgggcgcgtcaatgggtcaggcaaggacaggcgcttcaccctcggttccgctgaactgttgagctgtgacgaggcgcgcaagcgtgcccaagtgaagcggctggaaatgctcgacggtctcgacccacaggttgagaaaaagaagatcgccgcgcagtccgaaacgctccgcgaagtgatggaggactacatcgaacacaagcgcacgaagaacggaccactgcgacccagcagcaaggctgacattcggcgctgtgtggaaggcaccttctctgactgggcagatgaacccgtggccagcatcagccgcgatgcttgcatcaagcgcttccgcgaactgtccaagactgcacccgtgcagaccaatcaagccttccgcaaccttcgcgccttgctgaactgggcgcgcgagaagagcgcgaccgctgatggtgtttatccaatcctgcctatcaaccccgtgtcacagatgttcaagcaagggggcatggcgcaatggaacaaggagaagccccgcaccactcgcgtcccgcgcgacaagataggcgcggtgttcgcgctgctagagcagcacagcgaccccgcgacgaacatcacaaccacttgcgtcagcgcggacatggtggcgttcatgttgctagcgggcacccgtgtttcggagacgcgaacgctgacatgggatagggtcaagctggacgggaagttgccgacctttcacatccccggcgacctgaccaagaaccacaacccgctgaccctgcctctgagcgatgcgctgcacacgctgctgacccgtcgctatgagaatcgcatcaagggcaataactacgtcttccccgccatgcgcggcaagaagggctatctcttcgaccctcgcgccttccttgataagaaagtatcaggggtggcgggaacgcacctgcacccgcacgcattccggcgcacctttgaggacgtggcccagatcgtcgtcgttgatagtgaccagcgtcggcagttgctcaatcaccttgctagcgacgtgcatggcacctcctacgcgaacaaccctgaccccgccgtgctgctgcccgctatgcagaagattagcgcgtggatagtgcagcaggggcagatcgccaaggatgctgccaagggtgaaaacgtgatcccaatgcgggcttga

SEQ ID NO: 340279 - DNA, 225 bp, Pseudomonas aeruginosa
atgactactgctaccaccacagcaatcaagctgctcaacaccgcgcaggctgccgaactgctcggcgtgaagaagaacaccctagagatttggcgctacgagaagaaggggccgaagttccgcaaggtgggcgcactggtgcgctatgccgagtcggacttgcttgcttacttggacgagcgcacccgcaccggcaccagccatcaaggcctgcaatcgtactga

SEQ ID NO: 340280 - DNA, 2061 bp, Pseudomonas aeruginosa
atgaatcaacacgaaaacagcgtagggcagccgtcatgcgaaatgcaagatggaatgctgcccgcgcaaaacggcgcgggggcggcactgccaccaagccaagggggtagcggcggcgacactgcaaacgtggccccagccgccccgctgcccgagcgctgggggtgcttaccggcagcgctacgcgaccgcccgcaatgggtgctcgctggtgctgacaagcgcccgctgaccgctgacggtcgcgcggcgagcagcaccgacccgaacacatggacggactttgacacggcatgccgagcagccgccgccaagggtctgcatatcggatacatgcttcacgagtcagacccgttcgcctgcattgaccttgatgtgaaggacgagaccccacaggcgcacatccaacggttccagaagatcgtcgccgccttcgacagctacaccgagcgctcacgcagtggtaagggtctgcatgtgtgggttgaaggcaagatcggcagaggtgtgaagcgtgacggcgtggaggtgtattcgcaagagcgtttcatcatctgcacaggcgacacctacatcgaccgacccgtcgcccaacggcaagaactgctgggcacgctggtaagcgagatgcgacccagcgccagcaccgagattcagctagacggtgacgatgcgcccgactggtcgcttgcggcatacgcggcgcaagattcgggcgaactggggcggctattcgcgggcgattggcaggggcgctacccctcgcagtcggaagcagacttagcgctggtcaaactgctcctgccccatgctgactcatcgcgcgaatgctggctgacctttcgactgtcgaagctgggcgagcgtgataaggcgggtcggctcgactatgcgcgggcgaccctatcgcttgcgactcagcacattgccaacgatgcggcacaggtgcagcacgggcagcagatcgcggaaagcctgttctggcgcgattccacgcaacacggaaacccgcgccacttccgtctgttgagcgataacgacctgcaacggctcccgactcagcgctggctggtgaagggagtcatcccacacgctagcgtcggtacggtcttcgggcagtcgggtactttcaagtcgttcctcgtgctcgacctacttgcgcacattgccaacggtcagccgtggttcggtcatcgcgtgacggctgcaccggctgtctatgtcccgtttgagggtcagggcggcattccaaagcgggttgcagcgtggcggatggcgcgcatgcacaacgggtgcagcggcgcggatacgaacatgcgttacatcaccgaccgcatgaacctccgcctgcaagcagaccgcgacaagctggtgcagacccttaccgaatgtggatgggcgggcggcgtgctgtgtatcgacacgctggcgcaggctggtgccggtatcgacgagaacagcagcgaaggcatgggcgaaatgatcgccatcttccaagagctacagcacaggctgggcggaacggtgctggtcgtgcatcacagcggcaaggttgagtcagcagggatgcgaggctggtctggtctgcgcggtgcgctcgactttgccatcaagtgttggcgcgatgacgattgggacaagtccgacgctcagttcgtactggacaaggtgaaggacggcgaggacgggcgagccttcaacttctccatgctccgcgtgcatatcggcatggacgaagaaggcgacgagattagctcgctgacggtcattcccccacaggagcgcgagcaagcgcccgacgatgcagcgctggcggcagcagatgacgagtttgttgatgggtggattcgcaggctggttgaagctggtcagcgtcccacaggtcgcggtcttgaagctctgcgcccgaaagtgaaagccgaatacgacctgccccaagcacgcctccgcgatgcggtcgcccgtctgaaggacagcggacgcttgcaactggaacagggtggcccctcgggagccaagtggctgcgacctgttgatgccccacaggtgcagcgtgactag

SEQ ID NO: 340281 - DNA, 306 bp, Pseudomonas aeruginosa
atgagctactacgaaaacgattattgggactggtgcgcctgcggacgcaagaagagggcggcgttcagtacctgctggcagtgcaagcaagagcaggcagaacacgaggcgcacatgcgcgggttcagggaagggttcatgcaaggtgcggaacatggctaccagtacgcaacgaacgaagcaaaggcaatgcagaagctccaccccgagctagtgaagcgactgattctgctctgccaccctgacaagcacggcggttcgcagaccgcgaccgaagtaacccagtggcttttgacgcaaagatga

SEQ ID NO: 340282 - DNA, 708 bp, Pseudomonas aeruginosa
atgcctaccgaaattgattcacgggttacacccacacttcacgccgagacgctgaaagcgctggacggctttgatgattcgacaatgccctatatcgccccggccatcgaagcgctggacgatgcgtatcaaaccctcggaaaactccatgacgggcgcgatgcagcgaagaagaaccaagcctggacggaggggcagcaagtgctggccgtatccgagacagcaaaccgccatcaacagcgcctgctgaaaaagtttgatgggctcgtctccacgatggacaagcagattgccaagttcgaggaagaactgagccagcctcttgagtcacgcgcctctgtgggtatcgcgggcgaggtgcgcaagttcgtcaaggacatgccgaccgaagaacgccacaagttcatccaagacgctatcgacgctggggacatgaccacatgcagcagcgtgctcggcgctccgccttacctgtccggcctcaccgctgacttccagaaaacctatacccgcatgtggcacgagcggatgaacccgcaggcatcggcacgcctcaaggtgattcgcggtgccaagtctcacatcgagaaggctggtgcgctggtggttgagcagattgagaaggcgatgggcgctaagtgggcaacggtgaatgaacttcgccaaggcaatgacaaagcgctcgcagcgctcaagttcggcgagtaa

SEQ ID NO: 340283 - DNA, 462 bp, Pseudomonas aeruginosa
atgactgaaacagttcagcctgactggttgcagggtttcaccccgcagccaaacaagccgcccaagggctggcaacctggccagagcggcaacccgcacggcagacccaagggcagcaagaaccgcaagactcagcttgccgaggaactgcaaaaggatggttcagagctggcgcgcgtcatcaaagaggctgcgattgctggtgataccagcgccatgaacctgtgggcgcagcgacttgaaccgccattgcgtgcgcgtgctgccgctgtggagtttgagcttgatcctgacaagcccctgcacgagcaggccaatcaggtgctcgtcgcggtatccgaggggcgcgtagatcccgaaaccggacggatgctgattgactgtatccagtcggttgcgggtatccgtgctgtcgatgaactggaagcgcgccttgttgcgctggaggaaaagaaccaatga

SEQ ID NO: 340284 - DNA, 222 bp, Pseudomonas aeruginosa
atggccgacacgcggggcatgctggcacggttgcgcaagctggagcgctcgcaaggggctagcgacgagatgcgaggctgggtcagtgacatgctcagcgctgccgttgctgacggtcgcatgtgccccgttgatggccctgtggtgcggcactgcctcttgaactggatcgacgacggcaccgcacgcgccgggactgctggctggggcttgctgcgatga

SEQ ID NO: 340285 - DNA, 678 bp, Pseudomonas aeruginosa
atggcattcagagcagacgaagcagcacggatcggatatgagcgggtcgaggcgtaccttgtgccacggccgcgcgatgcggacgaggcggaacgggcacggagcaaggaagcgctcctggacatccttgatgagcttggccccgtggttgatagctaccccacttggcacccgctggtctgcaaccacgacagccgccacccgacaaccacgccgagcgagcaatgtgggtacaagggtctcgaccacacgaggttcttccgcaacgggttcatcacctgcccctacaccgcgagcggaaaagccgaaaaggtcatcgaatccgtgaatgcactgccttatcaccccgctgccagcatcacggcggagaagctggatgtgcagctatacaaccccgaagcgacgccggtactggtcaagtgcgagtggcacaagtcccttgaggcagacggaatgattccgctgtccatcgccatgccactgatcctagagaaggaagttccgtgctggcagtgggcagaggtagccgagacatgggaaacgatgcgcccctatttccttggcagaccccacggcagccggtcgtcgctgtttgtgagtcaagagactgggcaggccatcaagaagatttggaatgcgctgatcttcacggggatgttcggccctatcaaggtttga

SEQ ID NO: 340286 - DNA, 699 bp, Pseudomonas aeruginosa
atgaccgcccctgaatggcactgcgaaatgctacgcagagctgccgacaacctccttcaggcaggcaatgtcagccagtctgactatctcgatatgcacgacctagttaccggcgcactctcgcacgcccaggaggaacgtgccgctcaatggtacaaacccaatcggacgtacaaagtggcgctgaacggccgcgaggttggccagattgcccgcggcgcattcaagtcttcggcgccagagctaagtgacgggttgattcgatacgacaggcgcggacagctagcaatgttccaccagtacaccatttatgggggcgagattaggggacgacgctggacatgtacgaacggccaaacctacgcattgacggtgatcggttgcacctggcacggcagagagtggcgggcattcgaccaacctgacgaatatcgccttgcggtagatctagccgaacaggccgaagaagacggggatagcgcagccgcagcactatggcgggagcggctagatgcatgcgaactgcggccatgcagcacctgtaggagccactttgctttgatggagacctgcgatgactgccacgggacgggcgtagtagcaaccgaggctatgctgaagggagttgacgcgagggcaattggatgtgtggacgactcagccaatactccggcctgcatgaattcgtgtcggtcttga

SEQ ID NO: 340287 - DNA, 264 bp, Pseudomonas aeruginosa
atgctggtcattcgattcaagggctggtcggtgaaactcgaccaccaggtgggtggagcagggaagttcggcatctggtcgttccacggctcggagagcagctacgtaccggacatggagacgattctccggcatgcagctattcggccggcggagccgaaggagggcgccgaggtcgaggtgctcatctgtgattcgcgtatgccgcaggacgaatggcgggcggtagggaccggcgtcgcggcttatgaggccgagcgctga

SEQ ID NO: 340288 - DNA, 264 bp, Pseudomonas aeruginosa
atgcgttcgatgattttgattttcgcggtcgcgctggcgggatgcgccggccagttcgagcctgagccgcgcacggtgcgcgtagaagtgcccgttgccgtgccgtgccgagtgccggcggtagaagtgccggcatgggcagcggctgggctgcggaaaggcgacgacctacagaccaaggtccgcgcactgctcgccgagcggcggcagcggatcggttacgaggcgcaactgctggcggccaacagggcctgtcaggattag

SEQ ID NO: 340289 - DNA, 393 bp, Pseudomonas aeruginosa
gtgatctccgcccgtgctttatcggtcgcgctggcctgcctgcttctggtcggcctcggcgccgccggcggtgtctggctcggcgcgcgacactaccggccgcagttggatgccgcgagcgcggatctggctgcctgccgtgcctcccggggagagttggagtccgcagtggcggagcaggtccggcaggttgccgcgctgcgcgtggccggcgaacagcgggcccgggatgccgcgctggctgtggatcggggacggcagcaggccgcggagcagtatgccaaagcccagcgcctggtacgtgagcgaaccgccggtgagcagtgtgcggccgccgaggtggtcattgatcaggagctagggctttctgccaggcactccagtgcgaactga

SEQ ID NO: 340290 - DNA, 630 bp, Pseudomonas aeruginosa
atgcctatcactgaaagccaactgctgtacatcctccctaggtgccgcccggttgttggggtcttcctgcccgcgctgaaccgcgccatgttgcagttcgatatccagggcggagccaggcaagcggcgttccttgcacaggtcggacatgaaagcgcccagctcacgcggctggtagagaacctgaattactcggcgcaggggttggcgaatatctggccgagtcgatatcgcggcgccgacggacgcccaaacgctttggcgttgaacctggcccgccaccccgaggccatagccaataacacctatgccaaccgcaatggcaacggcgatgagtccagcggagacggctggcggttccgcggtcgagggttgctgcaaatcaccggccgtaagaactaccgggctgccggcgccggcctcggcctgccgctggaggctgagcccgagttgctggagcagcccgagcacgcggctaggtcgagcgcctggtggtggacggcgaatgggctcaacggtctggccgaccggggcgatttcgctgccattacccgccggatcaacggcggcatgaacggccaggtggagcgcctggagttgtgggagcgggcgacgagggtgctgtcgtga

SEQ ID NO: 340291 - DNA, 1053 bp, Pseudomonas aeruginosa
atgaagccgatatttcgggtgatcgcggataaggccgatatcaccgcgcgtatcaacgaccggttgttgctgctgcgcacggtcgacaagccgggaatggagtccgacgagttcgagttgcgcattgacgaccgcgacggtgccgtggtgttgccggagcggggggcgtcggtcgagatccagataggctatgacgggcgcgggctgacccggattggcatctacaccgtggacgaggtggagttatccggcccgccggataccatcgtcatccgcggcaaggccagcagcatgcgcggcagcggcaagacgatccgcgacggaggctgggagggggtgacgctcgcgcggatagtggcggacattgccgcacgcaacggctggcagagcgagtgcccggtgcagacggtggttccgcgtgtcgaccagattggcgaatcggattttaacctgatcacgcggctggccagacagtacggctgcacggccaaggtggcggcggacaagttgcttgtactgcctcgcgaaggcggggagcgagcatccggcgcgccactgacgaccgtcacgctgacccggccggagatcacccggtttcagtttcggttcagtgaccgggccacgcagaaggcggtcaaggcggcgtatcaggacaagacgactggcaagctggaggtggtcgagctggcgaatgcagaggctccggccgggcttccgcccgtgcataccgaccgccacattcatccgaacaagagcgccgctgagcaggccgccaaggcgcggttggctgcgttcaaccgctccacggctggggtgcgcctggaaatgccagggcgaacggatctcttcgcggaacgaacaatagtcgtcgccggcatcaagtcgggaatcgatggttcctacctggtggagtcggtggaacaggtatttacccaggctggctggagcacgacggttgagtgcaacgccggcaagaagggcaaggccaaggccgccggcaagaagaaacagaaaaagccacttcaggtagtggccatcgggaaagcatcgtga

SEQ ID NO: 340292 - DNA, 312 bp, Pseudomonas aeruginosa
atgacctacgcactccgccaaccatcctttgtgcggctcaaggctcaactcagcctcaacggccgcttcaaccacaccctctacgacgcggaaacccgccaggcagtccacgccactcttgacattgagcgcggcgctgaacaggtcagcgtcgtcgttcgaatgggctccacgctgaatagcctgggcctccctatcgatgccccttccaacgccaacaccgtggccgactacctcgaatccatcgcaaacggccgcctggacacggcggacgacaccccggctcgccgccgtttcagccaagcagcgtag

SEQ ID NO: 340293 - DNA, 294 bp, Pseudomonas aeruginosa
atgaaagacttgtccctgcaccaggcagcgcagcgcctcgggctgacccgtcccgaactgatcaagcgcatgaaggcggccggcctgctcgacagcaacactcttccagccgcaccggtccgcgaccgtctctacctgcgcgcaaaggaaacgtcctggcatcaccccgaactcggcatgcagtacagccactcgacgaaggtgcgcccggccggagtggcatggctggccgacaagctcggcatcccacgcgtctgcccgccggcggtcccggaccgccgcgaggttggctga

SEQ ID NO: 340294 - DNA, 321 bp, Pseudomonas aeruginosa
atgaaatgccaaccagtacgaatcgccctggtcgaaatgatcttcaagctggccaccgaggcccgcgaagcggaaaccgaggcccaggcagtagcagcagaccaccaagcgttcggcgcaacactgctcgcctatcaggcaggctctatcgaccacagcacctacaccgcgctctgcaatctcgcaggaaatgcacgccttttgcgctgcattgagattgcctacgaccaaccgccgtactcacgcgccctagttgttcactacaccggccctgccttcgggaaggctcgccgcaatgcagccgaacaggtagccgcatga

SEQ ID NO: 340295 - DNA, 885 bp, Pseudomonas aeruginosa
atgaccgagcaacgcacgattaccatcccggcatgcgcacaacacggcgacattcgtcgggatctcacccagcagccagagtcggagcgaccagagctttgggctgtacatgcccaggggccggacgaactgtacgcagcattcacccgcgaagacgccgacaagcacgcagccgagctgaatgccctgccgatgccagagggaattacggtcggcgcagtggttgtttcgtccccatggccggctgccgagcactggcaatacctggccgaacaggagcgagaccacaagaacgaaatcgctgtgcgcctgcgccagttcgagcgcatctgcgaagggctgccgcaagacgccatcgatgggggctggaccgtacagggaatccgcgctcattccaagcagttggaggagcaactgaaagtcgcccaggccgaagtcgaagcactgcgggcggagcttcaatctcagcgagagcgcaacaccgaactgatcttcaagctcggtagcgcaacgaacggctgggggcgctgcgaaaaagagcgagacgccgcccaggccaggtgcgcggagctgaaagccgaactggctatggcaaacgacgcggccgcaaaaggcgatgctgcgcgccatcagtgcgctggaatggaaatggagattaaggaactgcgaggagctgccgaacactgggaagctgaatccagggcgctcagggaggaagttgcgcgcggaaaccggatcatctgcgccatggcgctggaccttgctgccgttggcgaggcgctgggaatccccgcagagcaacaggaaggtggcgccggtgagatcatcgaagccattcaagcgcttcaggaagagctgggccggggagggccacgcgatgcgtag

SEQ ID NO: 340296 - DNA, 561 bp, Pseudomonas aeruginosa
atggcccagattcgatttttcaaagtggcgaccctgccgggtacgctggaacccgattcgttctacttcgtcgagaacggcagctactcggagtcgtacctgacgaacagcgccggagtggcgcgctcgatcggtaacagcgcgatgatcaacgcgctgatcaacgaggcgttggccagcttgcccggcaccggcgcgccgatcctgttcgtagccgatatcgctgcacgcgatgccctggagccggagggcgcaatcttcgtcctggttcaggatgcgagcgccgacccgacagtcgaatccggcgctgcgctgtacgcctggaaccctgcgaccagcgcctggctgaaggtggccgagtatgagtcgatggacgtcgagctcaactgggacgcgatcaacgggcgcccgacgtcgacgccggcgcagatcgacactgccgtttcccaggcgcacacgcacgcgaacaagtcgacgctggacaagttcggtgaggagtcgggcctggtgcgcttcaacggccagccgatcccgaccgagtggaatgggacggcctggtaa

SEQ ID NO: 340297 - DNA, 768 bp, Pseudomonas aeruginosa
atgcgcaaactcggagtcaactcgtaccgtttctcgataagctgggcacgagtgctgcccgatggccagacgataaaccccaaagggctcgagtactacaagatactcatacaagatttgaaggatgccggaataactccaattgtaacactttaccactgggatatgcccttagctctttacaagaaaggtggatggtactcctctaaatcgcccgactggttcgctggctacgcaaagctcattttcagcaattttggcgaagaggtaccttacttcataactttcaatgagccggagggcaatatctttaccctgacgcccttggtagagaacttcctcaccgagaccccctcaccctatgagaaagtactatccgtagagtcacgcgcagctcaggcagaggccatgcacaacctcctgctggcgaactcgctagcggttacctcatacaaggaagcagggtacaagggacgaatcggtattgccctgaatctatccccctgtgtcgataatgagaacccgaacagcgcagccaagaggaactgtaactctgtgcacaatgcctgggttctggacgcgctttacaaaggaaactacccgaaagatataaaaactctctatcagaagtacgcacccgcgttccagccctctcaggatgatatgaaaaagatcatgcagggaagacctgacttcatcggcgtaaacttctactctcccaccctggtgaaagacgatccaagccaacccttcggaatagcaatgtag

SEQ ID NO: 340298 - DNA, 1269 bp, Pseudomonas aeruginosa
atgtccgatcttaaaaccgctgccctcgaatatcacgcacaaccccgtccgggaaaactgagtgtcgagctgaccaaacccaccgctaccgcccgggacctgtccctggcctacagcccgggtgtcgccgagccggtgcgtgaaatcgcccgcgatgccgaactggcctatcagtacaccggcaagggcaacctggtggcagtgatttccgacggcaccgcgattctcggcctgggtaacctcggcccgctggcctccaagccggtgatggaaggcaagggtgtgctgttcaagcgcttcgccggcatcgacgtgttcgacatcgaggtcgacgccgagagcccgcaggctttcatcgataccgtcaagcgtatttccatcaccttcggcggtatcaacctcgaggacatcaaggctcccgagtgtttcgagatcgagcgcgcgctgatcgaacagtgcgacatcccggtgttccacgatgaccagcacggcaccgccatcgttaccgcggcgggcatgctcaacgcgctggaactggccgggaagaagctggaagaagcgaagatcgtctgcctcggcgccggcgctgccgccatctcctgcatgaagctgctggtgagcatgggcgccaaggtcgagaacatctacatgatcgaccgcaagggcgtgatccacgccggtcgcgacgatctgaaccagtacaagtcggtgttcgccaccgagaccgacaagcgtaccctggccgacgccctggagggcgccgacgtgttcgtcggcctgtccggcgccaacctgctggagccggaagacctcaagcgcatggcgccgaacccgatcgtgttcgcctgctcgaacccggacccggagatcaagccggaactggcccatgccacccgcaacgacgtgatcatggctaccggacgttccgactatccgaaccaggtcaacaacgtgctcggtttccccttcatcttccgcggtgccctggacgtacgtgccacgcgcatcaacgaagagatgaagatcgccgccgccctggccctgcgcgacctggccaagcagccggtcccggaggacgtctgcgccgcctatggcgtggacaagctggaattcggccgcgagtacatcattccgaagccgatggacaagcgcctgatcaccgtggtctccgatgccgtggccaaggctgccatcgagaccggcgtggctaccctgccgtatccgaagaactatccgctgaaatcggtggacgaagtcttcaacggctga

SEQ ID NO: 340299 - DNA, 597 bp, Pseudomonas aeruginosa
atggcacggatcaaccttctaccctggcgcgaagagctgcgcgagcagcgcaagcagcagttcctggtgattcttggcggcgtcctggtggcatcggcggcgctggtattccttggcgaccagtacttcaccgcggccatcgagaaccagaacgcccgcaacgatttcctgcgcaaggaaatcgtcgtactcgacgcccggatcaaggaaatcagcgaactgaagtcgcgtcgccagcaattgctcgagcggatgaagatcatccaggacctgcagggcaaccgtcccatcatcggacgggtgttcgaccagctcgtgcggaccttgcccgacggcgtgtatttcaccgacctgaagatgaccggcaagaacattgccatcgccggcgcggccgagtccaacaaccgcgtttccaatctcatgcgcaacatggacgcgtccgagtggttgaccgccccgaccctgaacgaggtcaaggcggtgacccagggcgcggtggaccaggccaacgtgttccaactgaccgtgcagcagacgcagcccggcgaggaagacgccaaggcgaagcatggggttgcgcaaggagccaagaaatga

SEQ ID NO: 340300 - DNA, 933 bp, Pseudomonas aeruginosa
atgtcccttgcctccaagcttccccgtttccgctggctgctgccggcgttcgtcgtgctcgtcggcgtggtgctgaccatcgtcatgcattgggacgatcgcgccggcctgtggtggaaggaaagccaggccagccagcagctgcgcgacgaaagcatctggctgccgggctatcgggtggtgatcgacgccaagccgttgcagggcctggaagaggacgaaacctcggacctggcctacaacccggcaaccaggaccctgttcaccgttaccggcaagcggccgctgctggtggagctgtcgctcaccggcgacgtgctgcgcaccatcccgctgctcggcctgagcaatcccgaaggcgtggcggtgctggagaacggcaacgtcgcagtgaccgacgagcgccgcaataccctgaccatcttccatgtcgacccgcagaccgccgagctgagcaccaagagcctggccgaattcccgctgggcaatatcggcaagaagaacaagggcttcgagggcattgcctgggatccgcgccagcagcgtctgttgctgagcaaggagcgcgatccgatgaccctgttcagctggaagagcgacggcgggccgagcctgagcggggcgatgaccgcgctaccgagcgacgacctttacatgcgcaacgtctcggcgctcagcgtcgacccgcgtaccgggcatacgctggtgctgtcggccgaatcgcatctgctgctggagctggacgagaagggcgagccggtcagcttcatcagcctgctcggcggcttcaacggcctggacagcaagatcccgcgcgccgaaggggtggccatcgacgacgagggcaccatctacatggtcagcgagccgaacctgttctacgtgttccgcaagaagagcggcgagcgcctggccaccagcgatgccgattaa

SEQ ID NO: 340301 - DNA, 549 bp, Pseudomonas aeruginosa
atgggtgattggaaggcatgcatcggaaagatgagcgaccgcgaagtagcgcggcgctttggtcttggagcgagcagtgtccggcgctaccgccactcaattggcattcctgagtttcacccagaagacattgagctgccgactgagctgattgagcaactcgctacaagaacgaactatcaactggcacaagaattcggagtttccatcaagcgcatcaagcgaaagcgaggtgagctgagaatccaggagcccaagactgcccgcgaacgcttcaaaccccttgaggacatctggaccaatgaagccattgccatgctcgggaagatgccggataccgaggtcgctgatcgtctggatatcagcaactttccagtcaaaaagaaacgtcacgagcttggaatacaggcatacaaacgtccgttaccagaaataacacctgaaattgcatctgcgtttggtgtcgtttccgacgccgagcttgcacgccagctgggtgtatcagtgaattacatccgcaaagcgcggatcaaggcgagccagcaataa

SEQ ID NO: 340302 - DNA, 264 bp, Pseudomonas aeruginosa
atgacccttccttatgaaagaacccgcgccatcatcaaaactgaggagtttctgcgtgagctatctcgtcatacggggttaccgcaggatatccgcagctatgcgaaaagcctgctcaggcactatccctctacggcccaggttttctcgctgggacgccttgaggaatgcctggtaaacgaagcgcttgaagacgaataccgacaacgagtgatcgccttccaccagccactgctctgctcttcgctggattcgacacaatag

SEQ ID NO: 340303 - DNA, 282 bp, Pseudomonas aeruginosa
atgaaactgtaccaaatcgcctatgacctgcgtaagcagcgtaactaccaaggcctgtatgaccgcatcaaagcctatggcacttggtgccacgccctggagtccacctggatcatcgccacgcaacagtctgcagcccaggttagagataacctccggtccgcaatggacgctgacgacggcctgctggtgacccggctgcagggagacgccgcctggtttgggctggatgccgaaaaaactcagtggctacaaaatcagtatcagcgctgcgaagcctga

SEQ ID NO: 340304 - DNA, 573 bp, Pseudomonas aeruginosa
atgccaaacccgtcattcaaattgagcgatgtggccgatgtccgttccggatacaccttccgcggcgcgttggagcatgaccctgctggtgatatccgtgttctgcagatcaaggatctgcgtcaaagctcggccattgagccggacacgctaacggccatcagctgggatgcgcgcacctcaccgccgctgctccaatcaggcgacatcgcggtgatcgcccgtggcgataacaacaaggctgctctcttcacggggcagcaaccggttgttgccaccagccagttctttattgtcagcacaaaaaaacaggatgtcttacccgaatacctgtgctggctcatcaatctgcctcaaagccagcgaagccttgagcgcagcggcagtgcgattcaggccatcagcaaagcgtccttgctggatatgaggattccccttccgccactcgccactcagcagaagctgattgctctgcaagcgctatgggacgaagaggatgagctgatcgcacgcctgcaaaccaacagagagcaaatgctgcaaggcatttaccagcaccttattaaggattga

SEQ ID NO: 340305 - DNA, 1524 bp, Pseudomonas aeruginosa
atgagcgacaaagtaaaccaggacgacatcaacaaggcgctgtgggctgcctgcgataccttccgcggcaccatcagtgcggacacctataaagatttcatcctcaccatgctgttcctcaagtacatcagcgatgtctggcaggaccactacgacagctacaggatggaatacggcgatgagccggaactgatcgaggagatgctcaagaacgagcgtttcgtgttaccgcgcaatgccagcttctatgccctttacgatcgacgttatgagccgggcaatggcgagcgcatcgatcaggcactgcattccatcgaggaagctaatggcaccaagctcaaggatgccggcaagagcgtgttccaggacatctccttcaacaccgacaagctgggcgaggagaagcagaagaacaccatcctgcgccacctgctcgaagacttcgcccgtgaagagctcgacctcaaaccatcccgcgtcggcagcctggacgtgattggcaacgcctacgagtacctgatcaaaaacttcgccgccagcggcgggcagaaagctggtgagttctacaccccaccggaagtttccgagctaatcgccgagctgctcgacccgcaaccgggcgacagcatctgcgacccggcctgcggctcggcatcgctgctgatgaagtgcgggcgcaaggtgcgcgagcatcacaacagcaagcaatacgccctctacggccaggaagccatcggctccacttggtcgctggcgaagatgaacatgtttctccacggcgaggacaaccacaagattgagtggggtgacaccctgcgtaaccccaagctgctcgataccaatgggcaactgctgaaattcgatatcgtcaccgccaacccgcctttctcactcgacaagtggggccatgacgaagccgagcacgatcagtttgggcgcttcaaacgcggcattccgccgaaaaccaaaggtgacttcgcctttatcctgcacatgatcgaaaccctgaaggccaagaccgggcgcatggcagtgatcgtgcctcacggcgtgctgttccgcggctccagcgagggcaagattcgccagaagttgatcgaagaaaatctgctggatgccgtgatcggcctaccggagaagctcttctacggcaccggcatccccgctgcgatcttggttttcagcaaagccaagactgatgaaaacgtgctgtttatcgacgccagtcgtgattttaaatccggtaaaaaccaaaacgtgctgggtgaagagcagattaataatatcctgctcacctaccgccatcgcatcaattcggacaaatatagccatcgcgccagtctacaagaaatccgcgacaacgattacaacctgaatatcccacgctatgtggatacatttgaggaagaaaaagaagtcaacctgatggctgttcgtaaagagcgcgcgcaacttaaagcaaagttagcggaactggaaatcgccatggacacttacctaagggagctgggttatgatgcctga

SEQ ID NO: 340306 - DNA, 1206 bp, Pseudomonas aeruginosa
atgcctgaagggtggagaaatgagcgattcggaaacatagccacctttagaaatggcctcaactttacacgaggtgatactggtgaggcggttaaaatagtcggagttaaagattttaaagatctctctgagctgaggagcactacggaccttgaggttattagaatttcttcaaacttgagtcccgatgacctgctgcaggatggggatctgttgtttgtccggtcgaacggcaataaagacctcataggaaggtgcctctacttctccaaggttagcgaacgcttatcgttctctgggtttactattcgcggcagagttaataaagataaaatttatcctgagtatgcctcatttctgactagatcagaaatgattaagaggcagttctccgaaagcggcggaggtacaaatatctccaacctcagccagcaaattttgggtgatattgcctttagattgccgcctcttgccgagcaaaaaaagatcgctgaaattttatccacttgggatcaagccataacgactagtgagcagctactcgaaaacaacaaacagcagaagaaatcgctgatacaacaacttttgagtggcaagaaacgcctgcctggcttttcgacgaaatggcgagatattaggcttggtgaggccttccaagagcgcgtggaaattggatttatcaagctacctttgctctcaattaccgcggaggaaggggttattgaccgtgatgaaactggccgcaaggacacatcaaaatccgacaaatctaagtatctgcgcatctgccccggcgatatcggctacaacaccatgcgtatgtggcagggcgtttctgggctttcaacgctggaggggttggttagccctgcctataccgtcttgaccccgaaaccagaagttgatccgctgtttgcctcttacttgttcaagctgccagcccttgtgcatgccttttatcgacactctcaaggcctggtctcagatacttggaatcttaagtactctaattttgcgaagataaaatggagtattccgggcgttgaggagcagaaggccattgcagctgtactggccagcgctgatcgcgaaatagaaatccttcgactgcagctcgccggccttaagcaggaaaggaaagctctaatgcagcagctactcactggcaagcgccgtgtaaaggtagatgaaccggaggttgcctaa

SEQ ID NO: 340307 - DNA, 837 bp, Pseudomonas aeruginosa
atggccaagaagcacgtcccctttgtgatcgcctatgacttcgacggcaccctgtcgcccggcaatatgcaggagtatgactttgtgccagcactgggcattaagcctgccgatttttggcgcgaggccaaggcgatggcccaggagcagcaggcggacgaaattctggcttatatgcggttaatgatcgagcgtgcgaacaccgccaaggtctcggtgcgtaaaaagaactttgccgatttcggcgcacatatccagctatttccgggtgtccaggactggttcaaacgcatctccgaatatggtcgcaccaaaggggtcaaggtcgagcacttcatcatctcgtcagggctgcgcgagatgatcgagggcaccccgatcaacaagtacttcactcgcgtctatgcctcgggttttatgtacgaccataacgatgtcgcgcactggccagccttggcggtgaactacaccaccaagacccagtatctgttccgcatcaacaagggcagcctggatgtgcacgataactcggtgatcaacaagttcgtcgaacccgccgagcggcctgtgccgttcagcaatatggtgtttatcggcgacggcgagaccgacatcccctccatgcgcctggtcaagaaccagggtggccactctattgctgtctacggcaaaggcaaacgcggtgcccgggacaaagcgctcaagctggttaaggaggggcgcaccaatttggcgactaccgccgactacaccgatggctcggctatcgaccgcgccgtaaaggcgatgatcgacaaggtggttgcagaccgcaccattgcggaggcgaacggctga

SEQ ID NO: 340308 - DNA, 1005 bp, Pseudomonas aeruginosa
atggcaagtggcgacctgattctctacagcacggacgatggtctggcgcagttcaccctgcgcgaaatggatggtcaggtctggctgacgcaactggaaatggccgagctgtaccagaccaccaagcagaatatcggcaagcatatccaggccatcatcgctgatggggagctggctgaaggggcagttgtaaaccagaagtttactactgccgccgatggcaaagactacctcacccacctctacgctctgccgatgatcatcgccgtgggctaccgggtgcgctcaactcgtggcacccagtttcgtcagtgggccacccgcaccttgggtgagtacctgcagaagggcttcgtgatggacgacgcccgcttgaaggagccccgctgggactacttcgatgagctgctcaagcgcatccgtgacatacgggcctcggagaagcgcttctaccaaaaggtacgtgatctcttcactctggccgaggattaccgcgccaatgagcaggacaccgcccgcttgtttgccgaagtgcagaacaagctgttcttcgccgttaccggccacaccgccgccgagctgatagtgcagcgcgccgatgccagcgcacccaatatgaacctgcttagtttcaagggcgaccgggtgcgcaaggccgatgttgtggtggccaagaactacctgaatgccgaggaactagaccagctcaatcgcttggtcggcatgttcctcgacttcgccgagctgcgcgccgagcagcgtaagcacttgatgctcgccgattggcggcaatacatcgacagcttcatggccttcaacgaacaaccgctgctacgcacagccggcagcgtcagccatgagcagatgaaacagctggcgcatgagcgttatgagcaattcgatcaaaaccgccgacacgccgaagccctggccgctgatgctcaagaactggcagagctggagcgcctggaaaagcgcctgagtgctaagaagaaatccaagtaa

SEQ ID NO: 340309 - DNA, 1095 bp, Pseudomonas aeruginosa
atggatctggaacaactgcgcacgctgctaaccaaggccgagcgcttttatcagcctgagcgagagccgagtatttttgccttgggtgggcgcggctactacgaaaaccccaccactgatttgctggcgttcttcctcaatccagcgcaggtgcatggactggaagagtgcttcctcactgcgctgctgagttgcctgcccaatacctcaacactgacgcctagtttgcgagcggctccccagcgcgaggtggtcacccataacagcaaccgaatcgacctagtgctcccaggtgatggatgggatctgctcttggaaaacaagattttccacggacaagtgaacccctttaccgactatgaagccttcgctcaaagcaaactcaacgatggtgaacgccagctgttttatgccgtgctctcaccatcaggcaaaagcgtgcgggccgcatggcatggtctgagttatgcgcaatttattgaagctgcacgtcagcaactggctcagcgcatgctgactcatcctgtagataagtggcaggtgtttgctcgcgatttcctgctgcacctggaaaacatcactgtggagaaggccatggacgccaaagctgtcaactttgttatcgagcacctgcatcaaatcaacaagctgacgcgcctcaaggatcaggtcattgatgccctcgacgctaaggtgctcgacaagctcgatgccgaggtgcccggctatgcgcgttatacccggcggcacaattggaagaatggccccgcactgcgttatgcctccgacaactggaaaacgtggtctgacgttgtgctctacctgagcggtgccaacagcacgatgatgccatcggtacgggtatacctgtgtgatgttgatgagacgctgcaagagcagggccgaaagctcttcacgggcaacgaaaccaaagtatggagtgaggggaagaacaacagcatcctgggttttagctgggtgctggatcactttgatgaagaggaagtgcttggcctgatcgttgagaaaatgaagctgctgatgactttcgaaaacggaatacgtgcgcaagtcggtcagcacactgaggcttaa

SEQ ID NO: 340310 - DNA, 1536 bp, Pseudomonas aeruginosa
gtgggtttgcaaaagcgtatcggggatttggtcgccagcgtaagcgcgggcatgtttgagcgtgaagagatcatcgcggtatccctgctgggagcactctgcgggcagaatacatttttatacgggccacccggcacggccaagagtctgatttctcgccgtatagcctgcgcctttgagcagccaacctatttcgaatacctgatgaaccgcttcagcacacctgaagaggtgtttggccctgtgtccataaaagcgctgaaagaagatcgctacattcgcaaaacagatagttatctgcccaaggccgatttcgccttccttgatgaaatctggaagtccagcccagctattttgaataccctgctgacgttgattaacgagcatgtgttccgtaatggtgaagccattgagaaagccccactcaaggccctgattgctgcatccaacgaaacgccagatgccaatcaaggcctagaagccttgtatgaccgctttattgtgaggctgatggtggggcccattcgtgaagcccagcacttcgatcagctacttaatagcaaaccgaccgaagccaaaatcgacatcccctcggctcaacaggtgaagtccagcgaatgggatgaatggatgacccaattgcatcaggtcaagctgtctgctgagacgctaaccatcattcacttgatccgcgaacagctggagcagcaatacgaaacgctcaaggtttatgtctccgaccgccgctggcagcgcgcagcgatgcttatgaaggcagcagccttttttaatgatcgcaaggaaaccaaccatagtgacgccttgctgctgcagcactgcctgtggactcatgaagaaaatcgtcaggctgtctgggatatcgttgcggaggcggtaaaggcctgtgggtttgatagtggtatagatttggctgcactggataaagagaaagacgcactagacaaggagataaagaaggagcttttccattctgctgatatttacaaaacggtaaagctctccaacaaggatttctttcaatgcaaaggtaccttcaagcccaaaaatagctactacagcaactacgaaaaagcatttgagatattcatcgcaaaagatagactcaagataaaagacgagttccacccgctagacaataaaggtaatgaacaaaaaagtgttaagtgcaaatttgacggacaaggaacctgtcagatcaccttatctaacggccacgtggattacctgagcattaagttcacgcctgaagttctttttcacaaaggcgacagaaaggaagatattaacatacgattaatcacctccctttcctcttcggtgagtgaaattcgcgagaagctctctttcactctgaaaaaagtagagaaaaaatttaaagcctacgagactaagctgagctcgccttttgtgccggcagataagatctctctagcaatttcgggaatagcactacaaatcgaaggtttgcaacttcgtatcaaagactgcgaacggctggaagaattatgccgctag

SEQ ID NO: 340311 - DNA, 1044 bp, Pseudomonas aeruginosa
atgctgcgccggcagttcatggaggagctcgaggtatttctgcagttactgcaacagcttcaacagcagttggaaatgctggggttggacccgggtatattccttgacctgtccaaaggcaatttctctgcacaagagatcgagcgctttaagcggtgggctaactacttggccaatgatccgggtgttcggtcgctatgtgatttgctgggcaagctacgccagctggagttatccgagcgtatcgagcgagcccaggtgcgctatacgcaagacattgagttaccggatatcaattcgcgagaagagatcatcggcattcgcctagggcgtgacatcgagcatgtgctgcccagcgagttggcacttctggctgaccccgaaacgtccattcttttcgacctcaagtatgtcgagtcacgcctgatgtgttttgacatgcagggcattcagcgcgtgcagcaacatcaccaaaaagaagagctgcgtagcgttgaagaggcagctaaacaagggccaatggtgatctgtgtcgacaccagcggctctatgagcggtatgcctgagacggttgccaaagccgtggcgctcttcattgcaggcaaggccaggcagcaaaagcgagcatgctatttgattaatttttccaccggcatcgagacgcttgatcttggcgacgactttggtatggaggcattgatcaagtttctgggcatgtcctttcacggcggtacggatgcgatcccggcattggatcatgcgttgggtgtgatgaaaagcgaagcctatgaacgagcagacctgttgatgatttcagacttcatcatggctagcttgccagagcatttacgccagcaaattgagcagcagcgtactcatggcaaccgcttctattccctggtcgtaggcgattgctttatgactcagcgtttaaccagcctttttgatcatgaatgggtctatgacccacacagcagccagattcatgagctgattggttttcagcgaaaactggatggccgcccggagaatcacagcgcatga

SEQ ID NO: 340312 - DNA, 3276 bp, Pseudomonas aeruginosa
atgacaccaacaccgaaatttcaggaggagtacagcgcaaagcttcctgctctggcgctgctctgcaacctcggctgggaattcatgtcacccgagcacgctctggctgcgcgggccggtaagagcgatgaagtggtgctgcgtgatgtgctgcgtgagcagctgagtaagcggcgcttcctgtttggaggcggtgagtacccgctttccgcaaaagctatcgacaacctgatcagtgaagtgtgcagccctgcactcaatgaaggattgatggctgcaaacgaacggctctataaccatctgctgtatggcatctcggtgacggagttcgtggatggtaaaaaggccagcccaaccgtggcgctgatcgactggcacaatccagccaacaacagttttatcttcactgaagaatttcgcgtgctccgcagcggcggtgtggaagcgcgcaggccggatatcgtttgcttcgtcaatggcattcctctggtcgtaatcgaggccaagcgcccggatggcaatgcacaaaaaggcccgacaatcgacgaaggcgtttcgcaaagcctgcgcaaccagcgccatgacgaaattcccaaactgttcgcctatagccagctactgctgtcgatcaatggcagcgatgggcgctatgccacctgcggcacgccagctaagttctgggcggcctggcgcgaagaggatatctctacctctgagttgtacacgctaaagaatcgccaactgactggtgtgcagaaggcggcaattttcagccatcgcccagcggctgatctgcactggtacgaaaacctgatcgctggcggcgagctcgcactgacaggccaagatcagttgctcattagcctattgtccccagccaggctgctggagatgactcgtttcttcaccttgttcgacaagaaggccggcaagatcgtcgcgcgttaccaacaggttttcggcatcaaacggctgattgaacggatcaatcagaaacgcaaagacggcggtcgtgaaagtggtgtcatctggcatacaaccggctcgggcaaatcattcaccatggtttttctgagcaaggcgctgatcctgcatgactctctcaagcagtgccgcattgtggtggtcaccgaccgggttgacctggaaagccagctgagcaaaacgtttgcctcgggcggcgaactggctggcaagaaggatcgcgaggctgccatggccacttccggcacgcgcttggctgagcaaatcggtaagggcaacgagcgcatcattttctcgctgatccagaagttcaacagcgctaccaagctgccacagtgcgtgaacaccagtgccgacatcatcgtgcttatcgatgagggtcatcgtagccaaggcggtgaaaaccatatccgcatgaagcaggcgctgcccaatgcggcctttgtcgcgtttaccggcacaccgctgctcaaggacgataagacgacgaacaagtttggccccatcgtgcatgcctacaccatgcagcgcgcagtggaggatcaggctgtgacaccgttgctctatgaagagcggatacctgatctggatgtaaatgcgcgcgccatcgacagttggtttgagcgaatcactgaagggctaaacgagcagcagaaagccgacctcaagcgcaagttcgccaagaaggggcaaatctatagcgcggatgaccgtattcgcctgatagctctagatattgctaaccacttcgtgaagaacatcgacgaggggctaaagggtcagttggcctgcgacagcaaggcctcggcaatcaaatacaagcagtacctggatgaggcaggcttgttcgagagcgccgttgtgatgagcccgccggatagccgtgagggcaacaccgatgtggatgaggcggcctcacccgaggtaacccagtggtggaagaaaaacgtcggcagcacggatgagcagacttacaccaagcaattgatcgagcgattcgacaaggatgactcactcaagctcctgattgtggtggacaagctgctgacgggattcgatgagccgaaaaacaccgtgctctacatcgacaagccacttaaggagcacaacctgatccaggcgattgctcgggtaaaccgtctgcatccactaaagaagtttggcttgctgatcgactacaggggcatcctttccgagctggataccacgatccaaaagtatcaggatctggcctcgcgcacccagggcggctatgacatcaatgacatcgctggcctctacaaccagatgagcagcgagtacaaacggctaccccagctgcataagaacctctgggcgatattctccgatgtgaaaaacaaaggtgacatcgaacagctgcgccaagtactggtgcctaggatgcaagagcgcgatggtgagctggttgatgtgaatctcaaggtacgcgacgacttctatgaagcgctgaccgagttcgctacctgcctaaaggtcgctttgcagtcagcatccttcttcgaggacaccagctttagcgatgccgacagagctcattacaaggaaactcttaaacagttctccagtctgcgccaactcgccaaacaagatgccggtgaaacggtgaactacgaccagtatgccgagcaggtacgcaagctgctggataagcatgtggtaggcgtcgaggtgaaagaccccgttggggtttatgaagtcggcaagatggggcagcaaaagcctgaacagtggagcgaggaaaagacgcgcaacgaaacagacatcatcaagacccgtgtcagcaagatgattgagcaggagttgcgtgatgacccctacgcccaagaggcgttctccaaactgctgcgccaggccatcgaagaggcggcaaagctatttgaccacccgctcaagcaatacctgctattccacgaatttgagcagaaggtgcaggcccgcaagctcgatgagctgccagatgcttttgcaggtaaccggcatgcccaggcgtacttcggcattttcaagaagagccttcctgaggccttgatttcagctgatgaacatgcacaggagcactgggtaaaactggctttcagcctggatgaaatggtcacgacctcagtggctgagcactcaatcaacccacaaaatatcgaaagcgatattcgtaagaagctactgccgctgctcttcaaggagtgcaaagcggtgggtgctggcatggatcaggcgaaggccatagttgagtgggtggtccaaatcacgcgagtaggcttgtcgggcttatga

SEQ ID NO: 340313 - DNA, 777 bp, Pseudomonas aeruginosa
atgagtgtacccatcgtcatcagcgctccacctgcctccgcagtgtcgagctggctgagcttccactatgctgatgagttgatacaggttgaaagggcgcgaagggctcgcgatgttgcacgcattctgatcaaggtcgatccagactgccgcgtgcgcgtcagtgcgccagatggggccagcgatgaacaggtattggccgcgctgaaacgacgcggtcgctggatctacgagcagcttcgtgagttccgaactcagctaatgcacgttcgcccgcggcagtacatcagcggggaaagccactactacttgggcaagcagtatgtgctcaaggtgattgaggcgcctgatgagatacagcaggtgcgtttgttgcggggcaagcttgaggtttctgttcgagtcaggtcggcagagaagatccgcgaactcctttacgcctggtacaaagctcgcgcccgtgaggtttttgatcgacgtctagatgctgtcttgcaacaagccctttgggttgcagccaagccgccactgcgcatcctaagcatgcaaacacagtggggtagttgttcacctgcgggccgtatcacgctcaatccccacttggttaaagcatcccgcgaatgcatcgactatgtgatcttgcatgagctttgtcacatcgccgaacacaaccacagtgagcggttctaccgccttatgcagcaggtcatgccgcattgggaaaagacaaaaaaacgtctggacggtatggcggctgccttgctgaacggaggctga

SEQ ID NO: 340314 - DNA, 1119 bp, Pseudomonas aeruginosa; identical to SEQ ID NO: 327829

SEQ ID NO: 340315 - DNA, 1236 bp, Pseudomonas aeruginosa; identical to SEQ ID NO: 327827

SEQ ID NO: 340316 - DNA, 804 bp, Pseudomonas aeruginosa
atggatattgaccgcgagagcattgccatccgattgaccgaggagcgggctagaaagggatactcacaagcggacttcgctcgacagctcgatgtcacgagagaggggttgcggctctacgaaatgggccaacgaggagtgagtgcggagttcctggcaaaagccgccggactggggatagatgttcaatacgtcctgacgggaattaaatcgaacaacgcggctgaagcagagaagaacgcgagtcctgagccctcatctgccgtttctatttccggcggaaacttcgccgggtttgtaggaacagctcaaacaggctcaactgtgcatatgatcaacactccacggtacgtgacaaacacaaaggccgaggtcaagcctggtgaggatcacatcagcgaggagcaggcagcgaagctaactaccttggtaagtgacatcgtagagctggaacagagggttcgtaaggctccgaagtcattccgtggtgtgtgggcatcccttaatgcccactgtggagttacccgctatcgcctgataccagcgaaggattttgctaaggcagaaaagtacttgtacacatggatcggtcggctgaattcgagttctaaggccgctacctcggataacgacacatggcgtaagcgcagattcgcttacatcaaaatcaataccaaggatgatgaggagtggctagcggcgtacctacgcaagacgtttaaggtgtcgagcatcaaggaactcgatgatgcttcgttggaccgcacatacagagctgtggcgtcgaggaagcgtagagtgtga

SEQ ID NO: 340317 - DNA, 2301 bp, Pseudomonas aeruginosa
atgtctagttggcatgttgtcagtgagctagttggactacctggcatccctctcactgctcaaggcactagaaagctcgctagccgagaaggttggcaggggcgccgccgcgaaggcaccaaggccaccgaataccacatctccagcctgcctgaggaaacccgcaaggcgctgctgaagcaggctgtaaaggccatcgccgcccaggctcctgctgccgagcaactgccgacgccacgcaccaccaagggcaagcgggcgatctggcagcgggcgtccgccgaaggcgcactgacccaccgtcagaccatcatccgcgacgcccgcctgctggtggtcaacgtcctacagcgcatgcaaaaccagggcatgaaccagcgtaccgcctgcatccagttgctgacctgggcggcgtccggcgagctggaccgcaacaccttgaacgccctggcgatgggtaacagcaaatcccgcgcgggtctgcgctgggacgtggtcatcagcgacgaaggcttcccgaccgccgaagtcgcgcccggccaggacgtgcagcgcgccgcctgcatgctgtcctgtcgcaccctggagcgctggctggaaatggcccgcgacggcggcgccgatggcctagcgcccggcaagcgcgagaaggacatgagcatccatccgtgggtgccatacctgctgaccgccatgcagcgcccgcagaaaccaccgctgaccgatgcctggcgccagatgtgccgcgagctgccgccgagcatcccggcaccgagctacgactccgtctatcgctggtacagcaagaaattcagcaacctggacaagaagcgcggccggcaccagggtagtgcgctcaacccgcacaagtacgcccgcactcgcacgtcggagggcatggtgccgatgcaggaggtgcattcggacggctggggtacgcacttcaccgcgccacatccggtatcgggtaagtacgtcaagctggaggtctggcacacccatgacgtggcgacccgctacgtgttccggcccagcgtcggcctgtccgagtccaccctggtgatcatggggtcgctgttcaatgcagttgccgaggccggcgtcccagcggtctggcagaccgataacaccggcagcgtgaagaacgaccgtgtcagcttcgatccggcagcctcgctccaggcccgcaccggcatccacatcacccacaacctgccgggcaacagccaggccaacggcatctgcgagaacttcaacaagtacctcgacagccgcgcccgcgaactggcgacctacatgggcaaggacatggacagcctggcgcagaagcgcgtcctgaagctgacccagaaactggtgaaggccgaagaggtggacgagcgccgccgcttgaaggccgaggccgagaaagctggctccggcatcctggtggagtccttcgagcaggccaaggcgatggtcgagcagtggtgcgacgagttcaatcacaccccgcacagcgcgttgcccaggatcgtcgatgcgctgaccggcaagcgccgccaccagacccctgccgagtcctgggcgcagcatgtcgccgctggctggcagccggtggccgtgcggggcgaggaactgcgcgatctgttccgtccgcatgagcgccgcactgtccgtcgcgccctggtgagcctgtaccagcagaagtaccaccaccccgaactggaacactggaatggcgaggaagtgcagatcgcttacgacatccacgatggtgaacgtgtctgggtcaagactctggatggtcgcctgatctgcgaggccgccctcgatagcacgaccggctaccgcgcccagagtgtgtacgaaatggcgatggagaagcgcgccgatgccgcgattgcccggcacgaagcgcacatcgccgagatcgaccgccagcggccggtgcatgtcatcacccacgaaacgccgctcaccattccggggctgggcgatatcaccccggagcgcatcaatgcgcagttggctaaggtcgcggtgatcgaaggccaggccaagcgcgtggacactcgctccgagcccaaagccgtccctgccgccgccgacccgcagtccgcgttcaccgcccaggtgcaagccctgtcggacttcgagcgctatcagttctatcgcgagctggaaggccgccaggccgcagggagcagcgtttccgagcatgaggccaagttcctgcgcctctacccgcagtccaaatcgtacaaggcattccgccgcaacgaagtcgaggccggcgacgccctgcgccgccaaggctaa

SEQ ID NO: 340318 - DNA, 753 bp, Pseudomonas aeruginosa
atgagcaacctgaacaccccctccaaactggccccgctggacatggcggaaatcgccaatatcggcctctgcgacctggccctggagcgtgcgctgtcgcgtacccgcagcctgccgggcctggtgtgcttctacggccccagcggtttcggtaagaccatggccgccgcctgggtcgccaactctcgccgggcctactacgtccaggccaagagcctgtggaaccgcaagcacaccctgaagtcgatcttgaccgagatgggcatcaagcccgctggcaccatcccggagatggccgaccagatcgccgaggaactggccgccagtggccgcccgctgatcatcgacgagatggaccacctggtttccgcaggcagcgtcgagctggtgcgcgacctctacgagtccagtcaggccgccatcctgctgatcggcgaggaaatgctgcccaccaagctgaagaaatacgagcgcttccatggccgggtgctgagctgggttccggcacaaccggtgaccctgctggatgctcagaagctggtccaggtctacagcccacaggtggtgatcgccgacgacctgctcggcctgctggtcgagaagtcccacggctcggtccgccgtgtcgcggtcaacctggagaacgtccgcgacacctctctcgacctgggcctggatcgcatggacctggcgacatggggcgaccgtccgctgtacacgggtgaggcgccgaaccggaggaacccgaagtga

SEQ ID NO: 340319 - DNA, 666 bp, Pseudomonas aeruginosa
gtgagcctcggcaagaacccggctcacctgtccatggtcgggggcaagagcccccgccaacagatgtgggaagtaatccgggccaaccgcgaagagttcaccatctaccgcgtggcgcgccgctccaaccagcacgacaagactgtcgagaagtatgtcgcctgcctgcgcctgggcggctacgtcgaggcgatccgtggattcaagcgcggcgaagaagtcgttttccaactggtccgcgacaacggcgtcgaggcaccgaacctgaacgccgatggcaagccatcccagcagggctacaccaccgaggcggtctggcggacgttgcgcatcctcggtccagcgaccccggagcagatcgccgcatcggtggcggcctctggcacgaccgtgtcgcccagcaccgttcagcgctacttcatcgacctccaaaacgccggatacctgacccgcaatggccgctactacgccctcaaacccggccgctacaccggccctcggccgcccatcgtccagcgcgagacgcgccgccaggtctacgacccgaaccttgaccaggtcatgtggagttcgcacggcgagtaccagcacaaccggagtcgttcgcggggcgctgcccaggctggcgtggcggataccgaagagaacagcgaatcaggcggctga

SEQ ID NO: 340320 - DNA, 576 bp, Pseudomonas aeruginosa
atgcaaatgcatgcacagcaaggcggtagcgccgcgaaggctagcacaagccacctccacggcactacgaacatcgaggcgtacatccgcgacatggcgagccgtgggttcagtcgttgggccgtaagcagagccctgggaatgcactggcggaagttcaatgaactcctggaattcctgccagaagtggagtgggtgtcgcctcagcagtcatgggactgcctgcgcgccaaccaggagaagaaaggctgcaaacgcaccatgaccgcgggcttggaaaaggcggtcgccgcgatgatggccgggcgccgggagacatacccccgatataccgccttcggtgtgaccggcacgttgccagacctcgcggagcgtttcggcgttgtttctcaccaatcgattttgaagcgcctggcaaaggggatggcgattgaggatgcgctgacctctccccgcaacgatcccatcggtgggcgccggaacggggatagccatccctggaggcaggcggaacgcagcaactacctccgctggaacgaacgtcaagccaaggcaatgcaggagcaaaagcaatga

SEQ ID NO: 340321 - DNA, 771 bp, Pseudomonas aeruginosa
atgcgatttctgccccgcctgctgatgctggtatccctggccgctccgctggcccatgccgagctgctcgacgacgtccaccagcgcggcgccctgcgcatcgccctggagggcacctatccgccgttcaacttcaagcagggcggcaagctcaccggcttcgagaccgaactgggcgaactgctggccgccgagctggaggtcaagccggaattcgtcaccaccgaatggagcggcatcctcgccggcctgcagagcggcaagtacgacatcgcgctgaaccaggtctcggtgaacgagcagcggcgcaaggtcttcgacttcagcgagccgtacaccatctccagcgcccagttgatcgtgcgcgccgacgacacccgccagttcaggtcgctggaagacctcaagggcctcaagctcggcgtcggccagggcaccaactacgccgacctggcgaagtcggtggccggcgtcaacgtgcgcacctatccgggcgccccggaatacctgcaggacctggccagcaaacgcatcgacgcggcgctcaacgaccgcctgctgatccccttcgccatccgcgaggccaagctgccggtcaagcccggcgcggcggtgggaccggtggcgaacatggcgattccctaccggaagaacaatccgaagttcggcgaggcgctgaatgcggcgctggagaagatcaaggccgacggccgcttcgccaagctctcggaaaagtggttcggcctggacgtcagccagccgccgaagtga

SEQ ID NO: 340322 - DNA, 693 bp, Pseudomonas aeruginosa
atgaattcgctgcagaaattgctcgaatggctcgccaacctggtcgagctgctcgggatggcctggcccttcctgctccagggcgcgatgtataccgtgctgttcgccgcggtatcgatggtcctgggcctgatcctcggcttcagcgtcgcggtggtccgggtgaccaaggtgccggtggtctcgcagatcgccgcggtctacgtcagcgccttccgcgggacgccactgctggtgcagatcttcgtcctgtactacgggctgccgagcgtcggcatcgagttcaccccggtcaccgcgggcatcctggcgctgaccctgaatgtcgcggcctatctctcggagtccatgcgcggggcgatcctcggcatcgacaagggacaatgggaagccgggctctcggtcggcctgacctggggccagaccctgtggaacatcatcactccgcaggccctgcgcctggcggtgccgagcctgtcgaacagcctgatcagcctgatcaaggacacttcgctgatctccgtgatcaccgtgaccgagctgatgctggcgaccaaggaggtcatcgccgagaccttccagccgctgccgctctatctcgctgccgccgggatctactggctgctttcggcgctcttcgagcgtgtgcagaaagccctggagaaccgcctgaccgcgccgctgcggcgctga

SEQ ID NO: 340323 - DNA, 1545 bp, Pseudomonas aeruginosa; identical to SEQ ID NO: 23311

SEQ ID NO: 340324 - DNA, 2136 bp, Pseudomonas aeruginosa; identical to SEQ ID NO: 328233

SEQ ID NO: 340325 - DNA, 2730 bp, Pseudomonas aeruginosa
atgctggaccctattggaagtttttatcgcattcgggatttttttatttcatatgttgaaaccagctttcgaatttccgaccctctagcttctgaagcacggcgtgccctgctcaagaccagcggcatcctggccacagctccatttattgagccagtgcttcgctacgaatcttcggataaaaatcttgaggacctaattgaggaggcagatggcgtcctcaagccactgtcgctaaagggccgcaaggccttcgttgaactggctctgtctggtctgtttgatgggagctctgatgacggccctttactccggaagtcccaatacgcgccataccggcatcaggtctcgatgcttgaacgaggcattcgacctggccgccccggtattgtaacttccggcaccggctcaggaaaaacagagagttttatgcttccgatactggctgctctttctaatgaagcagtcgagtggcaaaaaccggaatccaaatatttgcaagaacactggtggaaaactccgaagtcccaatgggccccccggagagctggcgagaaacggccgagtgccgttagagcactcgtactctatcctatgaatgctcttgttgaagaccagatggttcgcttgcgcaagactctcgactcacaagatgcacatgaagtaatggatgctcgattcgctgggaatcgtcttttcttcggacaatatacgagcgctacccctgtaacaggctacgagcaacatcctcgcctcgcaggtgacaagcaggaagcgaagcgtcgagctcgacgcatctctagattgcgtaaggcgatgcaggatttcttctgcaaccagagcgcagcccgcaaatttgatgaaaattctgagcgtcagcaaggacgtattcgagagaccacgcgctacatcttcccatcgatagatgggggcgaaatggtttcgcgatgggatatgcaggcttcgccgccagacatactagttaccaacgcatccatgctgggagctatgctgtcgagagaaattgaagatgcgattttcgacaaaacccgtgaatggctcttatcagacaaagactcctatttctacctcgtcttcgacgagcttcatttagttcgcggctccgccggcactgagattgcctgcctaattaagtccctgattcagcggcttggccttgatcaaccggagcacgcgtacaaactacgtctacttgcatcttcggcctctcttcctttggaaggcgccgaaggtgttcagtcaaggacatacttacgtgatcttttcgcaccattcggcacaagcatcagcgaagacgatccaggttctaccgatccaagattttggaatgagtgcataatccagggtgtgccgcatatccctcccgcgagagcgggtggcattccttctgaaccattcgctcaattgatgatggctgcacttgaggggaaagatggatttgtcggcatactggatcggactcccgcattagaggctgctatatctaaggcagctgcagcgctgggtgttgtagcaacggcgcaagcctcgcttgagaagttgctagccgaagcggcagccggactactaacacatgcttgtaaaaacgatgacactatccgggctactacacccgaatcgattgctgctagggtatttgccccgggcagcgacgacactgagttggctctccgcggactgatgctggcccgagcgcttccagaggctaacgattcgcgggctagagttgcaggtgcaacgccagccttccgtgtccataccttcattcggaatatagaaggcctatttgcttccgtcaccccacgtcagcatagcgtgacctttagcgatttctctgtagaacggggaacttcgcattcatcccccgcaacgggtcaagcgcgaggccgccggctttttgagcttttatattgtgaagcatgtggggatttgtttgtcggtggccagcgaggccagagtagcggttcaactaatgctactgagctactgccgtcggcagcgaatctggagcacttacctgagcgcccaggagcagaatattacgatgacatgactttagatgagttcgcagttttctggccgcgacgtggtgactggatcggatcagataagggctatgatcaatggatgcccgcccatctcagtccggatacaggtgtagtggaactgggcgagactgcgaaggaaggaaatatagcaggttatctttattatcagacagaaacggcgattagcaaaggaaagaataagcctgttcagcaaccctctgcgcaaccgttttgctgcccaaaatgtggcaccgattactcaaaccggcctgatacaaatcgttcacgctcaccgatccgcgcatttcgtactggcgtgactaaatcttcgcagctagtggcaacggagcttttcgaactgctacatgctataggggccgagcctaaaggaattgtcttttctgatagtcgccaggatgcggctgggcaagctatggagattgagcggctgcatttgcgtgatctgcgtcgtgaaattctagttacaaccgcgagatcctacataaaagaagcatcgatagaagctctcagctcagctgaaataatcgagcttctgggtaaagctcatgctgcgagagataacaacgagatccgcaggttgtccggcctcttaactaaacagaccgaaaatgatgcatctagaactcaaaaggtaatgtag

SEQ ID NO: 340326 - DNA, 861 bp, Pseudomonas aeruginosa; identical to SEQ ID NO: 5314

SEQ ID NO: 340327 - DNA, 435 bp, Pseudomonas aeruginosa; identical to SEQ ID NO: 10324

SEQ ID NO: 340328 - DNA, 276 bp, Pseudomonas aeruginosa; identical to SEQ ID NO: 10326

SEQ ID NO: 340329 - DNA, 462 bp, Pseudomonas aeruginosa; identical to SEQ ID NO: 222821

SEQ ID NO: 340330 - DNA, 237 bp, Pseudomonas aeruginosa; identical to SEQ ID NO: 10330

SEQ ID NO: 340331 - DNA, 708 bp, Pseudomonas aeruginosa; identical to SEQ ID NO: 10331

SEQ ID NO: 340332 - DNA, 3642 bp, Pseudomonas aeruginosa; identical to SEQ ID NO: 328321

SEQ ID NO: 340333 - DNA, 405 bp, Pseudomonas aeruginosa
gtggtcgccgacgaggtgcgcaacctggcccatcgcgcccaggagtcggcccagcagatccagaagatgatcgaagagctgcaagtcggcgcccgcgaggcggtggccaccatgaccgaaagccagcgttacagcctggagagcgtggagatcgccaaccgtgccggcgaacgcctgggcagcgtgaccagccggatcggcgagatcgacagcatgaaccagtcggtggccaccgccaccgaggaacagaccgcggtggtcgactcgctgaacatggacatcaccgagatcaacaccctcaaccaggaaggcgtggagaacctccaggccaccctgcgcgcctgcggcgagctggaagcccaggccgggcgcctgcggcacctggtggacagcttcaagatctga

SEQ ID NO: 340334 - DNA, 1398 bp, Pseudomonas aeruginosa
gtgagccgagagctgtacagcgaagaggctgagttcggcgtgctcggcgctatcttgcagtccgcgctccagcagaatcaggcgctggttgacgaggccttgtccagcgtgaccgctgccgatttctacttcgaggataacgccgcgctgttccaggcgatcaaggattgctacgaggaagggattcccgtcgatccggtgaccgtgggagtggtccgcgatgtgctgcccagcggcgcgaagctcattccctatgccgggaacattgcccgcaatgtgccttcggtggcgaactggaggacgtacgtccggcacgtccgggagcgggccatcctgcgttgcttgatcgacacggccgagtcggtgaaggcctccgccacggatgaccgaccgttgcctgagatcatcgccagagcgcagcaggcgatggcggacctgcgcgacctcgatgacgaggcgccgaagtacaagcggctcgacgaggtgatgctcaaggctgtcgacgttatcgacgacaagttcaacggccgcgcgcctcagtggcccggcactggcctggccgatctcgacaagctggtgcgcggcatccgccctcggaaactcaccgttatcgccggccttcccggcagtggcaagaccacacttgccctgcaaatcgcccagtacaacgcctgcgaggcgggggagccgtggctggtgttctccctggaaatgcccgaggaggagttgggcgtgcgctcaatcgcctcgctgggcggagtggacctgaagcgcctggacgatccgcagcagttgggtgacgacgactggccgcgcatcacatctgcggtggccaaggccaagggggcgcccttgttcatctgcgacgatcccaacgtgaccgccagccagatccgcagcaccgcgcggtgtgtcaagcgtgagcacggcctggccggcatcgtcgtcgactatctgggcctgattccaccagaggcgaaagggcgcacgcgcagcgaggaagtgggcaagaccaacaagtcgctgttgcgcctggccaaggagctcggcgttccagtcatcgagctggcgcagctcaaccgcgactcgaccaagcgccccggtaagcgcccgcagtcgagcgacctgcgcgactcgggggagatcgaggccgacgccagttgcatcctgatggtccaccgggacatggatagcgaggccggccagaacggcatcaccgagatcctgatgaccaagtgccgacacgcgccgccgggcatgtgcctgctccagcagcagggcatgtacggacgattcgtcaacttcgccggcccacgcgagatgagccaagaggaggtcgagatggggcgtagctacttcgccaacaaacacggcaagaaaaaggggaaggccgcatga

SEQ ID NO: 340335 - DNA, 816 bp, Pseudomonas aeruginosa
atggcagagcaaatttttaacttctggcgaaaacccaaccgcaagagcgaagaaagcccttctcttcgctgcccggttcacggtgactaccactcgatccaggtggagcagtttgatggtagctacttgacctggtcttgctctcggtgtgtttgggatggggtgaatcgcgagccggggagcgaggagttttcggtggccctggcggagaaaacccaacgcaagatcaacgagttgctggttggttctggcatccccgctcgctaccgggccagcactttcgagacttaccgcaccgacggcaaggcggagaaggcggcggtgctggaagcatgccgggagtatgccgagcgattcgtggagaacttccaggacggccgctgcctcttgctcctgggcaaccttgggacgggcaagacccatctcgcgtgctcaatcgtccagtacgtcgtacggaaccttcaggcccaagcagtgatcacctcggcgtcggagataatccgtgtggctaagggggcgatgaaccgggcggcgaagtacaccgaacgggacgctctcgaagagctggcgggctttgacctgttggtgatcgacgagctcggcgcgcagagcggtaccgagtacgaattggggctgctccacgaggtgattgaccgccggtatcgggagatgcggcctacggtggtggtttcgaacatgagcgcgcaggaggtcgccaagtacatcggtgatcgtgcggtggatcgtctccgcgagaacggcggcaaggctgttggtttcacctggggctccgctcgccgggaggttctggagtga

SEQ ID NO: 340336 - DNA, 528 bp, Pseudomonas aeruginosa
atgagtgagattgatcttgatgaggccggcctgcgtgatctggtgatggtcaatgacggccaggttgtaacgacctcgctgaaggtggctgagcgtttcggaaagcggcacgacaacgtgatcaaggcgatccgcggcctcgattgctcgccagaatttcatgccctcaattttgaggagatgatcgtggatgtcgatatcggcaaaggtgccaggcggaaatctccagcgttccgcataaccagagatggctttgcgttcttgtgcatgggcttcaccggcaaggaggcggccaaatggaaagaggcttacatccgtgccttcaactggatggcagagcaactgttcaagcgctcgatggacttcgccaccctgcgtaacgagctgatggcggagtaccgacaagagaaaggaattgccagcctggccggcaagaccctgcgtcgatggcagatcaaggcacccgtcatcgaacagaagatcatcgaggtcgagcgcgaagggcagttgcagctgtttcacgcctga

SEQ ID NO: 340337 - DNA, 531 bp, Pseudomonas aeruginosa
atgagtgaaattgatcttgatgaggccagcctgcgtgacctggtaatggtcaatgacggccaggtcgtaacgacatcgctgaaggtggccgaacgcttcggaaagcggcacgacaacgtccttcgggctatcgacaacttggattgctcggctggtttccgtctcctcaattttgaggagacggtcatgtggcgggaaaatccgagcggcggagaaccgatcaagagtcgaagcttcgacatgaccaaggacggcttcatgttccttgtgatgggctttaggggtaaagccgcagctgcctggaaagaagctttcatccatgccttcaactggatggccgagcagttgttcaaacgctcaatggacttcaacaccatgcgcaacgagctgatggcggagtaccgacaggagcgagggattgccagcctggctggcaaaaccttgcgtcgatggcagatcagggcaccggtcatcgaacagaagatcatcgagatcgagcgcgaagggcagttgcagctgtttcacgcctga

SEQ ID NO: 340338 - DNA, 252 bp, Pseudomonas aeruginosa
atgatcaccggccacgacaactacgccgaagctgcccgcgcactggcgctgccgcttgtggcgcaaccggagctgctggagcaacggacctgggcagccatcgccgcggcatggtggtggaagtcgaggagtttaaacgaactggccgatcagggccgtttcgagaagatcaccctccgcataaacggatcgtttaccggggccgaggatcgcaaggcccggctcgaatgggcgcgcgccgcccttaactga

SEQ ID NO: 340339 - DNA, 303 bp, Pseudomonas aeruginosa
atgatcgttacgttgtcgccgtatgtcgcgctgcccggcagcgatgaacgcttgatgctgagcagagttggcgatgtactcaccgtgaacggccagccgttcgatttcacaccgctcccggagggcggcgagttgccggccgaggctatcgggtcggaatggttcgctggccccgtcgttcgccgtgaggggcgtctagagttcagtctgcggttcccgctggccgacggcgccagcgctaccgctcgcttccctgaaccgctgctggtcgaggccgatggcccggtggagttgccacaatga

SEQ ID NO: 340340 - DNA, 705 bp, Pseudomonas aeruginosa; identical to SEQ ID NO: 8686

SEQ ID NO: 340341 - DNA, 309 bp, Pseudomonas aeruginosa
atggagagcatcaccgctatccggcagcggatagggaagcagtacggccttccgcccagggtgatcgacgcggtggtgcgcgacatgccgcacagcccgcgccccttcgccatggtgcgcagcaagcacgaggaactgaacgcgcgcccctacgcggtctgggcaaaggccgagatcagcaggctgttcgagcgcttcgtgcgcggctgcaccttcgtgacccaacaccgagccacgcacccggatttcggcgccggccgggagcgcttccagatgcgcggccccccttcgcaggagatcggcgaatga

SEQ ID NO: 340342 - DNA, 240 bp, Pseudomonas aeruginosa
atgttcatcaacaacgcgatgattcaggacggttcgattacgaacgcgaagatcggcaacgtgattcagtcgaccgcactcggtgccaacggcgagccgctgtggaagcttgataaagcagggagtttgacgatgaacagcgcaacgtccggaggcttcatgaggcagacagcggaggccgttaaagtctacgacgcgaacctggtgttacgggtacagatcgggaatctcgacgcatga

SEQ ID NO: 340343 - DNA, 435 bp, Pseudomonas aeruginosa
atgttcaccatcgacacaatgtcttccgaagttatcaatagccttcctgatatagtgaaggacgtgattgaaaagtttggctcagacaaggcaggcaacctagtaagtaagcttggcggcagaacttactgggtagccgaaggcaggacccccaaggcgcgagaaagacgaaaacagctcgccgaaatgataggagaagatgttgaggggtttatcaataaacgctatcaggggaaagaaatttacattcccagaatgaagaggatagagacgcttgccagacatagacggatcaacgtgaaagctgaagagttgttaggcgaaggaaagccaataagagctgtcgttacccagttggcgaatgagtttgccatgagcgagcgaagcctctggaatatcctcaagcagcatggttcggtcagcgagggcgcttga

SEQ ID NO: 340344 - DNA, 1680 bp, Pseudomonas aeruginosa; identical to SEQ ID NO: 10332

SEQ ID NO: 340345 - DNA, 993 bp, Pseudomonas aeruginosa; identical to SEQ ID NO: 96021

SEQ ID NO: 340346 - DNA, 753 bp, Pseudomonas aeruginosa
atggatgtactgctcttcgaatccctgggcatcggcgccgttctcggcctgctgctcggcctcaccggcgccggcggctcgctggtcgccctgcccctgctgctcagcctgcacctgccgctgcgcgacgccatcggcgtgagcctcggcgcggtcgccctgtcggcgctgatcggcgccatcccgcgcgcgcgccagggccaggtggcctggcggccggtgctggtcctggcgctggccggcctgccgagcaacgccgtcggccaatggctcggccgcttcgtcccggaaggcgtgctgatcgtcgccttctgcctgctggtgctctggtcggcctggcgcatgtggcgcggcgccgggatgaaacgcgaggccagcgaccaggcacggagcctgccgctgctcggcatcggcctggcggtcggcttgctgtcgggattgatgggcgtgggcggcggtttcctggtggtgccggggctgctctggttcaccccgctgtcgatgatggccgccaccgccacctcgatggcggtgatcgcgctggtctccggcggcggcttcctgatctacctgaccggcgcccacccgccgctgccgctgctcggcggcctcgccgccggcggcgcggtcggcgtgctcggcggcaacctgctggcgcagcgcctcggcggcccgaccctgcaacgcctgttcgcgctgatgctggtggcggtgagcttctccctggcggcgcagaagctctacggcgggtag

SEQ ID NO: 340347 - DNA, 624 bp, Pseudomonas aeruginosa
atgaaagcgcccgctggcctcggtattgctgctaatcttctctccaccctcgatctgcccggtcagctccagatagttcttgatgttgtcctgaaaattgtccggatacacaaaatccttgccggtgttgtacggcgggtcgatatagatcagcttgaccttgctggcatagcttttttgcagcagcttgagcacttcaaggttgtcgccctcgatcatcaggttctgggtggtatcccagtccacgctgtcttccgggcaggggcgcagggtgcccgtgctgggcgtgagcgccaattgccgggcgcggcgcttgccatgccagttgaggccgtatttctcgtcggcatcggtgacggtggcatcgcccaccagcgccttgagtacgtccacattcacggccacgccgcccgcgccctcggtgatcagctccgggaacagcgctttgagctgttcgatatttcccgccaccagatcggcggattgggcttctgggctggtggtatcgatttttttaatggtcatggtgagactctcctcaaactcggtattctttggcatcaggcatcctgcaggtcgcccatctggcgatcaaaagactggcgaatcaggcccatgacgtag

SEQ ID NO: 340348 - DNA, 768 bp, Pseudomonas aeruginosa
atggctgatcgcagtgccgagccgtggtatgccacggcggcctatctctacgttctgcatctggatggcccggcgctggcctgggagtacctgcgccgccatcccgactaccggcgcgactggctgcgccgttgtcgccaacctgatgcggtcgagcgctgggggctgcgcctgctggaagatcccgccctggatgcgcgggacgcgcacccggcctggttccccgatcacgataccgtggtgcagctctacccggatgccgacccgccgcctgatgccctgtgctttgagttctggaagctgccgggacacaaacacctgatccatgacggcaagcgcttgatgctggtggcgcgctggcccggctgctgcctgcgcttcgtgctcgcgcccggcctggccgacggcatggcttactcctatgccatccgggtctgcgctgtaccgtgtgctcgataccacgcacttgccgtcgagttggacaggctagccgctgcggcggatgcagctcctgccgccactgcgcggccccggccttcgctaagccagcttcaggaagtgcataccttgcaggcgttggacgcgaccctggcgggcgcgtccttgcgtgaggtggccgaagggctttttggcgtggatgccgtcgtggccgactggcacaaggacagcgctgtgcgcgctcgtgtacgtcggctggtgcggcgtggcgaggcgctgatgcgcggtggctatcgcagcctggcgcagcttccgccggttgcatcgtag

SEQ ID NO: 340349 - DNA, 156 bp, Pseudomonas aeruginosa
atgcagaaactgatcgtcgcgctgttcgggctgctgctcgccgcctgttcgtccagcccgccggaaaccccgccgacccgggtggtgatccaccgaacctcaacccgtccgccgccggccaggcggcgccgctgcgcctgcggctgtacgagctga

SEQ ID NO: 340350 - DNA, 300 bp, Pseudomonas aeruginosa; identical to SEQ ID NO: 328192

SEQ ID NO: 340351 - DNA, 378 bp, Pseudomonas aeruginosa
atgaacattcccggactcactaccgccaaacgggccagcggcgccatcgccgcccgccgtatcgtgatccatggcagctcggacggcctggctgcccaggctgccggcagcactgcgctgctgatcggcgtcagcaccgacattcccgccgccgacggcgcgcccctcgacgttatccgctccggcctggccctggtggagtacggcggcgctgttgccctgggcgcaccgctgacggccgacgccgagggacgcgccatcgccgccacgctgccacccaccgccaccacctacatcatcggcttcgctgaactcagtggcgtggcgggtgacatcggttccgtccacatcgccccggccgttctgccggtcgcctga

SEQ ID NO: 340352 - DNA, 1248 bp, Pseudomonas aeruginosa; identical to SEQ ID NO: 331448

SEQ ID NO: 340353 - DNA, 282 bp, Pseudomonas aeruginosa
gtgcctgacatgagagaagagtttgaagcgtgggctaccaagcaccgtatgccgattcatcgcgacggtgttgtcaccgactatgcagccagatgcacagatgaatgctggcaagcctggaaagccagccgcgcggctctgagggtggagctgccggagcgtcgcgatccgttgaactggaccggagacgatgagaacccaagatctgccggcttcaacgactgccttgagcgagtgaccgaagccctccagcaagccggaatcgaggtgaagcatggctga

SEQ ID NO: 340354 - DNA, 714 bp, Pseudomonas aeruginosa
atgcatgatgagagagagggatatctcgagattttgtcaagaataacaaccgaggaagagttcttctccctggttctcgagatatgcggtaattatggattcgaattcttttcattcggtgcgcgggcgcctttcccgctgaccgcgcctaaatatcatttcttgtccaattacccaggggaatggaaaagcagatatatctccgaagactacacatccatcgacccgatcgtgcgccatggtctcctggaatacaccccgctgatctggaatggcgaagacttccaggagaaccgtttcttctgggaggaagcgctgcatcacggcatccgtcacggctggtcgatcccggtccgcggcaagtacgggctgatcagcatgctgtccctggtgcgttccagcgagagcatcgccgctacggaaatcctggagaaggaatccttcctgctctggatcaccagcatgctgcaggctaccttcggcgacctgctggcgccgcgcatcgttccggaaagcaatgtgcgcctgaccgccagggaaaccgagatgctcaagtggaccgcggtgggcaagacctacggcgagatcggcctgatcctgtcgatcgaccagcgcacggtgaaattccatatcgtcaatgcgatgcgcaagctcaactccagcaacaaggcggaggccaccatgaaggcctacgccatcggcctgctcaactga

SEQ ID NO: 340355 - DNA, 768 bp, Pseudomonas aeruginosa
atgatttattacttgatcggagtggcgctattcatcttcatgctggaacagttggttcccggctggaaattgcccaaggtgagcacctgggtggcccgggtgatcttcctcaacatcgtccaggtgtcgatcgccctgctcgccggcatcacctggaacaaatggatgatggggcacagcctgctgcacacctcggatgccctgccaccactgctggccggcttcgccgcctacttcgtcaacaccttcgtcacctactggtggcatcgcgcgcgccacgccaacgacacgctctggcggctgttccaccagttgcaccacgcgccgcaacgcatcgaggtattcacctccttctacaagcatccgaccgagatggtcttcaactcgctgctgggcagcttcgtcgcctacgtggtgatgggcatcagcatcgaggccggcgcctactacatcatgttcgctgcgctcggcgagatgttctaccactcgaacctgcgcaccccgcacgtcctcggctacctgttccagcgcccggagatgcaccgcatccaccaccagcgcgaccgtcacgagtgcaactacagcgacttcccgatctgggacatgttgttcggcacctacgagaacccccgccgcatcgacgagccgcagggcttcgccggcgacaaggagcagcagttcgtcgacatgctgctgttccgcgacgtgcacagcctccccggaaaaacccagcccgctcccgtcctggtcaagcccgacgtcaggtga

SEQ ID NO: 340356 - DNA, 1275 bp, Pseudomonas aeruginosa
atgcaagatgaactgttcaagacccgatactccaagtacggatacggcatcgacgtgcgccgtacctacaaggacctgccctgccagccgttctggacctgggtcaccggcaagtcgctgaacgaccgcccgccgcggcgaccgaaagacaccctgctcaagccctggcagctctacctgcacatcagctggggctacgcggtgttcttcctcgcggtgatctacggccagcaactgctcgcctcgcagaagccgctgtggctgaagtgcctgctgggcgcgctgatcatgtgcctggtggtcaaccgccagcgcggcttcctccataccttccactacaccacccatggcgccagcctggagaacaaggcgctggcccgcttcacctgcaagtggatcctgtcgatcccgatcctgcacaccccgcgcgacgagtacgtgaagctgcacgtgaacgaacaccacagcgtgcgcaccttcaataccgagcacgacgtcgacctggtcttcatgaagcagcacggcttctacaagggcatgtccgagagcgccttctggacccgcctggtgctcgcgcccttccatccggcgcggatcctcgagcacctgaaattccgcttcgacgtcagcttcgtctccgccccgcgccacgagcgcgtcagccgggcgctctactgggccgcgctgctcggcctggtgtacgccagcggctacctggaggcgttcgcgctgttctacctgttcccgatcttcatcctcacccagtactcgtcgtggatccagcacgtctccgagcacctctggttcgcccgcaacgagcacggcctgccgcgcttcctgcactacggctcgctgagctggggacgcttcctcggccgcccctacccggccgacaagcagggcctggccttcgccctggcgttcgttcgctggagcctgggcgtgctgctgatcgacatcccgctgcgggtgttctccttcatgcaggacctgcccagccacgacttccaccaccgcaagccgggggtgaacttctggcgcatcgcgccggagcgcgcggccaacgaggcgcgcccctcgaagttcggcccgatgaccgagacctggggcatgtgggagaacttcctgatcctgcgcgaccacctctgccgcggccagtcggacccgttcggaatcgtcgactggtaccgcgagaaccatgcccggctcgctccggagaccgatgccgccaaccagccccacaccaaccaacccgcatcccaggctaccgcctga

SEQ ID NO: 340357 - DNA, 624 bp, Pseudomonas aeruginosa
atgaatactcagattgcccagatcacccagagcctggcagccaacggctgcgcctatatcacccccagcgacgcgctctacgacgagcaggactgggaactgatgaaccaggtcctggccaactcgaccctgccgtgggagaagatcctgatcggcgacgccgacgaggagaacgacctctacgtggcccgtttcatgaccgaccgcgaccgtcccacggtggtcaaccatgcgctgtcggagctgatcatcccgcgcgtctgcaacgacaacgtgatgagcctgttccgcaagctgatgggcgacgacgccttctacgtccggcgcatgcaggtgaaccggatgaaggccggctcgttcatcggccggcacctggataccgacagcaacccggactaccagtactccatcgtcctgcagctcggcacctacttctccggcggccagttcgtggtctacgaccgcgacggcaacctgcgcaacgacatcaagccggagccgcgctcggtgatcatcagcgattgcagctatccccacgaggtccagcgggtgaccgccggcgagcgcgtctcgctggtgttcttcgtcagtcgccatgcggaccggaaccggcgggtctattga

SEQ ID NO: 340358 - DNA, 285 bp, Pseudomonas aeruginosa
atggcggtaacgtcctccgtagtcttctcgctggtattgactgtatgtccaagcgatacctccgggatttgccacgtcacggaactggcccgtctcttcactggggagagttcttgccagctactacataacgagcttgagggaaagcttctccgctctttcgagtctgaggggctcgcccgtctccagtgtgtgaaggctgcgagtcaggctcccggtacgaaggcaacggtcttccgctctgatctcggtatcccgtcttacaagaagggggttcagccatga

SEQ ID NO: 340359 - DNA, 333 bp, Pseudomonas aeruginosa
atggccacggccctgatacatcgccccgagattctctttctcgacgagcctacaagtggcatcgacccactcgctcgtcgcgctttctggcggcgcatcacgacgcttgctgccgaaggcaccaccatcatcgtgacgacgcacttcatggaggaagctgagtattgcgaccgcatcgtcatccaggatgccgggcgcttgctggcgattggaacacctcacgaagttcgcagccaggcttctggtgcggcgaacatgaatgaggcgttcctggagattatcaagaaggcgcgcgaaagcaggcagaccggcttcaatgcggtggaggcctga

SEQ ID NO: 340360 - DNA, 255 bp, Pseudomonas aeruginosa; identical to SEQ ID NO: 327978

SEQ ID NO: 340361 - DNA, 726 bp, Pseudomonas aeruginosa; identical to SEQ ID NO: 327979

SEQ ID NO: 340362 - DNA, 474 bp, Pseudomonas aeruginosa
atggctgacggcgttgagttcagcatcaccgggcttgaaggcgtgctcgagaaactcagaactcttggcccgcgcctccaaaagaacggcctgagaaaagcagcccgcagggcgatgaacattgtcagggatgccgcacgagaaaaggcgcgacttgtcgatgaccccgaaacaccagagaaaatctggaagaacatcatcactcaagagtccgccaagcaggggcggcgtgaagggggggtggtgatgaaggttggagtgcgcggcggcgctggtcgaaaccagtacagcaaggatgcaagcggaaatcctggtggcgacaccaggcactggcgctatctggagttcggcaccaagtactcgccggcgaagccattcatgcggcctgctctgtctcaaaacattgagcccgttactgaaaaattcatatccgagcttgatggcgaaatagacaaggctctaagggggaggtga

SEQ ID NO: 340363 - DNA, 1224 bp, Pseudomonas aeruginosa
atgcagcgcctccaagccttcaaatacgaactgatgccgaccggcgaacagcagcgccagatgcgccgcttcgccggttcatgccggttcgtgttcaacaaggcgttggcattgcagaaggagcgctacgagcaaagcgaaaagaagctcggctatgctgggctgtgcaagcggctcacggaatggcggcatgatcctgagacggcctggctcaaggatgcacccacgcatcctctgcaacaggtgctcaaggatctggagcgggcgtacagcaattttttcgccaaacgggccgacttcccgcgcttcaagaagaaggcgcagtccgacagctttcgttacccagacccgaagcaggtcaagctcgaccaagccaaaagccggatatttctgccaaaactcggctggctgcgttatcgcaacagccgggacgtgctgggagagttgcgcaacgtcacggtcagcctgagcagcggcaaatggttcgtgtcgatccagacggcccgcgagatcgagcagcccgtaccgcaggctactagcagcgtcgggatagacatgggtatagcccgcttcgccacactttcggatggcacgttctacgccccactcaacagcttcaagcgacacgaaatcgcctttcgcaaggcgcaacagtcgatgagccgcaaaaccaaattcagtaacaactggaagaaggccaagacccgcgtccagaaagtccattcccgcatcggcaatgcccgccgcgactacctgcacaagaccacgaccacgatcagccaaaaccacgcgatggtgtgtatcgaggacttgcaggtacgcaacatgagcaagtcggcggcaggcacgaccgagcaatcgggaagaaacgtccgcgccaaatccgggctgaacagagccatcctcgaccaaggctggttcgagttccgccgccaactaaactacaagctggcgtggaacggaggctggctcatcgccgtgccaccgcgaaacaccagtcgcacctgcccgagctgtgggcatgtgtctgcggacaaccgccgcacccaggcgcagttctgctgcgtggaatgcggtttcgaggaaaacgccgatgtggtcggcgcgatcaatattctaagggcggggcacgcccggttcgcctgtgaagtgagcggtgcggtaatgccgccagcagcaggaacccaccgaagcgactctggggtggctcaatgccacgcctga

SEQ ID NO: 340364 - DNA, 483 bp, Pseudomonas aeruginosa
atgcagggccagaccggaatcgcgaagaaggtctacgagtgcgtaccgatctctgagccctggcgttcgttccaggtgctcaccgcgctccgcaacatgactggaagcacgccggacgttcggattgtccagggctgcctgcgcgatctggtcgattccggattgatccgccgcactggtactgaccactaccaacgaatccaagtcgagaaaaagaccaagcctcaggagccgaagatgagcgagcccgcgaagaagatcgaaacccagcccgagccgaagcgctctgcctccccgctggagatgttgggcgaactggcaaacgatctcgccggcatggccgagcacatgaagcgcctgtctgatcgcatcgaggacgtcgctctggcagtcgagcaggaacgcgaatcgaacgctaagtcgatggaaagctatcgccagctcaaggcactgctgaagagcctgcaaggggagggcgagtga

SEQ ID NO: 340365 - DNA, 924 bp, Pseudomonas aeruginosa
atggtgtgctctcgctggagtcctgcacacacattagcactgctgttattgatttttcaagcaaaacagcagcagtgctgtttgcataaatatcagctctgctacttaatcactcggatgaaaaagcccgtaagaacccctctgtcacaatcccagttggacgacgccaagcgcctccaggctatctacaagaagcgagtcaaggaatcgcgtgagcgcggtgaaaatccaatactgaaccaggccgaattgggtgagaaatgtggctggaagtccgggcaaagcaccgttagccagtacatgactggacgcgttgcgcttaaccttgaggctcttgtcaagctggccgagcatcttcagtttgagccgtcagaggtgagcccaacgctggcttctggaatcagacgcgccggtcgtccagatggagtcaaggcgcctgatcgcgaagccgccaatgcgccattcccggatcgtcttgatgctgccgacctgagtgaggagcgatacgccttcgtgcctcagtacgatgccaaggcagcagccgggttaggaagtgagaacccgcatgttgagattcgagctaccttggcttttaagcgggaatggctcaaggcgaagggtgtcagcccaaagagcctggccgtgatttatgcggatggcgagagcatggagcccaccataaacgatggagatgtgctcctcgttgatttatctaagattgagcctgaagaccatcaggtcttcgtgctcgccggatctgagggcgccatcgtcaagagactggtttcatcccctttaggtcgctggataatccgaagtgataacgaagacaaggccgagcttccagaccgtaacctgtcgcgcgaagacaacgacgagcaccgcatcataggcaaggtcatctggaggggtggggatttgtaa

SEQ ID NO: 340366 - DNA, 486 bp, Pseudomonas aeruginosa
atgagcgcggccatccgaggcaagaccgccatcgtcggcatcggtagcgccggcgtcggcgaggcgccgggctacagcgccatcgaactgctcggccaggcgtcgctcaaggccattgccgatgccggcctgaagctttccgacatcgacgcgatcttcgccgccaccagctcccatgcctttcccaccttgtcggtcgccgaatacctcggcatccgcccgaaattcgtggatggcaccaatatcggcggctccagtttcgagctgcacctgctgcaggccactttggcactggaggccggtctctgcgacgctgcgctgatctgctacggctccaaccagcgaaccgccggcggccgcctggtatcgatgagcgagccacaatggcacgagacgccctacaagccgcgccacccgatcaccgcctatgcccttgtagtgtggtggcagttttggcgcggatttggaaaatcaatgacgcggtag

SEQ ID NO: 340367 - DNA, 801 bp, Pseudomonas aeruginosa; identical to SEQ ID NO: 329332

SEQ ID NO: 340368 - DNA, 1269 bp, Pseudomonas aeruginosa
atggattttgagttggataaagagacaacaggcgcatggattgttcatcactctagaaaaatagtttccgacaccgctgctccagcagagtactcggttctagatgaggctgggaaggctgctgaattgctgatgcggctaggggaaaccaacgaagttaccctagcagggcaagaagtagcagcaattgccaaatctgccaatctgaacccaagaacggagctgcctcactatattcagttgctcaaagagcggcgattgattgataccgctggcgacgagatacaggtgctgggtgtcacgacgcgaagcgttttatcacacgcagctgatatttttaaggatgcacagcctgctagtcacgagcgcgcggcaattgcactcggcgaggtggcctcgcgtgccccggtgccacttggcgatgcaaaagaatatatcggcgactcgttcaaaatgaagtctgctgatgttgatgattttttacgtcgatcaacagaaataggctttgtagatcaggagggtgatgacccttccagtacacttttatttaacggcaatcttttcaaaaaagactcagtcacaaaaaccgcacgagtgctatcttcactttcatcgcaagagcaacaatcattttcagatataaaagatcaattaaataaatcggggtgtctctatgctaataactgcgagaaaattctaggtcacgcccttttcgaaaagctcagagctgcaggagttctagaggtcaacacggtttccaatgagagtggggatcatgcattcgttactttgccaggagcttttcataagttcgtcaatccgctggtagacgataccttcgacatggcaaaagctttggtctcggctttatcatatggcatgcagcttcgctcatcatcgcaaggtcggattcaaagctttgattggattcttaatgccctaattggcggaagaacaattggtccagctactgcaattggttccgattaccgcgttttagagcagaatcgcgttattcggttaacgccagcaagggccggcatgttcagcatgaagctcttaaagagagaggttggcgaacttgcgctccaagtattgcgacagggcaatgcaaatgctgaagcaatcaatgttccaccaagcgcgcccatgagtggatatcgagggcctgaatatgcccgcgagaagacgagaaaaaaacagtcgcaacctagcaagcgacacactcacgacatcctgagcgcacttcgatccagaaggagcatttaa

SEQ ID NO: 340369 - DNA, 1140 bp, Pseudomonas aeruginosa
atggcaaaaactggagaaaaaggctatcttctggaagaacttctgcgagcttacttccttcgtgcaggtatgtatgcggtacgcggtgttcctttgcagttcgatggtgatgacctgacagatgttgatatatggctatatgagcgaccaacaggatcgtctcgacgacgtcaaatagtagatgccaaatcaaagttgaagcctaaagcgattgagcgcttgctttggaccaaaggattatccgagttattaaatgtggatggcgcctatgtggccaccacagataatagatcggctatcaaggaaatctcatcgcgcctcggtgtttatgttctggatggggctgatctgaagcgcataaccgaaagcggcaaagttcttttccctgacaggattagcgaagaagatttaaataaagacataaaggatgtcgataaaggacgccgaaataaagatcttcaggtgaactaccaggatttaaaggcaggcctgattgatggctttggttcaggtgccataaatagatccatagagcattttattggtttctctcgaattcttgggtcgagccacccaaatagtgattcagcaagaatagcgctgcgcttggcatatattgcggcctccattgtggctgtaacgctagattttagcttggcgaaagtttcttttaagtcaattgaagagcggcgcaagacagttctaaatataattcgatatggtgtggaggatgaggtgactggcatggaaaaggtgcgtgttgctgctgctcttgtcgagcgatacgtgccgaatggtcgggctgtatcacaatccatgatgaatgccgttaatgaagatcttcagcgcgttcctgccgaagtagtagccgaccatgtattaattcagctcaaaggggatgctctattcagtttggctcgctcactggagtttgagggattcagggatgtgccaaaagggtttgaccagctatccattgaagaaaaatcatttcttggtgtactaatggactttggcgcgattgagcgatcgacattcgccgggggatgggatggaaccctccctgaagacaacacgcctgaaagatccgaatcttccaatagcaaagacaatggaaatatcaagcaactttttgattga

SEQ ID NO: 340370 - DNA, 840 bp, Pseudomonas aeruginosa; identical to SEQ ID NO: 6027

SEQ ID NO: 340371 - DNA, 555 bp, Pseudomonas aeruginosa
atgcagacattgcaaaatcacttcctgctcgccatgccgagcctcacggacgcctatttccagcgctccctggtctacctgtgcgagcacagcagcgaaggcgccatgggcctggtggtcaacattccggtcgacatgtccctggacaccatgctgaccaagctcaagctgagcccccccgatacggccgagatgaagcagccggtgctgcagggcggcccggtgcacggggatcgcggcttcgtgctgcacagcttccgcccgggcttcaactccaccttgcaggtgagcgacgagatgatggtcaccacctccaaggacatcctcgagaccctgggcaccgaccaagccccggaccactggctggtggccctcggctacgccggctggagcgcagggcagctggagcaggagctggcggatggcgcctggctggtgatcccgcccaatcccaaactggtcttcgacacccccatccacctgcgctggcaacaggccgccgcgagcataggcgtcaatcccctgcatctctccagccaggtggggcatagctga

SEQ ID NO: 340372 - DNA, 423 bp, Pseudomonas aeruginosa
atgtcatcacgcagcatcatgggctttgattacggcaccaagagcataggtgtcgccatcggccaggagatcaccggcagcgcccgcccccttcgttccctcaaggccaacgacggcatccccaactgggacgagatagagaaattgctcaaggagtggcagccggacctgctggtggtgggattgccgctgaacatggacggcacggatcaggagatcacggtgcgggcccgcaagtttggcaaccgcctgcacggccgcttcggcaagccagtggaattcaaggacgaacggctcaccaccacggacgcacgcgcccgcctgttcgagcgtggcggctacaaggccctggacaagggcagcgtggatggcgtctccgcccagctcatcgtcgaggcctggatggaagagcagtacgactag

SEQ ID NO: 340373 - DNA, 1149 bp, Pseudomonas aeruginosa
atgcaacaacgacaatccatcctgtggggggccgtggccaccctgatgtgggccggtctggcccatgcaggtgaggcttcaccggtcgatcccctgcgccccgtggtggatgccagcatccagccgctgctcaaggagcacaggatcccgggcatggcggtggccgtgctcaaggatggcaaggcccactatttcaattacggggtggccaaccgggagagcggggccagcgtcagcgagcagaccctgttcgagataggatccgtgagcaagaccctgactgcgaccctgggggcctatgcggtggtcaagggagcgatgcagctggatgacaaggcgagccggcacgcgccctggctcaagggatccgtctttgacagcatcaccatgggggagcttgccacctacagcgccggaggcctgccactgcaattccccgaggaggtggattcatccgagaagatgcgcgcctactaccgccagtgggcccctgtctattcgccgggctcccatcgccagtactccaaccccagcatagggctgttcggccacctggcggcgagcagcctgaagcagccatttgcccagttgatggagcagaccctgctgcccgggctcggcatgcaccacacctatgtcaatgtgccgaagcaggccatggcgagttatgcctatggctattcgaaagaggacaagcccatccgggtcaaccctggcatgctggcggacgaggcctacggcatcaagaccagctcggcggatctgctcgccttcgtgaaggccaacatcggcggggttgatgacaaggcgttgcagcaggccatctccctgacccacaaagggcattactcggtaggcgggatgacccaggggctgggttgggagagttacgcctatcccgtcaccgagcagacattgctggcgggcaattcggccaaggtgatcctcgaagccaatccgacggcggctccccgggagtcggggagccaggtgctcttcaacaagaccggctcgagcaatggctttggcgcctatgtggccttcgtgccggccagggggatcggcatcgtcatgctggccaatcgcaactatcccatcccggccagggtgaaggcggcccacgccatcctggcgcagttggccggttga

SEQ ID NO: 340374 - DNA, 1542 bp, Pseudomonas aeruginosa; identical to SEQ ID NO: 30088

SEQ ID NO: 340375 - DNA, 840 bp, Pseudomonas aeruginosa
atggtgacggtgttcggcattctgaatctcaccgaggactccttcttcgatgagagccggcggctagaccccgccggcgctgtcaccgcggcgatcgaaatgctgcgagtcggatcagacgtcgtggatgtcggaccggccgccagccatccggacgcgaggcctgtatcgccggccgatgagatcagacgtattgcgccgctcttagacgccctgtccgatcagatgcaccgtgtttcaatcgacagcttccaaccggaaacccagcgctatgcgctcaagcgcggcgtgggctacctgaacgatatccaaggatttcctgaccctgcgctctatcccgatattgctgaggcggactgcaggctgggggttatgcactcagcgcagcgggatggcatcgccacccgcaccggtcaccttcgacccgaagacgcgctcgacgagattgtgcggttcttcgaggcgcgggtttccgccttgcgacggagcggggtcgctgccgaccggctcatcctcgatccggggatgggatttttcttgagccccgcaccggaaacatcgctgcacgtgctgtcgaaccttcaaaagctgaagtcggcgttggggcttccgctattggtctcggtgtcgcggaaatccttcttgggcgccaccgttggccttcctgtaaaggatctgggtccagcgagccttgcggcggaacttcacgcgatcggcaatggcgctgactacgtccgcacccacgcgcctggagatctgcgaagcgcaatcaccttctcggaaaccctcgcgaaatttcgcagtcgcgacgccagagaccgagggttagatcatgcctag

SEQ ID NO: 340376 - DNA, 267 bp, Pseudomonas aeruginosa
atgacaatcattcacgaatgcgaccggtgcaacgcgcccggtcgcgtgatcgagacgtccgacggattccgctgcgagggttgctacgaggaggcgcaggagcaggtgcgcagcgatgcgagctgccccgagtgtgggcgcctgggggtgacggctaccggaatttgttacgcctgtgagaacactgccccggttcgccggggcatcaccagctccaacccatttgcccatccgggcgacctatcgcccaacccagggcaaacctaa

SEQ ID NO: 340377 - DNA, 654 bp, Pseudomonas aeruginosa
gtggccctgattaagtgcaaggaatgcggcgcccaggtgtcgaacaaagccaaagcctgcccatcgtgcggtgcaaaggtacccaagagcgttggcgtcatcggttggctgtttgtgatattcatcgtcctgcctatcgcctggcagtttggaacgggaatcggctcctccggcgatgcggctcagtcgcgatcgaacagcccgcagcgggcaaccacaagccctactaaatccccttgggagcgccatgaatacaaagacccgatgagcgatgaagtaaccaggatgctcacgcttcagtcgaagacgtccaccctcttcgatttcccatatcgagttgcagggggctcatacctgaatcttaccttccgcaaaaaaggcaaagacctggacgccttcctcaagatcaccaaagggcagatgcagtgcggttatcgagactgcggtttcgttcttcgggtcggtgaaggcaaggcgcaaaagtggaccggggtccgcagttcgaccaacgacagcgacctgatgttcgttcgggacgctaagcaactggaggctatcgtcaaatcgggtaagcctttccggatcgctatcgagttcttccaggcaggagagcgcgttttcgagtttgacccggcaggttacccaggcctatag

SEQ ID NO: 340378 - DNA, 609 bp, Pseudomonas aeruginosa
atggcggcgaacaacgcaaaggctgtgagcaatatcctgttcagccttcgagacattcttaatgtcgaagcagccgagaagaaatgtcagaacattttgatggactgcagcccgttctacggtggcggaacccacctggcttggtgtgcagctgacgcgttgatcatccctgtgcgggttgatgaacactcaattgagtcgctcgacatcacgctggacatgctctccaacccgaatagcgattacaacatttgggctgagagagctggtggtatgaaaccgcccaaggttgctgcgatcgttatgactatggtcggagcacgaagcccgaaaaaaggcgtgaaggaccgggcatcgcaaatgtatgttgagcgcgcttacagcactgctgcgaagtacccagcgctttttgatatagacgatcctgccgatgcatttgcgatcactgatgactttatgtctgctggacgcatcagtggcgccgaggggattccgattccgaaactcaaggtcggccaattccacaccgtcaatggtagccgtctacaggtcaatcagtcgcagacaaagtacaagaaggagctggaatatcttctgagcatcctgtga

SEQ ID NO: 340379 - DNA, 780 bp, Pseudomonas aeruginosa; identical to SEQ ID NO: 30171

SEQ ID NO: 340380 - DNA, 231 bp, Pseudomonas aeruginosa; identical to SEQ ID NO: 324249

SEQ ID NO: 340381 - DNA, 258 bp, Pseudomonas aeruginosa
atgcccggaatcaagatcgggcacggtgcggtgataggcagccgctcgttggtgacaaaagatgtggagccttacgctatcgttggcggcaatcccgctaagaagattaagaaacgcttcaccgatgaggaaatttcattgcttctggagatggagtggtggaattggtcactggagaagatcaaagcggcaatgcccatgctgtgctcgtctaatattgttggcctgcacaagtattggctcgagtttgccgtctaa

SEQ ID NO: 340382 - DNA, 204 bp, Pseudomonas aeruginosa; identical to SEQ ID NO: 329441

SEQ ID NO: 340383 - DNA, 936 bp, Pseudomonas aeruginosa
atggaggagatcgagtccagcatcaaccgttacctgaccgcactggataccgctgatcgccaggaaccggccgtggcgcaggtcaaagccgaacgcctccacgacaagattgcgaccttgaaaactaagctgcgggagctcaaggaagtcgaggtacagctcaacgaaacaccggataaacagatctccctgaccgatcccgatgcccgctcaatgaagacccggggcagcggaatagtcggctacaacgtgcaggcggcggtcgacgcgaagcaccacctgatcgtgacccacgaggtcacgaacgacggggtcgatcgagaccaactgagctccatggccaagcaagcgcgagaggccatgggtgtcgaggaactctcggcggtcgcagacagagggtatttcaaaggcgaagaaatcctggcgtgccatgaggctggaatcaccgttttcgtgcccaagacgctgacctcgggagcgacagcggctggtcgcttcggcaaaggtgatttcatctatgacgcagccaagaacgagtatcgatgcccggctgggcaaagcctgatctggcggttctcaagcgtcgaaaaagggctgaaactgcaccgctactggagttcgcattgccagggttgtgcgttgaaagagcactgtacgcctagctcagagcgccgagtgagccgatgggagcatgaggcagtgctcgaagcgatgcagagtcgcctggatcaagcgcctgaaatgatgcgaatccgccgtcagacggtcgagcacccgttcggcacgctgaagagctggatgggcgccacccacttcctcaccaagactctcgaccgagtgagtaccgagatgagcctgcatgtgctcgcctacaatctcaaacgcgtgttgaacgtgctgggcagcggtgccctgatggcagcgatgaaggcctga

SEQ ID NO: 340384 - DNA, 435 bp, Pseudomonas aeruginosa; identical to SEQ ID NO: 340343

SEQ ID NO: 340385 - DNA, 168 bp, Pseudomonas aeruginosa
atgcaacaggagctgcttacccgcataggccggcagaacgtgctcgtgcacaatttgaaagaggctggcaatttcctctctctgcagccggatgacatccgtgccattcaccttgttttgcagtacttggatttgacgaaaagtctcctccaatccggcttcaagtga

SEQ ID NO: 340386 - DNA, 282 bp, Pseudomonas aeruginosa; identical to SEQ ID NO: 331489

SEQ ID NO: 340387 - DNA, 234 bp, Pseudomonas aeruginosa
atgatcgacaatgcgccgatttatctcttcaggcacacgcatatcgaaacagcgattgcctgcttccatatgaaaggtcggtatcttacgccgttttgcaggcagtaccgccatacaactattggtatcacccagcacgagcagcgcatcgggatctatttcgcccagaacacgatcgactgcgattattacattccctatcgtttcagccccggaagacccggcggcgtttag

SEQ ID NO: 340388 - DNA, 270 bp, Pseudomonas aeruginosa
gtgctgacgccggagctagcccgttgcctggaagccgtcaacagcgccacccgcgccttgcgccaggccggcattccgattgagcagacgtcgttactcgatcgccgcctgttcatctgcgaagaggattcgctgcggctgcaccgccgcttccgcaacgccatccgcggcattcgacagaccactcgcgggatggtcaccgtccatgtcgtcagcctgctcggtgttgatgtggcctggacgaccccggtgaaggagcaagaccaatga

SEQ ID NO: 340389 - DNA, 2262 bp, Pseudomonas aeruginosa
atgagcttcgacgccgatgaagaaatcctccaggacttcctggttgaggccggcgagattctcgagcaattgtccgagcaactggtcgagctggagagccggccggacgacatggacctgctcaatgccattttccgtgggttccatacggtcaagggcggtgccggcttcctccagctgaacgcgctggtggaatgctgccacattgcggaaaacgtcttcgatatcctgcgcaagggcgagcggcgcgtcagctccgaactgatggatgtggtgctgcaggcgctggatacggtcaacgcgatgttcgaccaggtgcgcgagcagtccgaaccgaccccggcgacgcccgagctgctggcggcccttgcccgcctggccgagcccgagggcgccgagcccgcggaacctgtgcaagcgccgccggcggccgttccgccagccgagcctgcggcgccgccggaagcgcccgcgcagagtgcctccagcgatatcaccgacgacgagttcgagcagttgctggatgctctgcagggcgacgaagcgccggcctccaccgttgcagaagcgcccgcggctcccgctggcgacgagatcagcgacgccgagttcgaggcgttgctcgaccagttgcacggcaagggcaagttcgtgccgccggcggtctcggccgagcctgcgcaagtccccgccgaggcggtcgagccggccgcggctgccgctggtgacgatatcagcgacgacgagttcgaggcgctgctcgacgaactgcacggcaagggcaagttcggcgatgtcccggaagccgccggcacacccgccgcaccggctgccgcggctccagcggctgcgccggcggagcagggcaaggcgccggccgccgcgggcggcgatgagatcagcgacgacgagttcgagtcgctgctcgacgaactgcacggcaagggcaagttcaacggcgcctccgaggccgtggcggccgccgcggcggtagccaagaacatcgcggcgaagagtcccgcggcgaaaccggtcgctccggccaaggccgccgccgcgcgtccggcggcgcccgacaggcccgcggcaagcgaggcggagaccaccgtgcgggtggatacggcgcgtctcgacgagatcatgaacatggtcggcgagctggtgctggtgcgtaaccgcctggtgcgcctgggcctgaacagtggcgacgaggccatggccaaggccgtggccaacctcgacgtggtcaccggcgacctgcagatgtcggtgatgaagacccgcatgcagccgatcaagaaggtcttcggccgcttcccgcgcctggttcgcgacctggcgcggaacatgaagaaagagatcaacctggagctggtgggcgaagagaccgacctcgacaagaacctggtcgaggccctcgccgatccgctggtgcacctggtgcgcaacgccgtcgaccacggcatcgagagtccggaggagcgcgaggccgccggcaagccgcgggtcggccaggtggtgctgtcagcggagcaggagggtgaccacatcctcctgatgatcaccgacgacggcaagggcatggacgccgaggtgctgcgcaacaaggcggtggagaagggcctgctggagcgcgatgcggcggaccgcctgaccgacctggagtgctacaacctgattttcgccccgggtttctcgaccaagaccgagatttccgacgtgtccggccgcggtgtcggcatggacgtggtgaagaccaagatttcccagctcaacggcacggtcaacgtgttttcgcagaaggggtccggctcgaagatcgtcatcaaggtgccgctgactttggcgatcatgcctacccttatggtgatgctgggcagccaggcgttcgccttcccgctggtcaacgtcaacgaaatcttccatcttgacttgtcgcgcaccaatgtcgtggatggccaggaagtggtgatcgtccgcgacaaggctttgccgctgttctacctcaagcgctggctggtgccgagcgcggcccacgaggagcagggcgaggggcacgtggtgatcctgtcggtcggcacccagcgcatcggtttcgtcgtcgaccagttggtgggacaagaagaagtggtgatcaagccactcggcaagatgttgcagggcacccccggcatggcgggcgccaccatcaccggggacgggcgcatcgccctgatcctcgatgtgccgagcatgctcaagcgttacgcacggcgcatctga

SEQ ID NO: 340390 - DNA, 240 bp, Pseudomonas aeruginosa
atgtactcgcatcttgatgatcgactggaatctcagaggacagagatcaagggcgatttcgaaggactgtcctcacagatgaacaatcagatcgaagtgatgggccaagttcgagcggaagtcggcaagctgagcggcgagatagtgaaagccaaaggtgagctgattcaggaaatgtctcagatccggatgcgtcaagtcgtcgccgagcaaggtggtaagccgattgccacaaaatga

SEQ ID NO: 340391 - DNA, 174 bp, Pseudomonas aeruginosa
atgggacatgcactccgtaaaaacgatcacagcctctacattcctgcccgcgatctttcgcaggtcgcgaaggcgcgcccggtgcatggagagcatcaaacccagttgagcaatgcattctgcattgcttttcagcgctacgaaaaagcgctagaggaattagctaaggtttga

SEQ ID NO: 340392 - DNA, 144 bp, Pseudomonas aeruginosa
atgatgctgggcgtggcaaactatgattactctagagatgaattagagaactggcttgcgtattggagcagagagcacagcgcaacaaaacttagcctgattgatcaccaactagagagtcacatgaaactgaaaaatctatag

SEQ ID NO: 340393 - DNA, 813 bp, Pseudomonas aeruginosa
gtgctaggactggaaaccttaacttacgatgatgttgtgcagattcacgatgcgcttacgcgtgactttgccgatagtgatgatcctatatctcctccaggcatcaaggatcaaggtctgcttcagtcggctgttgctcgtcagcacgcgggctatgatggtttctataaatacaaaacagccgaaatgaatgctgctaccctggcttatggaatttgttgtaaccatgctctgaataacggaaataaacgcacggctttagtggctatgctgtgccatcttgatcgtaataatttgacctttaatgagcgtgcgacgcaggacgaaatgtactcgtttatgcttcgcgtggctgcgcataggtttgccccgagaaagcataagggtgatgcttcagatatcgaaattgagcaaatggggcgctggattaaatctcgtacgagaaaaatacaaaagtcggaacgtattgtaacttatagagagcttgaacgaattcttaaggatttcaacatcgtctttgagaaggatgatggaaactatgttgatctttatcgggtcgagcggaggaaacttgttaaagggctgattttcaagagagaagagtttgtagaggagcgtgtaaaaatctgcaatattccgcacttcaaagatgcgcggcatgttgggcggaagttgattcggaatatacggaaggctgctaatctcatgcctgaggatggcgtagattctgatcttttttatggtaaagagactactatggatgaatttatatttaaatacaaaaagacgctcgcgaggcttgcaagaacttag

SEQ ID NO: 340394 - DNA, 1095 bp, Pseudomonas aeruginosa
gtggtgacctggaccatcgtgctgttctccatcggtaccgcgttgctggggctgacccagaactactggcagttcgcgctgatccgcttcgtcgcctcgctcggcctcggctcgctgttcgtcgcctgcaacatcctgatgtccgagtgcgtcggaaccaggtaccgcaccaccatcctcgccgccatgcaggccggctggaccgtgggctacctggtggcgaccctgctggcggggcagatcatccccgagttcggctggcgcgtcttgttcttcaccgccgtggcgccggcgctggtctgcctggccctgcggccctgggtgccggagtcgccgtcctggctcgcggcccaggccgggcgccagcgtcccggcgcggctccgcagagccacgccgaggctggcggcgccggcccgctgggacggatgctgggcgatccggaaacgcgcggcatgttcctgctctggagcctcacctcctgcttcctgctgttcggctactacggcaccaacaactggatgccgtcctacctggagagcgagttggggatgaacttcaagtcgatgaccggctacatggtcggcacctacagtgcgatgatcctcggcaaggtcgccgccggcgtctgcgccgatctcttcggccggcgcctgaccttcgccgccggggccatcggcagcgccgccttcatgccgttgatcgtgttctaccactcgccctccaacatcctctggatcctcatcaccttcggcttcatctacggcgttccggtcggggtgctggccacctacatgaccgagagcttctccacccgcgtccgcggctcggcggtgggcaccgcctacaacctggggcgtatcggcgcggcggtggcgcccgccggcatcggcctgctggccacccacgtgtcgatcggcgcgggtttcctggtgatgggcatcacctacgtgctcaccggactgatcccggcgctgttcattgcggaccggctctacgacccgaaccgcgagtcccgcgatgccgagagcgcttcccgacggcaagcgccgggcagtgccggggataccgccgagcggcgcgcggccaaggcctga

SEQ ID NO: 340395 - DNA, 762 bp, Pseudomonas aeruginosa
atgagcggtttgttgcaggaaacgcgcggcacggtgcgcctgctgcgcttcgacaacccggcccggcgcaacgcactgtcgccggcgctgcgcatggaattgctgcgggccctggaggcggccgaatgcgacccatcgatccgcagcgtgctgctgaccggtggcgaagaggtgttctgcgccggcggcgacctgggcgatatgcgggtgaccgagttggccgccggcagggcgcgaatgcaggacaacgcgcggctggtgcggcagatggtgcgcatgggcaagccgctgatcgccgcggtcgagggctgggcggtgggggccgggctgtccgtggcgctggcctgcgacagcatcgtttgcggcgccggcgcccgcttcgccgccggcttcggcaaggtcgggctactcgccgacctcggccagttgcataccttgccggcgcgcatcggttgggggcgggcacggcagatcctgatgttcggccaggtggtagaggccgatgaggcgctgcgcatcggcctggccgaccgcctctgcgccgctggcggcgccttggcgatggcgctggagctggccgggcgggtggagcagcaggcgccgttgcccctggcgatgaccaaggcgttgctcgccgagggccttgacctattgctggagcgggagggcgagttgcagagccagttgtttctcagcgccgaccacgccgagggcaaggcggcctttctcgccaagcgtccccccgtattcagaggaaactga

SEQ ID NO: 340396 - DNA, 129 bp, Pseudomonas aeruginosa
atgcagtacgtaatcagccaggctagccaggccctcactccacagcatgaccgggatgacggagtaatgagcttcgtgcagccagtcttaattggcaaccagaccgatcacttttcgctcagccactaa

SEQ ID NO: 340397 - DNA, 237 bp, Pseudomonas aeruginosa
atgcgatttagcgacatcaagagcgaaaccctgaacctgcgggtctctccggcctttaaaaagatcttgaaggaagttgccgaccacgaacagcgcagcatggtcaacatgcttgaagtgctgctgtgtgactactgcgaccgcaatgacatcgtctctccgggcaaaaaaactaatcctcctactcctaagcgggcgcgcgcagcccgtaaggcgcatgtgggggcagcagcatga

SEQ ID NO: 340398 - DNA, 1095 bp, Pseudomonas aeruginosa
atgaccttccgctatattggttcgaagtccagactcatagatcagataacggcctacattggacaccctaaacagggtgccttctttgtggatgcattctgtggcacgggggcggtggctgaggctgccgctgacctgggatggaacgtgcgtatcaacgacagtttgcactctgcagtgatttctgcaggggcacggctaatcagtgctgatcaagcggcttttaagaagttgggtggctatggcgcggttatcgctaagctcaatgctgttaagcccaagcatggctttatgtggcgtgagtacagtcctgcatcagtggacacctgtggccttgagcgacgctacttcacgcaagaaaatgcagcacgaatcgatgctatgcgggcgctgatcgccgattgggtgggggcaggcactattgatgaggtagaagagcgcctgctcatcgcagacctatttagtgctttaaatagagtggccaatatcgctggcacttttggctgcttcctctctaagtggacgagccaatcgcaagacaaaatcgctatgcgctgccgtgatctaaaaaatagaggcgtgcatgttgaggccaccgttggggatgtgttcgacgtgcccaatgctgcgcatgacttggtttatttggatcccccatacacaaagcgtcagtacgcgagctattaccacatccttgaaacggtagctctgggtgatgagcccgaggtggagggggttgcagggcttcgtccttggaaaagcttggcttcagatttttgctacaagacccgcgctctgcaaacgctctcacgcctggtgcatggcttgaaggctcaaaaggtgctgctctcgtacagcaatgaagggcacatcggcatgcaagatattaagtctgagctctcaaagattggtacgtccacgatgcatcccctgggagccattggccgctaccgtcccaacaaggtggctagtcgaactgcttctgacgtgagtgaatttttggtggtggtggagcggcctacggtacagatgcccaaggctcagcccaaggcggttaaaaccgttaagcccatcctcatggaaagctatgcatga

SEQ ID NO: 340399 - DNA, 2232 bp, Pseudomonas aeruginosa
atgagcgcacctcgccccgttgaagcggagtatctagcctcagcagaagtggctctcacaaaggctgttggtaaagttcatggctccgccagctttgagcttcggcttcaagttttggaggcagtgtcagcgcgttttggcgggtttgacctggcggcgtttcatgaggcttttggggtcagaagcaagagcccagcagcagagctcttggaacttgcggcacctgtggcaagtgccatcgagtgttcgccgattcaccctgctttggcgctaagtgtcctggcgcgtgaggctttgcatgagcaggatcgaaaaagtacgggcgcctaccatacggactttcgcctggctacgcggctggcgaagctcgtcgcccccaagctctcatacaggagtaaggtgattgatccagcctgcggcgcagggattttgctggcagcgctgacccacgcagtgtgtgggatggatcgagccaagacggcgtattggttggctcactgtgtgtgtgcagcggatctttcgggcaactctttgcgtgcggcgctgcttgcacttgcttcgttcactgatgatgtatcgactcttaaagctatgcgtgcacgttggtactgtggcgatagcttgatggcagatcgcaaggtctgggctgccatggctcctgagggttttgatgcggtgatcggcaacccaccatgggaaaaggtcaagctctcacggcacgagttcttgaagttctcaggcaccaagcgccactacggggcccaaattcatgggcttgatgaagagcggtttgcccggcagcgcgatgaggtcgcgagctactcgcgtcgtctgttggctcgctatcccgagttgggcaatggagagccagacctctacatcgctttcactgacctcttctttgaactctgcaaagggcagggtgtggtggctgcactgatccctggtgggctcattcgctcgcaaggtacccgcgccatgcggcagaaaatttttgatgcgagccaaagcgtatccatatcgatcatcgataaccgtgcacggttttttgccattgacacgcgctttaagttcctggctgtggctctcacgaaggctggctctgaaaagagcaagcgtgaacccatcaccctcatgcacgagcggggcacccctacgggcttggagattacgggaactgccaccattgggcgtgcagcacttgcggatgttcgggacgatttgagcctgcccgaggttcgtagcgtgtctgagtggaagctcttctcaaagatcggagaagcaggtgtttcgtgggaagagcctggctatggctggaccccgaagttttgccgtgaagttgatatgaccaaggagcgtccgaagttcctagggcgtgccacacctggcgctctgccagtggtggaaggtcgaatggtgcaggcccatcgctttggtgtaaaagggcacgtgtctggcactggtcgcagtgcgttgtgggaggcctatgccatcggaggctcacgccttgccccccagttttggatttacccctccgacatgccccgtgctaaccagcatcgtgcggacgtgctgcgtgtgggcttttgcgacattgcgggtcagaccaatgagcgttcactcatggcctcgttaattcccgccggggtggtctgtggcaataaggtgcccacgatccttttcccagaggactcatcggaagaacggctactggtgtgggtgtccattgccaacagttttgcctttgactggatgcttcggcgcgtgctcactacgacggttaactacttcctgctacaaagcgtgcccatgccaaaactcgccaaagatggcttgccatggaagaggctggtgagtgctgcacgcgaattgcgtacactcgacagtgcggggactactcgcgaaacctacgagcgcatggcgcagcttcgtggggagattgatgcggaagtggccgtggcctatgggctcgatttaaaggacatggagttagtgctccaagacttcccgcttttggatcggggtcaggtgggactgcctggtgaggccaagtccacaattacccgagatagtgctttggctgcaatggcaaaacgcacaggaagccagtctacagtttggtcgcaccgtgcggtggaggcacgtgagttgggggctattgcttatgtcccctctgagcttgccctagggggcgaaggaatcgaagaagaaggatccaaaattcatggctaa

SEQ ID NO: 340400 - DNA, 597 bp, Pseudomonas aeruginosa
atggctaatggcgcggggcatgttgctcgaattctgtacaaggaaattgtcgctggggacctgaggaagattcttgcccagtccaacgactcggacacgggcggtggggctcgcgattttcgttttggctcttttaaaaatctgctgcctgttattacggagatgtttccgaagaaggccaaggaaaaccgtaagcgtgatggtgtggtcgaagaaatcgacgtgttccaaggcgagttcttttggcatgacgtcgacggccaagttaggcgcaaggactctttctttgagactcctactgatgtgcgtccgtcagaaggtcgcattgctcgggtacatgagtacggttgttttgacacgggccttatacccagaggtggtgtaggcaatcgtatcttgttgctgctgattcagttgaacgatggatctgtttggccgtactacgtagaagaaaagacgctgcgtattgagggcaagtgggaccccgtggttgctgccgagttgctgggatgtttggatgccaaacgtgctgctaatcgcgcggtgatcggctaccgagatttcaccaacgcgggtaagtactgcaatggcaagtga

SEQ ID NO: 340401 - DNA, 1140 bp, Pseudomonas aeruginosa
atggcaagtgaagactgcaagcaggcattaaagctgctagcgcgttcgcgcaacgtgctggtgtccggtccacctggtacaggaaaatcgaagctcctggctgaagttgcactggcctttgagacgggttttggtcttgctcccgcaggtgggccaccacagctaaaccctgtgggtggtatcccgattccacccgctgctggagcggttaaagatattcctgcacccacaaagatggatcgcaaggtatttcggactgtctttcaccaaaactctaagtaccgagactttgtgtcgggcatcactccggctgttaacaagcaagcaggagctccagacttcaccatcgtgaagggcactctgtatcgtgccagtgagcatgcgaagggcgccaaaggtgccgcgctcttgatcatcgatgagatcaatcgaggccctgcggtgcaagcattcggtggtgccatcgtggccattgagtccgacaaacgtttggcctctgatggggccaaacgtgccgaaacgcagttctttgaaatgctcgatcccgtctctggtgatgtggtcgagtacgcattgcctcatgacctctatatactggcagcgatgaatcaggccgatgcgtctgtggagcccttggacgtcgcgttcttacgccgttgggagcctatgcgtttggagcccgatgaagcggctttgcggacgttttatggtttgggtgccaagggtgccaatgtattgcctgatgtacctacaagcgtgaacgatgccttggaggcttcggttagtgcttgggttgctgtaaacgcgcaaattgccctaggccgtggccccgagtttcagatcggacatggcgtactgatgtcggatgtgaagccgcaaacattgagccttaatgaagcgttgggcacgttgtgtgtagggtgggctaaggtgcgtgcacacgtggaagaggtgttcttcggggacacccgaggtatcgctgcagctcttaatgcgctcgatgggccagcctttaatccgttcaggctcaccgaaacgacctttgcggatgatttgcgctttcgtcttgaggggcccacgaatttttctgagaacaatatttacgcggctctcagggcatttgcccatcctagggggtag

SEQ ID NO: 340402 - DNA, 1305 bp, Pseudomonas aeruginosa
gtggtgaatccccgaacacggctgtcccttgttgagtacggtacaccggttgacttgagtcgtgcgattgttgatgccattggggtggatcgcacgaaggccaacagccttctattggaggctgggaaccgtgccgcgtcgagcctgaggctcaactacaaccctatcagtgtggatgccaagggcacacgtgccatcaattttgcgggcctcattcgcctggctccttcactggaactggaagttgctcccaagtttttggggctcgacgacactgatgctgcatggcgcgaggatttctttttcctctccacactttcgcgtcacgggcggctcttggcttccgagcgtttgtcggcatcaggtggcactccaagggatttgtctacgctagtggctcgttccatcacgagcatgtacgaggcccgtaagcgtcggccactgcgcagctatcgtagggtgcgtgaagcagacttcttcatcgatggggatcctgatccggtggagctcatctttccttcacctgatggcttcgagcaagagctcattcgctttgatcgcaaaaacagttggaatggggacatcgtggccgcggctaaggagttactccctgaagtaagtgacccgtcggccgcaagttcgctggtacgtttgattgaagacctttctcctcagaatgttgctgctagtcgtcgaacccccattcctgcacggcaccgagcatggaagccgctgcacgagctgtctattgatgtgctcggaggcctggggcttaactacaagcaggggcaagcacatgcacctggttacttagtgaatacctggcgtgtgtgggaagatctgttaacggtagctgctcggctgggttttggtcacagtgccgtagtgccccaacagggctatcccttgggcactaaaatcaggatgagcaccggtgccgagagcaagctttccgtgtatccagactgcatgattaagtccgatggaacaaggcccaggatgctgctggatgccaagtacaagggccacgtggagaagggacagcttcgcatcagtgaagctgacatctacgaagccctagccttctccaaggccactggatgcaacctggtagcgctggcctatcccgcacagccaggtaatgccccacagcccgtcggtacgtgcacggtctttgaaaaggctgtggtggacgcggtacaaatcgtgggtattcaaatcgagagccgtctaatttctaggacgggagctctcagggtatttgccgcaaacatggctgctggggtagccgcagcctttgtgtga

SEQ ID NO: 340403 - DNA, 363 bp, Pseudomonas aeruginosa
atgccgcgcaaggtattcagcagccaggcctaccgccacaaggtggtgctggtcagcggcggctgttccggcatcggtcgcgcgctggcgctgcgtttcgcccgggccggtgcgcgactggcgatcctcgacctcgaccaggcggcgctggacagtttggtccagcacctgcgcgaccatctcggcggcgaggcgctcggcctgcgctgcgacgtcgccgacgccgatgcggtggagcgtgccgtggcgctggcggtggagcgcttcggcggcatcgacgtgctggtcaacaacgccggcatcacccaccgcggtaccttcgccgaaaccggcctggggttttccgcaaggtcatggcggtga

SEQ ID NO: 340404 - DNA, 657 bp, Pseudomonas aeruginosa
atgaatcctctgctgccgctgcgtgacgcctggttcttcttcacccgccacctgaccaccctggtgccgctctgcctgccctggatattcctcgaaagcctgctccagcagcagatcgacgaagccgtcggcccccagcagatgggcgcctggagcctggtcgccggactgctcttctacccgctctacaccgcagccctgatcctgttcatggacgcgcgcgggcgcgacgagcggcctcgcgtcggccagctgtggagcgccgcgctgcgcctgtggccagccttcgcgctactcgcggcgctgacttcgctgctgatcgtgctcggcctgtcgctgctgatcctgccgggcatcttcgtcatggtgaagctgtccttcgccgaattctgcctggtgctgcgcggccgtagtccgctgcaggcgctgcgggaaagcttcgagttcacccgtgggcgattcttcctgatcctcgcctgttcgctggtgatcctgctgccggtctggagcctggaagcctggctcgccgattcggccggcgacgccgtcgtgctgcgggtcgccctgcatgcgctcagcgggttcttccagctgctgttgaccatcgtcgccttccgcatctacagcctcggtccggcgccacgcaacgggatgtga

SEQ ID NO: 340405 - DNA, 750 bp, Pseudomonas aeruginosa
atgaccatcgatacctacgtcttgttcgaccaggacgttttgaagaacggcaacatcatgaccaagccagaagtggttgccgagctgaaccgccaagcacgtgcagcgactgcggccgccaccgaactggaagcatggcgggagcttcgtaaggccgtggcagacattgagggatgcggggacgactggccgtcgcatggcaacgtccccctcgccattgctgccggctatgcactgctgaagcgtgacctcagcagcaccatgaccatgctcgccgaagtcgaaacgatggtccgcatgatcgaggaacgcgaatgggcagagcacgtcggccagagtgatatcgctcagcgcctagaggcgattatcaccaggctagtcaatgaagcccggccaccgcacagccaggaagtgccgcaggcctggctcgatgttcaagccgagcggaagcggcaggtcgaggccgagggatggacgccggagcacgacgacgagcacgcctgcgacgagatcgcggccttcgcatgcttctacgcgatgccgccggcggcgcgcgactgggataccagcagcaccggctacggcgacacgctgggcgaggccattctgcctgaaggctgggagccgaagaccggcgaccgacgccgcgagctggtcaaggcagccgccctgatcctggccgagatcgagcgcctggaccgagcggcctcactgctgagccaggaggtgccgccatgcgccgagcactga

SEQ ID NO: 340406 - DNA, 618 bp, Pseudomonas aeruginosa
atgaacgacgtacatatccccgagggctaccggatggacgggcaaaagcgcctgatcccggaggccaccatcaagcccgttgatctggcccgcgaccagttggttatggagctggtgggcaaggccaaggcagtccagagcgagctggcccgcttcaaggcttccgcgttcggcgacatcgacgctttcgtcgatctgtcggtcgagcagtacggcaccaagctgggaggcaagaaagggaacgtctccctcctgagcttcgatggccgctacatgatcaagaaagcgatccaggaaaccatccagttcgacgagcgtatccaggccgcccgcgagctgatcgaggaatgccttcgcgactggacccagggcgccaggcccgaggtggtcaccctggtaaccaacgctttccgcactgacacgaagggcgaaatccgtaccgcccgagtgctcgccctgcgccgcctggacatccaagacgagcgctggctgcgagccatgaatgcgattggcgacgcctgccaggcggtgggttccaaggcctacatccgcgtctatgaacgggtcggcgacagcgaccagtaccagcagatcagcctcgatatggcgggggtgtga

SEQ ID NO: 340407 - DNA, 309 bp, Pseudomonas aeruginosa
atggcccgcaaccgcgcgcaacagctgtgcatcgtcaccttggactatcagcgtttcctgttaccccaggccgatgccctcaagctgatagacatcatgagtcgagccgcagaggttcaggccgactacgcctctggagctgggttcaagtacaccgtcggcgaagcgccggaagtcgagttgacggtagtgcgccccagtcaattggtcatgccgcaggccgagccggccccaactgcaccacgcgctcgccggaagtctccggcccagatcacgcgcgatcccgttcggctgctggaggggttctga

SEQ ID NO: 340408 - DNA, 858 bp, Pseudomonas aeruginosa
atgcactttttctacctggatgagagcggtgattcaggagcaaatcttaatgatcaacagcagccaatttttgtattgggcggcctgagtattgctgacaaaaagtggaacaacaccaaagaaaagctagacgagatcattgacaactacttcaaaggaaatacacctgccggatttgaaatccattctcatgaactactttcaccgcatggccaaggattctttaataaccacccaataaatgatcgtttgacactcgtaagatcattactagggctaattgaaaaacttgggcaccaagtgcacttttttgcagtggaaaagtcttgccttgatcaatctcaatgccaatatcagacagtattcaacactaagcatccttatttgctttcgttcgactatttaattacttacatgaattggcacgtcaaggaaaaccttgggaaatctgcgagaggcatgattgtgcttgatgaaaaagaagagcatcacgaaagtgttgaggcaatcattcagaatcgtcgatttgaagtccctgccaaccaaaaggttaagtggattgtcgagttcagccaccctatcgactcttgtaagaacccgatgatccagctatccgatcttatagtgctctgcatcagaagatttttagagatcgaaaaaggatatagaccaaacatccctgacactgcaaagaatttctatgcagaatgctataacctaattgacaaaagggtcaaaagtaaaaatatcattgagcgaactggtagaggcctgagtcatctcaatgatcatttatctagatgccagtgtaagccaagagcacaatggcgacgcgcatataacatacagcgcaactaa

SEQ ID NO: 340409 - DNA, 903 bp, Pseudomonas aeruginosa
atgctgcttctaacttcagcgctttttgacaccttaaagcctctacctggcaggaatgttaaatattatagctcattcgtatcgcagcacatgatgatcacaacgtcaacggctgttgcgcagtgcaacctaatgccggagatgtttggagagtcaaaaaaaataattgatgagcatattgaccgtttcattggcgatctgcctgagagttctgaggggataacaaaagcctataaaccccactgcaaaaccatgcacatcgatccaggagaaatcatccagaaaaacgagccaagaattttcgcttccgatgcgtttgaagcgaagtcgaaagcatacggaatatccaatcgagagttggtaatacgaacgctaaatgcctcggcgtttcttgagtacttctttctatttgaaagcacaattaccaacatatataggagaaagtaccaatccgccagcgagcggcacctcatgctgggcgggaaagatgtaatatctaagtgcttgatggggaagctaaagcgtgatgggaatgaggcggcttttttctctgacctccagactcgaagccagttctttactaacccctcccaacttgcctctgtgtggaggcttcttaaccttataagaaaccaacaagttcatagcgctggaatttattccggccgcgcaaaaaaggacttcgttaaatatattgatagaatttgccatgcttacaaaaaccaagatgagatgaccattccggtcaacctactattgcaggtgctggaaccggttcaagaacacatcgaaaggcatggttacatcctttttacggaccccctagaaaacttagtgagaaacttctctctgtttgttatggagtcgctatatttgacagaaaaacgctattccacttcgtag

SEQ ID NO: 340410 - DNA, 837 bp, Pseudomonas aeruginosa
atgccggtttcgttacccttcgagcaagtcgatgtcttctccgaacagcccttcaaaggcaacgccgttgccgtggtgattggcgccgaccgcctgagcagccggcagatgctcgagttcgccgcctggacccagttgagcgagacgaccttcctgttgcggccgaccactgccgaagcagactaccgcgtaagaatcttcaccccgctgcgggagctgccctttgccgggcatccgacgctggggagctgccaggtctggctgaaccaggggggcggcaatgctgctgacgagatcgtccaggagtgtctggcgggcctgatccgcatccgccgcaagggcgccttgctgtcgttcgcggcgcctcccctgcttcgtggcggagcggtcgaagacgaggtgttgcgacggatcgagagcgggcttggcctgtccccggggccggtactcggcagccaatgggtggacaacggacccggctgggtcgccgttcggctggccacgcgtgacgaggtcctggccattcgcccggactacgcgaagctcgacgggctcaacgtgggcgtggtcgcgccctggcaaggtccccaggcggaggcggatgtggaagtgcgcgccttcatgggcgaggagctcaatgaagaccccgtcaccggcagcctcaacgcgagcctggcgcaatggctgatcggcacgggagtcatgcccgggcgctacacggcaagccagggcacggccttgggtcgccgggggcggataagcgtcgagcaggtcggcggcgatatctggatcggcggtgaggtacagccgggcatgtcggggcgggtcgtgttctga

SEQ ID NO: 340411 - DNA, 150 bp, Pseudomonas aeruginosa
gtggtcgactcgctgaacatggacatcaccgagatcaacaccctcaaccaggaaggcgtggagaacctccaggccaccctgcgcgcctgcggcgagctggaaacccaggccgggcgcctgcggcacctggtggacagcttcaagatctga

SEQ ID NO: 340412 - DNA, 2013 bp, Pseudomonas aeruginosa
gtggagcgcctggcggcacactggcgcaacctgctggaggcgatctgtcaggacgcgagtcagcgtgtcggcgaattgccgatgctggctgaagcggagtacgtcgagcttgttcgcggctgcgagtccgccccttgtgccgagcctgcctgcctgcatcccttggtcgaggcgcaggcggcgcggaccccggaggcgacggcggtggtgcatggcgagatcgagctgagctaccgggaactgaaccgccgggccaacgtactggcgcacaggctgcgggccgaaggcgttggtccggacgtaccggtgggtatcgccatgcagcgcagcccggagttggtcgtggcgttgctggcggtgctgaaagccggtggcgcctacgtgccgatggatcccggttatcccgccgagcgcctggccttcctggcagaggacagcgggattggcctgttgctgacacagacgttcctgcaggatgaactgccgttcaacgcacagctgacgaacctatgcctggacgacccgagcctgttccagaacgtcccggcgcagtgggacgggaatccggagcagcgtgcctgtccggagcatctggcctacgtcatctatacctctggttcgaccgggcgcccgaagggcgttggcatcacccatggcgcgctggtcaatcacatgcgctggatgcaggagcgcttccagttggcggcgcacgagcgggtgttgcagcggacctcgagtagcttcgacgcctcggtgtgggagttctggctgccactgatgtccggcgctcgcctgcacttggcgcctgcggagctgggtacctcgctagagagcttgtgggggctggtcgaggcacaacggatcaatgtgctgcaaatgccgccgtcgctgttgcaggcgctgctgcctttcgccggcgacgaccagttggactcgctgcggctgctctgctgcggtggcgaagcgctgagcggcgcgctgctggaacaactggggcgccgctggaacggcgagctggtcaacctctacgggccgaccgaagcgaccatcgatgcctgctgcttctcggcgccggtgaaggaggtcggggcggaaattcccattggtgcaccgatcgcgggagtgcgcgcgcgcatcctcgatgcggcgggtggggtctgtccggtgggttgccgaggcgaactgctgatcgccggtgccggcctggcgcgtggctacctgggacgacccgggctgaccgcggagcgcttcgttccggacccgtacggcgacggcgagcggatctaccgtaccggcgacctggcgcggttgcgcagagacgggcagatcgactatctcggtcgcctggaccaccaggtgaagatccggggtttccgtatcgaactgggcgagatcgaggcgcgcctgctggagcaggagtgcgtgcgcgaagcggtggtgctggcccgcgatggcgcgagcggcaagcaactggtgggctacgtggtgccgcaggatgtcggtgcgctggagggcgagaagcgcggagccttgcgtgaagcgctgaagtcggcgctcaaggcgagcctgccggaatacatggtgccgacccagtgggtgttcctggcggcgctgccgctgctgcccaacggcaagctggaccgcaaggcgctgccggcgccggaagccggcgacagccagcaggtctacgccgcaccggagacggatctggagcagcagctggcggcgatctgggcggaggtactgaagctggagcgggtcgggctgaccgacaacttcttcgagctgggcggtcattcgttgctggcaacccaggtgctggtacgagttcgggaacaactcgggctcgaaatggcgctgaaggaactgttcgagtttcctgtcctgactgatctggctcgccaactggaagggcgcggcagcgtcagtgcatctctccaggatgaattggctaaatccctggaggcccttaaacgtcttactacggaggaaatagatgcgctgacgtcttaa

SEQ ID NO: 340413 - DNA, 165 bp, Pseudomonas aeruginosa
gtggtcaacctgtatttcatcctcggcgtactcgccgccttcgatcccacgcagcgcctgttcggctgggccgaagtgctactcagcgtgaccttgttctgcgccgcgctgctctatacgcgctggcgattccagtacgaccgaagggtcgccggggaacgctga

SEQ ID NO: 340414 - DNA, 702 bp, Pseudomonas aeruginosa
atggccttcagtcccgccaaggcgcacttcctgcgcgtgaccgccgctcaagaggcggcggccactgccccgcaccagggcatggaaggcgcgaacgcctatgagctgcagctcgcccagctgtatcaggatcgcagccgcctgaagaacatccaatccggcgaaggcaaggcagcgctcaaggtcgagctgctgcctgcctaccagccgtacatttccggcgtgctgcaggccggcaagggcgcccaggacgaggtgatcaccaccgtcatgctctggcgcatcgatgccggcgattacgccggcgccctggacatcgccgactacgtcctcgcacacgacctggtcatgcccgaccgcttcgcgcgtaccgccggctgcgtcatcgccgaagagatcgccgaggccgcgctcaaggcacagaagaccggcggtagcttcgaccttgcgaccttgcatcgcaccctcctgctcaccgaccaggccgacatgcccgacgaagcccgcgcgaaactctacctcgccgccggccatgccaccctggaaggcctttctgtggagagccccggtcaacccgggcaggtgcaagccggcatcgatctgctcaagcgcgcgatccagctgcacgacaagtgcggcgggaagaaggatttggaggccgcagaacggctccagaagaaactgaccgcctctggcggttga

SEQ ID NO: 340415 - DNA, 198 bp, Pseudomonas aeruginosa
atgaacgagccaaagatcatcgactggaacgaaatttcccgtttggggcttctggaacgcatcaaccgggaaatcatgcacccgctcggctatgccgtgtgccgcgaggtagaaaccggccgctccccaggcgcgctcgtctcggacgacggaccgttcgtttatcccgatcagctcaagcaccaggagtgcaactaa

SEQ ID NO: 340416 - DNA, 210 bp, Pseudomonas aeruginosa
atggccaccgtgatcgccaaccagagcgacaccgtcgaagccatctgctggcggtactacggccgcaccgccggcgtgaccgaggcggtccttgaggcgaaccgcggcctggccgaccacggccccaccctccccccaggcctcaaggtcaccatgccggacattccgacagccgccccggaacggcagatggtgaacctatgggactga

SEQ ID NO: 340417 - DNA, 888 bp, Pseudomonas aeruginosa
atggcaaatgaatgtgatgatgtgatggggggatgtaagctatgtggtcctgataacggagagataaggtatttgtgcaaaagtcatttactgccaaaggcgatctataagtatttcaatagctctaaactcgatggcacgaaaatattagtgcggccgcagcagggtgagagtgttttctcgatggacaggcagattttcaagcgtcttttatgtagttcatgtgaacagcttatgtcaaccaaaggtgaggattactttatatcgtcagcgctaaaaattgataaagagaagatgcttccttcgccagtttacaatattctttataagagcttgatcccttcctggaatttgttttcgagtacttcatacggaagaggtctaatttttagtgtaggggcgaactttctgccggctataaagtcacaagagttgtaccactttgcgattggcatgttctggaaggcaacgttcgaagggtggaccttctgtcatgcgatttctctaaagccctctctcgtagatgagatgcgaaagtttcttttgggagggagctttcttcaaggttacattgttagagtggtgccctcgttctggtttgaaaagtacggggttgtttttccaactttgatcgaggggcagccttttttttcaatatgtggttttgacttctatctcgaagaatctgataaaaaatttagggcggcaacatcgctgagtagcgtgccgttactttttaccgttgactctatgaggtctgagctgacctttaagtatatttcgaagtcttatagtgaagctaggcaaacaaactcctcagccgaaacccagttgtcttgggtaaaaggtaatgatgtaaagactccccgcaacagaacaaatgactga

SEQ ID NO: 340418 - DNA, 2775 bp, Pseudomonas aeruginosa
atgaacgccgtagaaatcgaacaggccatcacagaccttgcggagcagccctttgaccccgcagagttcccctacgccttccttgaagcctttggcaacaaggcgacgaccatcaagcgcctgcgcgcgggggcgtcgaacaagtccgacctcggcggtgttctccagaccagcaacatccacatcctgacctgcgacgcagggcgggtgacccagacgctggccgctctcaaggccagcccggcgacggccaaggccaaggcgaagttcatcctcgccaccgatggcgtggacttcgaggccgaggacctgaccagcggcgagaccgtcgcctgtgccttcaaggactttcccgaccacttcggcttcttcctgccgctggcgggcatcagcaccgtccgccagatcagcgaaaacgccttcgacattcgggccaccagccgcctgaaccgtctgtacgtcgaactgctgaaagacaaccctgaatggggcacggcggagcgccgccacgacatgaacaagctcatggcgcggctgatcttctgcttcttcgccgaggacaccgacatcttcgtcggcaagggccgtttcaccgaaaccgttgcgcagatgagcgccaaggactcgtccaacacacacgaggtcatcgccacgttgttccgtgccatgaacaccaagcgcgaggaccgggccgccgccaaggttccccgatgggccgaagacttcccctacgtcaacgggcagttgttctctggcggcgacgaagtgccacgattcagcaagatcgcccggtcctacctgttacacgtcggcgggttggactggaccaagatcaaccctgacatcttcggctcaatgatccaggccgtcgccgaggacgaggagcgcggcgagctggggatgcactacaccagtgtccccaacatcctgaaggtgctgaatccgctgttcctcgacgacctgcgttccaagctggaagaggcgggcgacaacccgcgcaccttgctcaacctgcgcaagcgcatcgccaagatcagggtcttcgacccggcctgcggttcgggcaatttcctagtcatcgcctacaaggaaatgcgggccatcgaggccgagatcaaccggcggcgcggcgagccggatcgtgcatcagaaattccgcttaccaactttcgcgggatcgagctacgcgacttcccggcggagattgcccgcctcgcactggtcatcgccgagtaccagtgcgacgtgctgtaccggggccagaagctggctctggccgagttcctgcccctgcgcaatgagaactggatcacctgtggcaacgcgctgcgtcttgattggttgagcgtttgcccgccgactggaacgggggtgaagttgcaggcggatgacctgttcagctcgccgctggaccaagcccagatcgacttcgagaacgaagggggcgaaacatatatttgtggcaacccgccgtatctgggaagcaagtggcagtcagacgaacagaagggcgagcttaaggcgatcttcgaacgcagcggcgtcgcgtggaaatctctggactacgttgccgggtggttcatgaaggctgcatcatatggcgagcgcactaatgcggccactgccttcgtttctaccaactcaatctgccaaggcttgcaggttcctattttgtggcctgcaatttttaacaccggacaccagatcgtgttcgcgcacacatccttcaagtggaccaatctcgcaagcaataacgctggtgtgaccgtggccatcgtgggtatttcgtccacgccacaacctattaaacggttgttctccgtgagtgaggatggctccgtgcaggagcggcaagttgactacatcaatgcctaccttgtgccggggcgcgtcaactcggtggagcaggagcgtcgaccgatttctactgtatcgcccatgctgtttggcaacatgccgcgtgatggtggtgcatttgttttagacggcggggaacgagcacgtgtgctgatgcagcaccccgaactcgaacgctttgttcgcccgtacatgggctctgaacagatgatccagggaaaacctcggtggtgcctgtggattgaggacgacgatgcgccttatgcgcagcaacacccctacctgaagacggtgttggaccaagttcggaattttcgcctgtcaagtgctgccagttctacccgcgacttcgcggcacggcctcatcgcttcgtccaaattgccggtaccgctaagcagcattcacttgtcgtggcgaaagtctcgtcggagcgccgaccatacctgcctgtggaccttttagacggcagcgtgatcgttagcgatctcttgttcgcgctgtatgacgcgccgctatggaacttggcggtattggcgtcacgacttcatctcgtgtggattgcaaccgtgtgcggaaaaatgaaaaccgatttccggtattcgaacaccatcggctggaataccttcccactgcctaagttgacagagaagaatatcgatgacctcaccagatgcgcacaagagatcctgctagcgcgtgagcgccactacccgcagactcttgccgaactctatgcacctgacgcaatgccgacagatctacttcgtgcacatgagcgtaacgatgaaatcgtggagagaatctatataggtcgcctattcaagaatgacacggagcgccttgaaaaactctttgagctttattcacgcatgtccggtcaagcgggtgccgggcagcgtcgagtcaaacgagcgtaa

SEQ ID NO: 340419 - DNA, 2058 bp, Pseudomonas aeruginosa
atgaacaacatcaaacctcggagcgtcccctccgtatctgttacgtatgcgcgtaacggagcatcaaccaaggctaatgcgctcggtatgcgtccgatgcaggagcgggcctatgacaagcggggcgagcagtacctgctcatcaagtcgccgcccgcttcgggtaagagtcgcgctctgatgttcgtggcgctcgacaaattgcagaaccagggcttgaggcaagccatcatcgtcgtgcccgagaagtccatcggggccagtttcaacgacgagccgctgtcgaagtacggcttctgggttgattggcacgtcgagccaaagtggaacctgtgcaatgcgccaggcaacgacaacggcggtaaggtcaagtccctcggcgcgttcctcgaaagcgacgctaaggtgctggtctgcacgcacgccactttccgattcgcggtcgatgcctatggcatcgaggcattcgacgaccgtctgatcgccgtcgatgagtttcatcacgtttcggccaaccccgacaacaagctgggcacgcacctgggccagttcatcgcgcgagacaagactcacatcgtcgcaatgaccggctcctacttccggggcgacgcggaggccgtcctcgctccgcaggacgaatcgaaattcgataccgttacctacacctactacgaacagctcaacggctacgagtacctcaagcaactcgacatcggctatttcttctacagcgggccttacgttgatgacatcctcaatgtcctcgaccctgttgagaaaaccatcatccacatccccaacgtcaattcgcgcgaaagtacgaaggacaagatgcgcgaggtggagcacatcatcgaggcgctgggggagtggcagggcatcgacgccaccacagggttccagctcgttaagcgccccgatggccgcgtgttgcgcatcgctgatctggtcgatgacgatgcctcgaagcgcgaccgggtgtccgccgcgttgaaagacccggcgcagaagaacaaccgcgaccatgtggacatcatcatcgcgctaggcatggcgaaggaaggcttcgactggatttggtgcgaacacgcgctgaccgtaggctaccgtgccagcctgaccgaaatcgtgcagatcattggccgcgctacccgcgatgcgccgggcaagacccgcgcgaggttcaccaacctgatcgccgagccagatgcgacagaggaagcggtcaccgaggccatcaacgatacgttgaaggccatcgcggcaagcttgctgatggagcaggtccttgcaccgcgcttcgagttcaagcccaagaaccccgacagcggcccgacgccaggctttaactatggcgagggtggctatgacccggaccgctgcaatatcggtgtcaatgagcagacaggggcttaccagatcgagatcaagggcctcgccgagcccaagagcaaagaggccgcacgcatctgccaggaagacttgaacgaagtcatcgcggctttcgtccaggacaagcccaccatcgaacgtggtctgttcgacgaagagttggtgcccgaggagctgacgcaggttcgcatgggcaagatcattaaggacaagtaccccgagcttgacgccgaagatcaggaggccgtgcgccagcacgccatcgctgccctcaacctcacgcaacaggccaagcggcttgtcaccgaaggcgagggcaacgggtcgcccaatacggctttgatcgacggcgtgcgccgcttcgcgatggatgtgcgcgagctggacatcgaccttatcgaccgcatcaaccccttcggcgaagcctacgccattctcgctaaggccatgagcgaggagagcttgaagcaggtcgcggcggccatctcggccaagcgcacctcaatcacgcctgaagatgccaaagtgatcgccaagcgagcggttgagttcaaacgcgagcgtgggagggctccatcggttacctcgcaggacgcctgggaaaagcaccttgccgaaggcgcggccgccttcatgcgtttcagggcggagggacgctatgagtaa

SEQ ID NO: 340420 - DNA, 1188 bp, Pseudomonas aeruginosa
atgagtaactccgatcttgacgacctggcggcagagctggccgagttcgctccggccgagaagaaaaatggccgcccagccagcgaggagcgtgtcattgctggcttcgagaaaatccaacgcttcacagagcagcacgggcgtgcgccgcagcatggcgaagaccgcgacatattcgagcgcctatatgccgtgcggctcgaccgtctacgcgcgctcccggattgccgcgccttgcttgagccgctagaccatcagggcttgcttgctggggcaccgaccgttgccgcttcggcggacgaaactatcgacatcgacgacctggctgccgaactggcggatgttgccggcacggacgacatcacggtcttgcgccatgtccgtaccagcgccgaaaagcgcgccgccgaggagatcgcggatcgcaagccctgcgaggacttcgagaccttccggcccttgttcgagcgcgtgcaagcggaagtcaaaaccggtatgcgccagtcccagcccatcgaagcaggccgccgcgcgattgaagccggggacttcttcgttctcgatggccttacgctctacgtcgccgaggtcggcgagccgctgaagacgacggccggggaagtggaccgtcgcctgcgcctcatcttctccaacggcaccgaaagcaatctgctgctgcgctcgctccagcgcgcgttctacaacgaccccgccgcgcggcggctggcctcgcccgagagcggacaactctccttcggtggcgagcttgaggccgatgatgtcgaaagcggcacgatctacgtcttgcgctccctgtccgatcatccttacgtcgcgcagcaccgcgacatcatccacaagatgggcgtaaccggcggcagggttgaaacgcgcatcgccaacgccgaacacgactctacctatctgctggcgaaggtcgaagtggtggcgacctacaagctcgccggcatcaaccgcacccggatggagaacctattccataggctgttcgcgcccgcgcggttgaacatcaccatcaacgaccgcttcggtcatcctgtgcagcctgaggaatggtttctcgttccgctgttcgtgatcgacgaggccgtcgcgcgcatcaaggatggcagcatcaccggctacatctacgatcccaaggctgcgaagctggtgaaggcggagtag

SEQ ID NO: 340421 - DNA, 897 bp, Pseudomonas aeruginosa
atgatagtccgtaggggaggacagtttattagctcaatacgatccatcgacctgcgctttgtagatgacctcgttgacttcgtccgtggtcctgggttcgtgctcgacttttccgacacgagcttcgcggattttttcgccttggagctgaaggtcaatattgacgatcccaaatacgcggcaaacggcggctccaaggggaaacggctgcgctatttcctgcaaaactgcgacgatgccactgccgttcgcgtgcttacggccctctgggagtaccgctccgactatcttgcccgcagcggcagcaaggacccggtaatcgatgtgcagtcgcgctatcaaggcttgatcaatcgtctatccagcggtgcggctccgaagccaacccagccccaacccgttgtcgatcgtcagaagatcgccaccataaaagccgagctgctgagggtctcctcgctcagcgcacaggcacgcggctttgccttcgagggattcctcaagggcctgttcgacgcattcggtttggccgcccaggaaccgttccgcctttgcggtgagcaaatcgacggcagctttcagctcggcagcgagacctatctgctggaagccaaatggcatggtcagccaattggcgtcgccgatttgcacacgttccacggcaagattgaacagaaggccgcctggacgcgaggcctgttcgtgagcaacagcggattctccgatgacggcctcgtcgcctttggccgaggcaagcgcgtcatctgtatggacggtctcgatctctatgatctgctcgaccgcgagataccgctcaaccaagttcttgaacgaaaggtgcgcagggcagccgaaaccggcacgccctttcttcgcgttcgcgacctcttcccgagctga

SEQ ID NO: 340422 - DNA, 780 bp, Pseudomonas aeruginosa
atggtgcagttcaacgattggtgcgactccgcggacacgcccctgggaaatcatcacgttcgggtcatgacgggccggccggcggacgctgcgatcggcatccaggtgacggccacggccgtccccgcccactacgccgccgaggaacgcatcgccgcagcgcttgcgaggctgggcaaggtcgctgccgcgcagatgatcaccaatcttctcccgcaaacgccgcagatccgatcaggcgatctcggcgagatctacgctacggaatggatcgacgcgcacagcggctatcgcgcccccatcaaacggctgcgctggaaggatcaccgcaacatggcgatgcgcggcgacgacgtcatcggcatgcttctcgacccggcaacacagcgcctccgcttcctgaagacagaagccaagagccgcatcgccctgcgcgcccaaacgctggaggaggcgcggaccggcctggataaggatggcggccttccctcgtcgcatgcattgtcctttatctcagccagactgatggagctgggcaccgacgcgccgctcgtcgacgccatcgacgaggcgctctatcggcacggtattccgcccgagagcgtgaaacatctcctcttcaccttctccgggaactccccgcaagcgctgctgacacaggcgctgcaggcctatcctggttcattcgaacaattgggtgtcggcctgcacgtcgacggccatgccgcctttgttggggccgtctacgatcgggtcatagccgatgccaaccacccctga

SEQ ID NO: 340423 - DNA, 3426 bp, Pseudomonas aeruginosa
atgatctggcgtgacggtgttctgccccctggcgcgcccgccttctcgccgcagctcagcttcgatctccacagttacgcctatggcttgcttgggctggggctgcgcctcctcgaactcgatggcgacccgaaccaggcacggatcgcattcgaacaggcggcgaccgccctcgaagcggttatggccaagggcaaccgcgacgaagcagaccgcgatttccatttcgtcatggcggcggccagctatcacctcgcacacctgtctgcccgagcctattccctccttgcgatcgtggccgccgaggagaatttctccccgatcgaacaggcgctcgcgctgttgatgcgccgagacgtcaacgagctgcgcgcacgcgtgtgcgccttccgcctggatggtcgaggatcggacgcgaccattgcggcgctattccaacaacgacttgtggagcctgtcgccgccgacgcgccggagcgcgatggtcaggacttcctcttcgagggcctcgatctcgccctgaccgatgccttcttcggcgcattcgcgacattcctgctcgcgctggatcgcggcgagagagccctagtcgaccgggcgatcgcgcagcttcgggaaaacctcgacatctgcgcggaattgaaccttctgccgcaatggtgggtgcatcgggtcgccatccatctgctttccgacctctggtcgaacaccttccacgagaaggtcccgctactccccgccggtggcgccgcggcgtcatggcccggccttcgcgagctcttcatcgccctgctcgctcgccgcccgagggccgaggtcgacctgtggccttcgcagaccgaggcggcgtcgcgcgccgtcgatcagaccgacaatctcgtcgtctcgctgccgaccagcgccggcaagacccggattgccgaattgtcaattctgcggtgcttggctggtggccagcgagttatgttcgtgacaccgcttcgcgccctgtcggcgcagacggaaaccacgctccagcgcaccttcggtccactcggcaagaccatctccgcgctctacggcagcattggcgtatccggcttcgatgaggacgctatccgcgagcgtgacatcgtcgtcgcgacccctgagaaacttgacttcgcgttgaggaacgatccgtcgctcctcgacgacgtcggcttgctcgtgttcgacgaaggccacatgatcggacctggggaacgcgaggttcggtacgaggttcagattcagcgcctcctgcgccgccaagacgctggtcaccgccggatcgtttgcctgtcggcgatccttcctgacggagatcaactcgaggacttctcggcatggctgcgtcgagaccagcccggaggcccgatcaagaacgactggcgaccgacgcgcctgcggtttggcgaggtaacctggaactcgccaacggcgcgtctcaatcttcgcgtcggcgatgaaagacccttcgtgcctcgcttccttaccggcgcggcgccgccgctgttcgtaccgccgaagaaattacgcactcggctctttccggacagccaacaggaattgagccttgcaacggcgtggcggctcgtcagcgatggccagacggtgctgatctactgccccgagcgccgaagcgtcgagccgttcgccaaggttgtcgtcgacttgcactcgcgcggcgcgctcgcgtccctgctaacggttgaccccgccacactccaaaccgctatcgcgctcggcgaagaatggcttggcccggacagcgacatcctcaaatgtctgcggcttggcgtggcgcttcaccatggggccttgccgaccgcctatcgcaaagaagtcgagcgactgctgcgcgacagcgtgctcaaggtaacgatctcatcgccgacgctggctcagggcctcaacctgtcggccacggcggtcgttatgcattcgctctatcgccacggcgagaagatcaaggtctctgaattcaagaatgtcatcgggcgcgccggccgcgcctatgtcgatgttgaagggctagtcctctttcccattttccaggattcgcggaacaagaagcataatgaatgggtcgagttgatcgaggatcttggcgcccgcgagatggagagcgggctcattcagctcatcctctcgcttctcatgcgcatgcatgcacggcttggcggcaatctcgatcagctaatggactacgtcgtcaacaacgccgcggcatggaccttccccgaggtcgccggcgagaaggccgacaagcgcgagcgggcgctgaaggagtgggagcgtcatatggcgacgctcgacaccgccattctcagcctcataggcgaggccgacgtgcccgatgatcagatcgaggccgcgctcgacaacatccttcaatcttcgctctggcagcgtcgcctgcttcacgtcgacgacgcatcacgcgccgcctatcgcgccacgctgctcacgcggagccggtatatctgggcgaattcgactgccgctacacgacgcggctactttctggccgggctcggcctcgaagctggacatgcgctggacgcaattgcgactgcggcaaacgaccttctcgtacaggccaacgcagccctcgcagcatcggaccatgaggcggcaatcgctgcgatcaccggcatcgccgaacgcgtgttcgccttctacccgtttgagccggatccattcccggcgaattggcgcgacatcctcagatgctggctgctcgggcagccgttggcagcgatcgtcgccggacaggaagccgaggcattgcagtttattgagggtggcctggtttatcgcctgccttgggccatggaggccttacgcgtccgtgccgccgccaatggcgatgtcgtcggcatgctcgcactggcgttggacgactatgagctcggcctggctgtgccggctgtcgaaacggggacgatgaaccgctccgcctcgattctgatccaggcgggtttcaattcccggctggcggccataaaagccgtcaccgacacggccgccaccttcacgactggcgcggaattgcgcgcgtggctgcgctcacccggcctcgcggtctggtcggcgcaacccaactggccaacggccgagacgcgggccatatggctcgaattcatccaggagttcgccccgtcagacaatcggacctgggcgcgacgggattatcttggaaacgtccagtggttcgccgcacccgcgcctcccggaacaccagtcagcctctttcataggaacggacagccgctggtgctggcgcccgacgggcacgcgatcggtctgctacagcacccgctcaacccgaatcggcgcggtcttgtgcgagcgactgtcgcgctgaataacggccagctcgatctgagttatctcggccccgatgacctgtgggagggttag

SEQ ID NO: 340424 - DNA, 570 bp, Pseudomonas aeruginosa
atggacattgatttcaagaaattggctccctggaactggttcaaaaaggagcaggaagaacaacagagcaccgcctcactgccggtgcagcgcaatgacctgccggcggcaggcgggccggtcagccccatcctgcaattgcatcgcgaaatcgaccgcctgttcgacgacacgtttcgaggcttcggtttcccgacgctggccatgccacgctggccgtcggactggccgggcctgctgaagccggcgctggacatccaggagaccgacaagcagtacaagatcgccctggaagtgcccggcgtcgaggaaaaagacatccagatcacgctcgacaacgacgtgctgctggtgcgcggtgaaaagcgtcaggagcaggaaaccaaagacggtggtttccaccgggtggagcgctcctacggcagctttcagcgcgctctgaacctgccggccgatgccaaccaggacacgatcaaggccgctttcaagaacggcgtgctcacgatcacgatggaaaagcgcgaggccagtacgcccaagcaggggcgctcgatcccgatcaacggctga

SEQ ID NO: 340425 - DNA, 5241 bp, Pseudomonas aeruginosa
atgtcggacactcaagcctcaactcccgcgcaggacgtattggacaaggccgttgccgagggcggcgcctacgaggtgctgcacaagcgcctgctggagcagggccagcgcctgcggcagaccgccgaaaggctcaacgccagtcgcctggaggagttcggcgacagccagatggatgtgatcggccgggtccgcatccgtaccgagaacaactgcatcgcccgcgatatcgtccaggtcggcgattgcctgctgttcggctacaacgtgttcatcggcctgcgcaaggaaaccggcgtggccgacgtgttctccctctaccgcctggtggagggcagcgaaggctacgaggcggagcctgtgccactgggggacagctttctcgccgcgccgggcttcgtcaacgacttcaacgagctttacacctactacaagaacacccgcctgctgcaactggcgatccgcgacggcaagctgctggccagcttccagatcggcgagcggatcaccgacatccgcgtgttccgttggtcgatctccagcgacggcagcgaagtccgctacatcgacaaccgcggcgagcgcgacatcgccttgccggcaccgttcgacttcgaatggcagcgggctacccgcgagatggtggtggagggccgcttcccgcacctgaacatcctcgacaccctgttcgtcgagaccattggcggcgacctgaccatcaaggtcgagaacaacaccgaggtcggcctgggcatctatcgcgaagaggtgatggacaagacccagtcgctggacgacgcgcaggttgaattcgcccgcctcggcagcctgctgctgctcaaggtcctgccctatcgcgaagagcagtggcgctacctggtgttcaacagcctgaccggcaaggtcgagcgcatcgacgccatcggcctggcctgcatccagttgccggaggaccacgggatcatattccccggcggctactacctgcagaacggcgagtaccgcaccttcgagcaatccatggaaggcatgcgcttcaagcgctcggtacgctcgcccaacggcgaggacgtgcagtacgttttctaccatcccgagcaggggcggaacgtgctgctcacctacaacctgatcaaccgccagttgcagaatccgctgttcggccacggctacgcgcgcctggaggacggacgcatggtgatcttcgccgccgaaggcgaggaaccgacccgcatccatccgatgcaggtctggcagacgccgttctgcaccgaggagtacgcggcccgccaaccggcgcgtagcggtttcctcgggcggatcggcaatgccgagctggtgcgcggcatctccgacctctacgacctgtgccgggagatcgagactccggcagtttcgatccagcgctactcgctgctgtgccagaacacccagcgcctgttcgacgtctaccactggctcggcagcgaccaactggacggcttggcgccgctgttgcgcgaagtggcggcgaccgccgagctggtgctcgacgaatacgagaaggtcgagagtatccgccgccagtcggcccaggcgatggtcgacgcggaggagcggcacaaggcgctgctctccggcttgctgcccgacggctgggaccgggtgcagcagttcgtcgacgggctcaacggcatcaccgcccagcgtggcttgctgctgaccatccgcgagtaccgctacatcgacgtggcgcgactcgacgccatggaggccgaactgctcgcggcccacgagcgggtggccgccgccactgcgaccttcctcgccagcgaacaggccctgcagcccttgctggagcgcctgcagagcctcgatggcgaggcgcagaaagccgagaccgtggcccagctcggcgagccgctggcggccctggaggcgatggctggcgacctcgacatgctgtcctcgctgatggcttcgctgcgcatcgacgacgcgacccagcggacccgcatcatcgagtcgatctcggagatctacgcccgcctgaaccaggccaaggcgcgcgccgagcagcggcgcaaggggctcggttcgagcgagaccgtggcccagttcggtgcccagttcaaactcttcggccagggcatcaccaacgccctggcccaggcccaggaccccgagcgctgcgacgagcaactgtcacgcctgctggtgcaactggaggaactggaaagccagttcggcgaccatgagcagttcctcggcgacatcctggccaagcgcgaggagctgctggaaaccttcgaggcgcacaagcagaccctgctcgacgagcgccagcgcaaggcccagggattgctcgacgccgcccggcgaatcctcgacagcctgcaacgacgcaccgcgcgcttcacccaggcggaggaactgaacgcgttcttcgccgccgacccgctgatcctcaagttgcgcgaactggccgaacgtcttcgcgaattgaaggacagcgtcaaggccgacgacgtcgaggcgcgcctgaaggccgcgcgcgaccaggcggtccgcgcattgcgcgacaagagcgagctgttcgaggaaggcggcgacgtcatccgcctgggcccgcgccaccgcttcagcgtcaacacccaggaactcgacctgaccctgatgccgcgcggcgacgcgctgtacctgcacctgaccggcaccgatttcctcgaaccgctgcaggacccgcggctcgatgagttgcgcgggttctggcaggtgaacctggagtccgaatcggagacgctgtaccgcgccgaatatctcgccggcgaagtgctcgccgccgccgacgcgggccgcgatggcttcagcctggagcgcttgcaggcgctgctggcgcagccggacgagctggcgcgggcgatccgcgatttcgccgcgccgcgctacaaggagggctacgagaaaggtattcacgaccacgatgcggcggcgatcctggttcgcctgctgccattgcgcgagagtgccggactgctgcgttacgcgccttcggcgagggccttcgccagcctgttctggagccgccggcgcgaggagcgggaagtcgccggctggcccgagcgggcacgcagcagccgcagcatccagcagatgttcggtcgtgacgacggcctgctcgcccttcgcggcgaagtggcctcggcgatgcgtgcgctgctcgccgaacagcccatcgcgctggacccgcagcatatcgacgaggcggccgagtacctggtctgggaattgtccgccgagcgtcccgaattcaccttcagcaaatatgcccggcaattgcaggaaggactcaagctgcgcctgcaaggcgcgcgtctatgggacgactaccggcagaccctggagcgtctcggcgagcggcccgccgcccagtgggaactggccggcaactggctgcgcggactatgtggcgacgccgagttccagccgctggcggcctacctggacgaggcggtggcgctctcgttgctggacgaggagatgccacgacggatcaccgaggtcgacctgcgcttccaggtcgacggcctgatgggcgagcatccgcgcatcgtcgaacgcggcctggcgctggcggtggacgacttcttcggccgcctgcgtcgccatcgccagcaattcctgccggggctgcggcgctaccaggcgctgcgccaggagatcgtcgaacacgagcgcgaggcattgcgcctggccgagttcaagccgcgaccgctgtcctcgttcgttcgcaacaagctgatcaatgacgtctacctgggtgtcatcggcgacaacctggccaagcagatggggacggtgggcgagaacaagcgcaccgacctgatgggcctgctgatgctgatctccccgccaggctacggcaagaccaccctgatggagtacgtggcgcaccgcctggggctgatcttcatgaagatcaacggtcctgccctcggccacgaggtgcgctcgctcgaccccgggcaggcgccggacgcgacttcgcggcaggaactggagaagctcaacctggcgctggagatgggcaacaacgtgatgctctatgtcgacgacatccagcacacccatccggagttcctgcagaagttcatctccctctgcgacggcacgcgccgggtggaaggggtgtggaagggccggaccaagacctacgacatgcgtgggcggaagttctgcgtggtgatggcgggcaacccctacaccgagtccggcgaggtcttccgcattcccgacatgctcgccaaccgcgccgacatctacaacctcggcgacaccctcagcggcatgcaggaggcgttctccctcagctacatcgagaacgccctgacctccaacccggttctcgcgccgctggccacccgcgacatggccgacgtctatcgcttcgtcgccaaggccgagggcaagccgttctccagcaacgagctggcccacggctacagcggtgccgagatcaacgagatcagcagcaccctgcaacgcctcatgcaggtgcgcgacgtggtgctcaaggtcaaccagcagtacatcgccagcgccgcccaggccgaccagtaccgcagcgagccgccgttcaagctgcagggcagctaccgcaacatgaacaagatggcggagaagatctccgcggtgatgaacgatgccgagctgctgcaactgatcgccgaccactaccagggcgagtcgcaactgctgaccaccggagccgaggagaacctgctgaagctcgccgaactgcgcggcaaccagagccccgagcaggccgagcgctgggcgcagatcaagcgtgacttcctgcgcaacaagtccatgggcggcagcgacgccgacgtcggcggacggctggtggcgcagctcaacgatctggtggaaagcgtccgtggcctggctcgcgaaccccagccggtacaaccggcgccctgggacgagttgctggctggattgcgccagctcggccagggcgcgccggcgctgaacgtcgaggtgacggcgcctgcgcagccgggcgtgcagcaggtgctggagagccttgccgcctgcctgcaggacagtttcctgccgctgatcaaggtgatggaccgcaagatcgacgtcgacctgcgcacgcacaaccgcatcaacgagatatccagccgcctcgacgaactgggccggttgctgggcggcgagcagaggccgctggaggacgatcaaccctga

SEQ ID NO: 340426 - DNA, 231 bp, Pseudomonas aeruginosa
atgaacgtcccgtatccgctccctacccgcaagccgtacaccggtgagcgcgtcaaggaactcttccacgctgccggaacggccatctccgcctgggccgaggccaatggctacacccgccatcaggtctacatggtcatcaacggccagttcaaaggccgccgtggcacctcccacgaaatcgcactgaaactcggtatgaagctctccgtcgagcagctcgccgcctga

SEQ ID NO: 340427 - DNA, 525 bp, Pseudomonas aeruginosa
atgaacgcaaggatcgccgcattgggactgctcctgcccctggccgccggcagcgccgtggccgcggaggagggcagctcggtcaaggatgcggccaaggccgcggtgtcctcggccatcgagactggcaagaacctcctcggcggggtcagcgagggcatcaccagcggccgccagtcggcccagggcgctgatggcgccaaggtggtctccgacaacgccggcttcgccgagatcggccaggtcgaagtgctcaagaccgagccgcgcgaccagcaactggccgtcaccctcggcttcaagaacgacggcgacgccaccgtgcgcctgatcaacctgacccagaccggcgcgctgctggtgatcgacaacgacggctactccaacgccctggtcgccctcgccaaccccgacgacgtcaccgtcccggccaaggccggcatccgccagaccttcgtcttcgaaggcggcgcggaagggatcaaggcggtgcgcctgtggggcaaggacctgccggtgaagtga

SEQ ID NO: 340428 - DNA, 363 bp, Pseudomonas aeruginosa
atgaccgaccaagcaatcgagcaagaaatccaggccaagggcctgaccgctccccgcatcacgcctgctgacgttgaggcgaacatcgtgggtgaatacttcttcactgccgaggatggggtgaagaccgctttcaaccagcaggatgagctgacgcgtttgacgggataccacgccgagctgggattgctgaccttctgcgtactggtactgaagaacggcttcaccgtcaccggcgagtcggcctgtgcgagcccggcgaacttcgacgcggagatcggccggaaaatctcccggcagaatgccgtctccaaaatctggccactgatgggctacgaactgcgtagcagactggctgactga

SEQ ID NO: 340429 - DNA, 573 bp, Pseudomonas aeruginosa
atgcgcgacagtaatgttttcgagattaagagattggctgatgggctggacgctgctttgaaggcgaccgatgcctatgagtacctaatagatcggatagccgctgtcttcctgaaatgcagcctcgtccgaactgtcggcctattcgatgagatggcagtcctcgaagcgatcaacgagatcgatctttgcatcaaagcctctggcgaagactcgcgcgtcgcgggcttgtgtcgctacgctttggagctatctggcgtaggggaaaacgaattgatgatcgacggtgacgggaaggtgaagcgccgcatggtttacttcattcggaacagtcgtggatcgatcaagatcggttcgagtatgaatgtcgaggatcgcctacatcagcttgaaactggagctggcgaacgcctcgaacttatagcctctgtaccaggatccttcggtgcggagcgagagctacacgcgcggtttactggtttgcgcgagcatggcgaatggttcagccctggggaggaattgctggagtacatcaaccagcttcaattgaccttcggcctcgacgccgcctaa

SEQ ID NO: 340430 - DNA, 207 bp, Pseudomonas aeruginosa
atggctcaattcaacatcgattcccacctgagcgacggcaagagcctgcaatggcttgccctgccggacgccggtgaacagcctctggacgttgaggtgaaggttcgccaggcggcaatgaagaagttcggacagtccgtcttcttcaattgctgggaccacgttgttgccagcaacggctacatcaccgtgcggatgcatgcgtga

SEQ ID NO: 340431 - DNA, 240 bp, Pseudomonas aeruginosa; identical to SEQ ID NO: 329296

SEQ ID NO: 340432 - DNA, 360 bp, Pseudomonas aeruginosa
atgaaggagatccgttcgcagcagatccgccgccggaacaacatgctcagcgagctggccgaactgatcgtcgaagcgttcgtgcgcaacgggattcctcgggagaaggcggtgcccgagtcggaggaggtggcgttccagctgcatcggcgctgggccggtttgacatttgttttcccggtcaaggatgacctggctcgcaagcgtctggagttgcacatcttgcagcgctacgatggatcgaacgccgacaagctggtccaggagttcggaatttcagaagggctgatctacgaaatcgtcaggaagcaccgcaggcagcgaaaggatcagatgacgctttttgacccggccgaatga

SEQ ID NO: 340433 - DNA, 1200 bp, Pseudomonas aeruginosa
atggaacattcgcccaaaccgctggccggcctgaaggtggtcgagctcggcaccctgatcgccggccctttcgcctcgcggatctgcgccgagttcggcgccgaagtgatcaagatcgagtcgcccgacggcggcgacccactgcgcaagtggcgcaagctctacgaaggcacctcgctgtggtggttcgttcaggcacgcaacaagaaatccctgaccctcaatctcaagcacgccgagggccaggcgatcctgaaacgcctgctcggcgatgccgacatcctgatcgagaacttccgccccggcgtactggaaaagctcggcctgggctgggatgtcctccacgcgctgaacccgcgcctggtgatggtgcgcctgtcgggcttcggccagaccggcccctacaaggaccagccgggcttcggcgcggtcggcgagtcgatgggcggactgcgctacattaccggcttcgaggaccgcccgccggttcgcaccgggatttccatcggcgactcgatcgccgccctgtggggcgtgatcggcgcgctgatggcactgcgacaccgcgaggtcaacggcggagagggtcagatggtcgacgtcgccctctacgaggcgatcttcgccatgatggaaagcatggttccggaattcgacgtgttcggtttcatccgcgagcgcaccggcaacatcatgccgggcatcaccccctcctccatccacaccagcgccgatggccgccacgtacagatcggcgccaacggcgacgcgatcttccgccgcttcatgcaggccatcggccgcgacgacctggccagcgacccgcgactggccagcaacgacgggcgcgatgcgcgccgcgacgaactctatggggttatcgaccgctgggtcgcctcgcagcccctggaggaagtgctggcggtgctggcgcgagccgaagtcccggccagccgcatctactccgccgaagacatgttccgcgatccgcaattccttgcccgcgagatgttcctctcggcacgcttgccggacggtaagccattccgcatgcctggcatcgtgcccaagctgtccgccacgccaggctcggcggattgggtaggcccggaactgggcgagcataccgatgccctgctcgccgagctgggctacgacagcgagggcatcgccgccctgcgccgggaaggcgccatctga

SEQ ID NO: 340434 - DNA, 123 bp, Pseudomonas aeruginosa
atgaccatgcgcaaggctctgaccgctatcgcactcgtcgcgctgcttggcctggccactgttgccgccggcgccgcactccagccgttcaagaccctgttcatctgggaggtatgccagtga

SEQ ID NO: 340435 - DNA, 723 bp, Pseudomonas aeruginosa
atgaccgatgttattcagcttgttcactccgccggcgaggcgcgcgtcgatagtcgcgtgattgccgagcaactaggggttaagcacaagcacagctttgcccttgtcacgcgctatcagcggaagtttgaggaacttggccaactgccgtttcaaaaggaagttggtcggcgggcccaaggcggcggcagggctgagcgtttcgcattgctgaatgaagatcaggcgtactttctcctgagcctttcccggaatagcgacctggtggtcgacctcaagctccggctggtgaaggctttccgcgacgcccgtaatcaagccggcctggacagcgtgatgggtatgatcctgctgacggctcctgctccatgggagaagcgcttcggcgatgactactaccgtgctctggccaggatcaccggcaccgttttcgaaggtcatgccaagggaacgccggctatctatggccagatcaccgaccgctggatttacgccgccatcctgccgaaggaggtgcatgccgagctaaaggctcgccgcggtgaaagcgaaaggatgcaccagtggctgaccgatggaggccgtgatcggctcgaccagcaaatccgcatggtcacgctgatcgcggatagttcgattgaccgcaaagacttcgaagctaggtgcatgcaggcattcgggctgccgggccagctccgcctgatctatccgcaagccgcctaa

SEQ ID NO: 340436 - DNA, 330 bp, Pseudomonas aeruginosa
atggagatcgactgggatgccgatccatccatcctggcgaaggtgaagcttcaggcacgtatagacgccgatatcaccgatgacgacgatctgctgaaaggctatgtcgccgcggcgctttcccatgtcgagcagcactgtgactgccgcctagtcgaaggcgagcccactgctccggatgagatcggcctgacgccggatgtgtggcaggcagtgtatttgcttgtcgcgcactggtacgccaatcgagagggagccgtcgccgatggttctgtaaccgtggtcccgttggccgttgagcgcttgctctggtaccggaagaggttctga

SEQ ID NO: 340437 - DNA, 339 bp, Pseudomonas aeruginosa
atgcaggctggtcggttaaggcacctggtcgcattccaggtgaaggagaaaatccgtgatccggatagcggcgccgtcgactatgcctgggtggatcgttggccaaaggtctatgccgccgtcgagcccctttctgctcgcgatctgatcgctgcgcaagcggcccagtcccagctttctgctcgcatcgtcatccgctaccgggaaggcgtcttgcccactatgcggatcgtacaccgcggtgttccgtacaaaatcgagggtaagccaatccctgataagaggtcgggacgcgagtatctgaccattctcgtgagcgagggggtaaccgatggctga

SEQ ID NO: 340438 - DNA, 474 bp, Pseudomonas aeruginosa
atggctgatatagccgagtcacgcatccacggattggatggcgttgtggagaagatgcgatctcttgcgccaaggctgcaacgcaatggcctgagaaaggctgcgcgcaaggctatgaacattgtccgggatgccgcgcgagaaaaggcgcgagctgtcgacgatcccgaaacgcccgagaagatttggaagaacatcatcacccaggagtcagccaaggaggggcggcgtgagggaggggtggtgatgaaggttggcgtgcgcggcggtgccagcagaaaccagcacagcaaggatgcgagtgggaacccaggcggtgataccaggcactggcgctatctggagttcggcaccaagtactcgccggcgaagccattcatgcggcctgcgctaccagagaacgttgcgaaggtcactgatcggttcgtgtccgaactgagcagcgagatcgatcgcgcggttggggggcgttga

SEQ ID NO: 340439 - DNA, 369 bp, Pseudomonas aeruginosa
atgtttgcgccaatctactctgtcgtttcaggggacgcggcctgccaggcgttgcttgggggttccccagacacgcgcatctttccgttcggcgaggccgacgaggggactctatatccctatgcggtttggcaggtggtcagcggttcgcccgagaactacctggcaggcctgccagacgccgatggtgtaaccctgcaggtcgatatctacgcgagcacgtccgcctctgcattcgcggtagcgaaggtcctgcgcaacgtgatcgagaagagtgcctacatcgttcgctgggggcctcagcctcgcgaccctcaaacgaagtcgtatcgaatcagcttcgacgttgattggctgataccaagatag

SEQ ID NO: 340440 - DNA, 495 bp, Pseudomonas aeruginosa
atgtccatgcttacccaagggacgcagctctacgccctcgtgccgcccgcctcgggcaccggagcgctcactgtaatggaggtggagtgcatcacctccttcaaccccggcggaaacccggcggaccagatcgaggacccgtgcttgagcgagacctcgcgcaagtacaagaaagggatgcgcactcctggccaggctaccgttggcctgaatgccgatccgcgcaatgcaagccatttgcgcctctaccaactgtccgaagatgacagcgataccatgatccagttcgccattggctggtccgatggtgtcgacgtagcccccactctcaacaccgaaggggatgccttcgtgcttcccccgagccgaacttggttcaccttcgagggttatgtcagcgatttcccgttcgacttcgcagccaacaccttggtcgccacccaggccacgatccagcgctccggcaaagggcagtggattccgaaaaccgcgtaa

SEQ ID NO: 340441 - DNA, 822 bp, Pseudomonas aeruginosa
atgatggcgaggaaacccgccgcgctgcgctgcttcgaggcagcggcgcggctggagaacttcagccacgcggccaacgaactgcacctgacccacggcgcggtcagccgcgccgtccgcctgctcgaagacgagctgggcgtggccctgttcgagcggcgcagccggcgcgtgttcctgaccgatgccggccgcaccctagcgcgggccgtgggcaacgggctggatctgatgcgccaggccgtcggcgagctgcgcgccagcgcccgccagggccggcgctgggtgctgtcgtgcgagccgacactgctgatgcgctggctgatcccgcgctggccggacttccaggcccggcatccagggatcgacgtgcatctggtcgccggcggcgggccgttctccttcgccagcggcatcgacctagccatccgccgcgactacttcccctggcccgagggctaccacgccgaacccctattcgcggaaaaggtcggcccggtctgccgaccggacaaggtggcgacctggttctccatgaacaaggccagcgccgcgctcaaggccggcgcgccgcgcctgcattcgcgcacccggccgggcgcatggtcgtcggaatgggtggtggcccgaggccagcccgtgccggacgcgccagggctgaccttcgagcacttctatttcagcttgcaggcggccgtggccggcctgggcgtggccatcggcccgtggcatctggtgcgcgacgacctcgacagcggtgtgctgacggcgccgctgggctttgtcgaggacggctcgcgatactgcctgttgtcgccataa

SEQ ID NO: 340442 - DNA, 999 bp, Pseudomonas aeruginosa
atgcctgccgggctgctgccgcagatcagtcatggcctgggtgtctccgaagccctggccgggcaactggtgacgctgtatgccctgggttcggtgctggcggccatcccggtcatcgccgccacacgcggatggaatcgccgcccgctgttcctgatggcgattggcggcctcctggtgttcaacaccatcacggccctgtccgcccattacggtttgacgctggccgcgcgcttcgtcgcgggcatggccgctggcgtggtgtggggactgctggccggctatgcccgacggctggtgccgccccgtttgcagggtcgggcgctggcagttgcgggtgtcgggcaacccatcgcgctggcgatcggcgttccgttgggaacgtggctgggcacgctgttcgactggcgtggcgtgttctggatcatgtcggcgctgtcgttgctgctgtccgcgtgggtgcggctggcggtgccggattttgccggccagtctgccgggcagcggttgcccattcggcgcgtcttcacgatgccgggcatccgcccggtgcagctggtgctgttcggcgtggcatccattgctgggatctggttcaccggcctgctggtggatcgctgtctgcgcgcacttaccctgtcgagtcttgccgtgttcgccgccgctgcgttggtgctcgggttctcgggcggttctgccgtcgcggttctgattggtgttgcagcctggggcctgacctttggcggtgcgcccaccttgctgcaaacggcgctggccgacaacgcgggcgaagcggcggacgtggcgcagtccatgctggtgacggtcttcaacctggcggtcgcggggggcggcgtggtcggcggcatcttgctggagcgccaaggggcggcctcgctaccgtgggctctggccgcgctggcgttgctggctctggccgtggcgtggtcagccaggatgcatgccttccggcccggccatcggatcgcggcgggctga

SEQ ID NO: 340443 - DNA, 909 bp, Pseudomonas aeruginosa
atggccttgcgcaacctcgatgacctggcggtgttcgtgcatgtggtggagcgccagagcttctccgccgccgcgcgcgacctgcacctggcgcccaagacagtgagcaagcagatcgcccggctggaacaggcgctgggcaccacgctgttcgagcgcaacacccgaaacctgcgcatcaccgacgaaggccgcgccatcgccgagcgcgcgcgcgtggcgctgggcgtgctggatgaagtgcaggaactggcgaccggcggcagccgggaactgaatggcatcgtccgcctgactgcccccacgcccttcggccgcaagttcgtggccccggcgattcatgacttctgccgcctgcatccccgtgtcggattcgacctgcgcctgtccgaccaggtgcaggatctgtatggcggcgacctggacttggcgatccgcatgggcgagctggccgactcgcggctggtggcgcggcgcgtggccagtaaccggcgcgtcctggctgcgtctccggcctacctgaaagcgcagggaaaccctgaaacaccggaagatttggcgcggcacaactgcctggtattcgcctatccgggcttgctgcaaaacacctggccgctgcgcaaaggccgccgcgagaaacccgtcaccgtcggcggcacgctgtgcagcgacagtggtgacgtgctgcatgcgtggtgcctggccgggctgggcatctcgctgcgcgagacctgggacattcacgaagaactgcgcgacgggcggttggtgcgcgtgctgcctgagtgggaagctgcaccctcgaagatcagcatcgtgcgggcgcggcgcgaacccgtgccgcggcggctgacggcattcagtgatttcctgctggaacgctggcgcgatgcgccgtgggatcggtga

SEQ ID NO: 340444 - DNA, 696 bp, Pseudomonas aeruginosa
atgaaccagcgcattcttttcgtcctcaccagccacgaccgcaaggggccggctgatgccgccgacgcggcacccagcggcttttacttgtcggaagtgacgcatccgcacgcggtgctggccgcagccggctacacggtcgatttcgtcagccccaagggcggcgccacgcacgtcgatggcctcgatctagacgatccggtcaatgccgcgttctggaacgatgcaaccctgcgcagcgccaccgaaaccacgctggcgccggcacaggtcgatgccgacgcctatgccgcgatcttctatgccggcggccacgcgacgatgtgggacttccccggcagcaccgagctggccgcgattgccgcacgcatctacgagcgtggcggcatcgttgcagcggtctgccacggcccggccgggctggtgaacctcaagctgtccgatggccgctatctggtcgaaggtaaagacgtgtcggccttcaccaacgacgaggagcgcgcggtcggcctgtacgacaccgtgccgttcctgctggccgatgccttgcaggaacgcggtgcccgccacgtgcccgcgccgaacttccaggcgcaggtggtggtgagcgaacggctggtcacgggccagaaccccgcttcggccaagggcgtggccgaggcgatgctgcccctgctggcagcaggacgggcctga

SEQ ID NO: 340445 - DNA, 1194 bp, Pseudomonas aeruginosa
atgaacgagcgcatgcccttcgtcatctatgtcttcgcgctctgcgcgtttgccctgggcttcaccgagttcgtcaccatcggcctggtgtccaccatttcctctgacctgcatgccagtgtcagccaggtcggcacggcggtcacggcctatgcgctgggcgcggtgatcggcgcacccggcctgacggcgctagccacgcgctggccgcgcaagcggctgctgctggtggcgatggcgctgttcacgctgggcaacgcggtggtcagcctgtccgatgcgctgacgcccatgctgattgcccgcttcgcctcggggctggggcatggcgtgttcctggccgtggcgtccagcgtcgccacccaactggcgggacggcatcgtgccggtgcggcggtggcggtggtgttcggcggcctgacgttggccctggcgctgggtgtgccgctgggcacctacctgggcagcgtgttgagctggcaggtcatcttcatggccgtggccgcgagcggcgctatcggcttcctgggcctgctggcgctgatgccgacggatcgcaacgatggctcggcgcaggccaatgcgatggatggcctgaaagccatgttcaacccgcgcctgctggccggggccggcatcaccgtgctggcctatgcggggtcgttcgcgctttacacctacatctcgcccattctgttgcaggtcacgcacgtcaccgagagcacggccagcctgttgatgctgggctatggcgtgatggcggccatcggcaacgtgtggggcggacggctcaccgaccgcaagggggcggatgcagccgtgatgaccgtgctggtcggcctgacggtggtgctgctggcgatctggctgtcggcatcatccctgccgctgatggtgttgttgaccggcgtgctgggcgcgctgacctatgcggcagtgccggccttgcaggcgcgggtgatcggcctgtcgcacctgcatgcgccgcaggcaccggcggtcgccgccgggctgaacatcgctggtttcaatggcggtatcgcgctgggttcgctgctgggcggcgccagcctggaggcgatgggcctgaccagcacggcgtgggtcggcgctgttgccgtggggttggggatcgtctggatgttgtggcagatgcggcgccccgccttcctggccgcaaggcttcaagggtag

SEQ ID NO: 340446 - DNA, 804 bp, Pseudomonas aeruginosa
atgcgaaccctggagcgaacccgcgccgatctggcggccttcctgcgcgcgcaccgcgagcgcctgtcgcctgccgacctgggcctgcccagcggtggccgccgccgcacgccagggctgcggcgcgaggaagtcgccgcgctcgccggggtcggcctgacttggtacacatggctggaacaggggcgcgacattggcgtgtcggccacctttctggacaacttggcgcgggtgctgaaactggatgccgccgagcgccgccacctgttcctgctggcccacgaacgaccgcccgccgagccgggcaagacgtggtgcgtgctgccgccactggtgcggcgcctgatgcacgacctgtcgcacccggccttcgtgctcaacctgcgttgggacgtgctgggcttcaacgcgccggccgatgcgctgttcggcttcgacacgcatacgcctgagcggcgcaacctgctctggctgctgttcaccgattccaccctgcgtgcctgtttccacgaatgggaagcacaagccccgctgatgctctccagcttccgccgcgacttcgcccgcgccacgcaggaagccgacattcacaagctggtggacgagctggaacgggtgtcgccggagttcaaggcgtggtggcggacgcatgacgtgcatgcgccctgcaacggggtacgccagttggtggtcgagggtcaggccgagccgttcgagcacacctcgctgaccgttgacgaagaccggcacctgcggctggtggtctatgcgcggcagcaggaaggtagtgcatctgatcgctga

SEQ ID NO: 340447 - DNA, 1485 bp, Pseudomonas aeruginosa
atgatcgcgtctttaccctggatacgcaagatgaactcgaattcctgccttgcgacgccgcctgcgcgcgccgtcagcggcccgccgtggctcggtttgtccgtgctgctgctggccggtttcgtcacgatctttgacctgttcgtggtcaacgtcgccattcccagcatgcaggccgggctgggcgcgagcttcgcgcagatcggcttcatcgtggccggctacgagctggcttttggcgtgctgctgattaccggagggcggctgggcgacctgttcgggcgacggcgcctgttcgtcgtcggcatggcgggcttcacgctggcctcggccttgtgcgggctggcgcccagcgccggcttcctgatcggcgcgcgggtgttgcaggggctggccgccgccttgctgttcccccaggtctatgcgtccatccgcgtcaacttcgacggcgacgacagccgccatgctttcggcctgctggggatgacgctgggcctggccgccatcgccgggcaggtgctgggcggctggctggtgcatgccgacctgttcgggctgggctggcgcagcatctttctcatcaacgtgcccatcgggctgttcgcgatcgcgtcggcgcgccacatccccgaatcccgcgcaccgcagcgcccggcactggactggacgggcgtggcactggtcagcgccgggctggcgttactgctggtgccgctgatcgaggggccgggccaaggctggccggcctggagcgtgggatcgctgggtgtggcggcggcgctgcttgcgctgttctaccggcagcaggaacaacggcgtatggcgggcggcttgccactggtggacatgcgcctgctggcccagcgccgcttcgcgctgggcgcggtgctggtgctgctggtctattccacgtccagttccttcttcctctgcttcgctctgttggtacagaccggactggggcttgaccccttcgcagcgggcagcatcttcgcgccgtgcagcgcgggcttcgtgatggcatcgctggccgcaccgcggctggtggcgcgctggggagcgcgggccatcgtcgcgggtgcgctggtctatgcggcttccatcgggctattgattgcacaggtgcagatcgcgggcgcggtgctggtgcccgcgcggctgattcccgtgttggtcgtggtaggcgcgggtcagggtttcatcatgaccccgctgctgaatctggtgcttggttttgtcgatgaagcgcaggccggcatggcgtcgggtgtgatctcgaccgtgcagcaggtcggcgcagcgttgggcgtggccgtggtcggcatcctgttcgcagcggcgctggctgccgatgaaggcgtggccgcacaggctggccagtacgcatcggcctttgtggccggcatgctctacaacctgggcgcggccctgatcgtttgcgtgctgttgctgatgctggcgagaacgcagcggtctgcggactga

SEQ ID NO: 340448 - DNA, 726 bp, Pseudomonas aeruginosa
atgaagccgtcgatcatcctttccgcactcctgctggcttcagtccagtggcccgcgtgggcgcagcagccagccacagctcccgcccgcaatgcgcagagccaggagcgcccgctggccgcccgcgtcctggacgaccgagtagcaagcaactggggcctccaaccccaggaatgggcgcgttaccgcgagctgatggatgggccactgggcatctactcgccaaacctggacccgctgtctgccctaggcatcgaagcacgcaccgacgaagaacggcggcgctatgcagagctgcaggtgcaagtcgaggcacgccgcgtcgagaagctgctcgcctaccaacgtgcctacgacgaagcctggcagcgcctgaatcctggtatgcagcgcgtgaacctgcccgacgacgggccgggcaccggcaccgcgcgcggcagcggtcgcatagcggtgttcgtcaaggacggctgcgcggcctgtgggcagctcgtgcagcggctgcaatcctcgggtgccgagttcgacctgtatatggtgggcagccgccaggacgacgcacgcatccgcgactgggccaagcgcgcgcagatcgacccggcgcgcgtgcgcagcggcagcattaccctcaaccacgacggcggccgctggctgtcgctgggcctgcccggtgacttgcccgcggctgtgcgcgaggtgaacggccaatggcagcgccagccgtag

SEQ ID NO: 340449 - DNA, 870 bp, Pseudomonas aeruginosa
atgaacacccatacccaaactacgcacgaagtcgctaacgctcgcctcacgctggacgtggcctacctgctcaatgacgaggccgcaccggagatgctggcccggctgcgcggcatgtgcgaacgcgccatcggcgagggtctgctgaccggcgacaccgccgcggaagtggatgcctggtcgatcgacgtgtccgtggcgcagccggcgactgaccgcgatgcgctggaagccgagatcgccgccttcatgcaacagcgcattgaggatggcggtctggacgctgaagacatccccgtgcgcctggcgcgctatggcctgatggcctccgatgcattcgtcgccgaaatgcgcgaacgcatggacatggccaacgaagaaacccagggccaagccctcattccttcggccgacccagccgatgaaggcgagatcgaaagccaagtcgccatcgcctgcatcaacgcttcgggcatgtccgagatgccaatcttcaccgtcaggaccacccaggaggaatacgacctgggtatccaccgcgacaaggccaaagacctcgccgaagaagccgggtacgaatggccattcgtctgcttcgacgctgccgaacaaggagccatcctgtcagccgcccgcgaactgggcctcgtccggcaggtggtcgtggtcgatatgaccgacggccagatccactccatccgctgcgatgccggcgagatcaaggtcatctgttacgacacccgcgataccgacgagtattcggcggcggtggcggatcggcccctcggcgagaacggccagctcgtgcgctgctgggcgcatgcccaactggcacaggtcgatcccggcttgaagctggctcgggattga

SEQ ID NO: 340450 - DNA, 327 bp, Pseudomonas aeruginosa
atgtccaccatcgcttgcgattcccctcgctccgctctggatgaacccgcttggcgggctctctgcgagacggaagccgcacaagccaccaaggggtgcggactgtctcacgactactacgtcgaacgcttcagttcggcgatcgacgagcaagttgctcgattgcccgaagaccaacgcgcacaagcgctgcagatcgcacaggaatgggactacgcgacaccggccgaaaggcaggaagcccaggactggaacgctgaacacggctattgctcgcacggaatcgaactgggttattgcccggccggttgcgattcggactactga

SEQ ID NO: 340451 - DNA, 249 bp, Pseudomonas aeruginosa; identical to SEQ ID NO: 292134

SEQ ID NO: 340452 - DNA, 753 bp, Pseudomonas aeruginosa
atgcacgagaacaagaatgatgcaccaacatcaaaggtgttctatcgcccgatcgaagcgtccatccgctgggccggggtgctgcgatacgagcaggtgatcctggcttcgatttcgtcgccaaggcgcctgccgcagtcgttggactgtccacgttgtgacgagctgcggctttgcaccgaacgcatcttcgacggcatcctcaatggagaactgcccttcggacggaacggcatcacgacgcgcgattccgcgctgatcgactcccctgatctgacggtgcgccacgtcgatctgaagagctggatgcgccagcactatcccgagcaacgaccgtgcttcctcttctcccggagcgagcgcatcgcccatcccttcatctcggtggaaactgggcaggcgatgctagtcgagcgcctggccctgaagtccaccttggaccagtacaaacgccaactgcatgagttgcaggaaaagcacggggcgcttctcaagcagatggcgccctctactggcgcacagtgcctgatcagtgatcgcgccgaagccacctacctgaacattatcggcagcatgctggacctgatgctcggccagtcgccttcgggcgtgccgtactccagcttcaagacgcaggaggcggtggtcagtgcattggtcgcccatcacagcggcgcaatggggatcgcggagcggacgctaaacggcaagttcgccactgccagacgccggctgcgtagcgcaacagtctga

SEQ ID NO: 340453 - DNA, 597 bp, Pseudomonas aeruginosa
  misc_feature (120)..(129): n is a, c, g, or t
atgcaggctatggaatccgtcgagcctctgaggttattcgttctgtactcaagagcacagctagcggaggcactatttcaactctggccgcttacggaggccgtcaaggagtataacagnnnnnnnnnncaaacattcagcccatctaacgtagttatcatggtggctggctaccgcctaactggcctatacagtgtcaactttaaatggaataaagctcccttccgtatgattcatggaatcaggggcagtaagacccgcgtagccaaccgagatacttcggggacacttactctcgaagttgctcagacctctactaccaatgacattctcagtcaaatcctagccggcgacagaaacaaccagagcgcccgccttgagattgctattaaggacactgccgggacaacccgactaacaactactcggtcctacatccgtgcatatcctgaactcaatttctccggagaagcccaatcccgtctatgggaaatcgatgttctcgaatggtcgagtggtcgagtaggcggcaacgccgggacagcttttaacatcattgaaggactccgagacggtgttagcaccttggggttctaa

SEQ ID NO: 340454 - DNA, 669 bp, Pseudomonas aeruginosa
atgctcaacgcccctaacctgggcatcgccccttcggcctccgagatcatcgccaagcacctgcgcgaagcgatcatcgccgggcatttcgccgaggacgaaccgatccgccaggacgacatcgcgcaactcttcaatgtcagcaagattcccgtccgcgaggccctcaagcgcctggaagcggaaggcctagtgctgttccagcgcaacaagggcgcggtggtgacgcgtatttccgaaccggaactggcgcagatgttcgaagtgcgggtgctgctcgaggcgcaggcgatccgcctggcggtgccgaacatggacgagaccaccttcgcccgcgccgaggcgatctgcgccgacttcgtcggcgaagacaacgtcggccgctgggccgaactcaactggcaactgcacgcctgcctctacgaaccggcacagcggccgttcctggtcaacctgatccgctccatccacgacaagctggaacgttacctgcgcatgcagatgagcctgtccgaaggcaagcagcgcgccgaccaggaacaccgcgagatcgtcgccgcctgtcgcgccggcgatgctgaacgggccgcggcactgatcgaggcacatatcgtcggggtctgccggaccctctacgaacacctgccgaaccgcccggccagcacctga

SEQ ID NO: 340455 - DNA, 363 bp, Pseudomonas aeruginosa
atgaaggatatccgttcgcagcagttccgccgccggaacaacatgctcagcgagttggccgagttggtcgttgatggcatgcaggagtgcggggttcctcgggagaaggcggtgtcggtgtcggaggagatagcgttccggcttcatcgccgttgggctggtttgacgtttgtttttccggtcaaggatgagttggctcgcaggcgtctggagttacacatcctgcagcggtacgatgggtcgaacgccgacaagctggtccaagagttcggaatttcagaaggtctgatctacgagatcgtcaggaagcaccgaaggcagcggaaggacgatcagatggcgctttttgacccggccgaatga

SEQ ID NO: 340456 - DNA, 1431 bp, Pseudomonas aeruginosa
gtgtccgaccccaacgggctgacatgggcagccaccctcgtgtcgctggcggtcgctatccccacagcggggcacgcggtcatctacaagcgtgaccctcgatcggccacgctgtgggtgctgctgatcgcgctgttgccgctgggcggttcgctgctgtatgggctgttcggcatcaaccgttaccagcggcgggcgcggcggctgtttccgggggcagatcctgctgttcggcaggacctcgcgcccacgatgcccgagcccgtatcgccgccgcttgccggcctggcgcacctggtgggacgcgccaccggccagtcgctgaccagcggcaaccgcatcgagccgctcgtcgatggcgagcaggcctacccggccatgctcgctgccatcgagtcggcgcggcacagcgtcgcgctggcttcgtacatcttcgacagccaaggcatcggggcgcagttcgtcgatgcgctgcgccgggctcatgagcgcggcgtgcaagtgcgggtgctgatcgacgacgtctatgcccgctggaggccccgcagcgcctaccgcgccttgcaacgcgccggcgttccggcggcgacgttcaacccgacgttgattcccgcgcgcctgcatgccgcgcatctgcgcaatcaccgcaagctgctggtgatcgatggcgagacgggtttcactggcggcatgaacatcttcagcccgtattggcggcccgatgcgccggagcaggcctgtcacgatttgcactttcgtctgcgcgggccggtggtcgcgcatctgatgcggtgcttcaccgatgattggtgcgataccacgggcgagcggctcagcaagggtttctggggcgaaccgcccgcaacggctgatgagcaaggaacctcttgggcgcgcggcatcgaggccggtcccgatgaggccctggacaggatgcgctggaccttcatgggcgctttgagcgcggcgaagcattcggtgcgcatctggacaccttacttcgtgcccgatcagccgatgatcgcggcgctgagcacggccgcgttgcgcggcgtgcgcgtcgaggtgctgacgcccgcaaacggcgaccatcccacggtgcaatgggccgcgcgcgcccactactggcaggtgctggagcacggtgtacgcatcttcgaacggcctggcccgttcgaccacagcaagctgatgctgatagacggccagtggtgctgcctgggttcggccaattgggatgcgcgcagcctgcgcctcaacttcgagttcaatgtggaggtgtacgacaccgcgctgtctacgcggctggaatccctttttgatgccgcccgtgatgcatcgaacgagatatcggccatggcgttgcgcgcccgcccgctggccatccgcttgcgcgacggggtggcccgtctgttcacccccattctctag

SEQ ID NO: 340457 - DNA, 1347 bp, Pseudomonas aeruginosa
atgtcaagagcaccagtcagagatcgcagaatttctgtccggaaaagtcgcccggcctgctgctgtcctcattgctgtagcacccgacggagaagcactagggtttgccgagctttcgatccgcccgtatgcggaggagtgctactccggcaacgttgcgttcttggagggttggtacgttgtgccaagtgcgcggcgtcagggcgtaggtgtagctctggtaaaagccgccgagcattgggctcgtggtcgcggatgcaccgaattcgcctccgacactcaacttaccaacagcgcaagcacctcggcgcacctggcggctggattcacggaggttgctcaagtacgctgcttccggaaaccgttgtgaggggcgccgcgttggtgcctaacaattcgttcaagccgaacttgcttcgttacaccaaagccatggcagaaagagcttgccatggctttggctccactacgcaagtcggcttaactcaggcgttagacatcatgagtaacgcagtacccgccgagatttcggtacagctatcactggctctcaacgccatcgagcgtcatctggaatcaacgttgctggccgtgcatttgtacggctctgcactggacggtggcctgaagccatacagtgatattgatttgctggttactgtggctgcacggctcgatgagactgtccgacaagccctggtcgtagatctcttggaaatttctgcctcccctggccaaagtgaagctctccgcgccttggaagttaccatcgtcgtgcatggtgatgttgtcccttggcgttatccggccagacgggaactgcaattcggggagtggcagcgtaaggacattcttgcgggcatcttcgagcccgccacaaccgatgttgatctggctattctgctaactaaagtaaggcagcatagccttgcattggcaggttcggccgcagaggatttctttaacccagttccggaaggcgatctattcaaggcattgagcgacactctgaaactatggaattcgcagccggattgggaaggcgatgagcggaatgtagtgcttaccttgtctcgcatttggtacagcgcagcaaccggcaagatcgcaccgaaggatatcgttgccaactgggcaatggagcgtctgccagatcaacataagcccgtactgcttgaagcccggcaggcttatcttggacaaggagaagattgcttggcctcacgcgcggatcagttggcggcgttcgttcacttcgtgaaacatgaagccactaaattgcttagtgccatgccagtgatgtctaacaattcattcaagccgacgccgcttcgcggcgcggcttaa

SEQ ID NO: 340458 - DNA, 822 bp, Pseudomonas aeruginosa
atggcaatccgaatcttcgcgatacttttctccattttttctcttgccactttcgcgcatgcgcaagaaggcacgctagaacgttctgactggaggaagtttttcagcgaatttcaagccaaaggcacgatagttgtggcagacgaacgccaagcggatcgtgccatgttggtttttgatcctgtgcgatcgaagaaacgctactcgcctgcatcgacattcaagatacctcatacactttttgcacttgatgcaggcgctgttcgtgatgagttccagatttttcgatgggacggcgttaacaggggctttgcaggccacaatcaagaccaagatttgcgatcagcaatgcggaattctactgtttgggtgtatgagctatttgcaaaggaaattggtgatgacaaagctcggcgctatttgaagaaaatcgactatggcaacgccgatccttcgacaagtaatggcgattacgaaggcagccttgcaatctcggcgcaggagcaaattgcatttctcaggaagctctatcgtaacgagctgccctttcgggtagaacatcagcgcttggtcaaggatctcatgattgtggaagccggtcgcaactggatactgcgtgcaaagacgggctgggaaggccgtatgggttggtgggtaggatgggttgagtggccgactggctccgtattcttcgcactgaatattgatacgccaaacagaatggatgatcttttcaagagggaggcaatcgtgcgggcaatccttcgctctattgaagcgttaccgcccaacccggcagtcaactcggacgctgcgcgataa

SEQ ID NO: 340459 - DNA, 624 bp, Pseudomonas aeruginosa
atggctgaacaaacagtgcatgttcccgccgggtaccgcatggacgccaaggggcgcctggtacctgaagaaatgatcaagcccatcgacctggagcgcgaccgccttgtgcaggagatcgttgccaaggggaaggctctgaacaaggcgttgctggatttcaaactggcgacattcggcgatatcgaggccttcatcactttgtcggccgagcagtaccaagcgaaggtaggaggcaagaagggcaatgcctctctggtcagcttcgacggtcgctacaaggtcattcgggccatggcagacaacatcgccttcgacgagcgcctgcaggccgccaaggcgctgatcgacgagtgcctccatgagtggacggaaggtgctcgcgcggaggtcatcacactgatcaacgatgcgttccgcgtagaccaggcagggaacatccgcaccggcagcgtgctcgctctgcgccgcctgcagatcgatgacgaacgttggcagcgtgcaatgcaggccatcggcgaggctgtccaggtcgtgagcaccaaggcgtacgtgcgtatccaggagcgggtcggggacaccgaccagtaccgctccattcctcttgatatcgcgggggtgtga

SEQ ID NO: 340460 - DNA, 219 bp, Pseudomonas aeruginosa
atggctagcaatctcgaagtagtcacccaactgatggagtactcgcgctcaggtccattgatgcaggtgatgattctccaagccctggaccagttcagcagtggcgttctggccagcccgaagggttccttgcgcaatgccattgtctcggaagaggcttggagagcttgcgcgaaggaaatccagcagaccctttccaagcacttgctggagcaatga

SEQ ID NO: 340461 - DNA, 303 bp, Pseudomonas aeruginosa
atgatcatcacgttgtcgccgtatgtcgtgctgcccggcagcgatgaacacctgatgctgagcagagatggcgatgtactcaccgtgaacggtcagtcgttcgatttcacaccgctcccggagggcagcgaactgccagccgaggctatcgggtcggaatggttcgctggccccgtcgttcgccgtgagggacgtctagagttcagcctgcggctgccgctggctgacggcgctagtgcagccgctcgctttcctgagccaatgctgatcgaggccgacggccctgtggagttgccgcaatga

SEQ ID NO: 340462 - DNA, 642 bp, Pseudomonas aeruginosa
atgaacgatgcgtccccccgtctgaccgaacgcggcaggcaacgccgccgcgccatgctcgacgccgccacccaggcctttctcgaacacggtttcgaaggcaccaccctggacatggtgattgaacgggccggtggttcacggggaaccctgtacagctccttcggcggcaaggaaggcctgttcgccgcggtgatcgcccacatgatcgaggaaatcttcgacgacagcgccgatcagccgcgccccgccgccacgctgagcgccaccctcgagcatttcggccggcgctttctcaccagcctgctcgatccccgctgccagagcctctatcgcctggtggtggcggaatctccgaggtttccggcaatcggcaagtccttctacgagcaggggccgcagcagagctacctgctgctcagcgagcgactggcagcggtcgccccccacatggaccaggaaacgctctacgcggtggcctgccagtttctcgagatgctcaaggccgacctgttcctcaaggccctcagcgtggccgacttccagccgaccatggcgctgctggaaacccgcctcaagctgtcggtggacatcatcgcctgctacctggaacacctgtcgcagcgccccgcgcagggctga

SEQ ID NO: 340463 - DNA, 1497 bp, Pseudomonas aeruginosa
atgaagaaggtttctacgcttgacctgttgttcgttgcgatcatgggtgtttcgccggccgcttttgccgccgacctgatcgacgtgtccaaactccccagcaaggctgcccagggcgcgcccggcccggtcaccttgcaagccgcggtcggcgccggcggtgccgacgaactgaaagcgatccgcagcacgaccctgcccaacggcaagcaggtcacccgctacgagcaattccacaacggcgtacgggtggtcggcgaagccatcaccgaagtcaagggtcccggcaagagcgtggcggcgcggcgcagcggccatttcgtcgccaacatcgccgccgacctgccgggcagcaccaccgcggcggtatccgccgagcaggtgctggcccaggccaagagcctgaaggcccagggccgcaagaccgagaatgacaaagtggaactggtgatccgcctgggcgagaacaacatcgcccaactggtctacaacgtgtcctacctgattcccggcgagggactgtcgcggccgcatttcgtcatcgacgccaagaccggtgaagtgctcgatcagtgggaaggcctggcccacgccgaggcgggcggccccggtggcaaccagaagatcggcaagtacacctacggtagcgactacggtccgctgatcgtcaacgaccgctgcgagatggacgacggcaacgtcatcaccgtcgatatgaacggcagcaccaacgacagcaagaccacgccgttccgcttcgcctgcccgaccaacacctacaagcaggtcaacggcgcctattcgccgctgaacgacgcgcatttcttcggcggcgtggtgttcaacctgtaccgggactggttcggcaccagcccgctgacccacaagctgtacatgaaggtgcactacgggcgcagcgtggagaacgcctactgggacggcacggcgatgctcttcggcgacggcgccaccatgttctatccgctggtgtcgctggacgtggcggcccacgaggtcagccacggcttcaccgagcagaactccgggctgatctaccgcgggcaatccggcggaatgaacgaggcgttctccgacatggccggcgaggccgccgagttctacatgcgcggcaagaacgacttcctgatcggctacgacatcaagaagggcagcggtgcgttgcgctacatggaccagcccagccgcgacgggcgatccatcgacaacgcctcgcagtactacaacggtatcgacgtgcaccactccagcggcgtgtacaaccgtgcgttctacctgctggccaactcgccgggctgggatacccgcaaggccttcgaggtgttcgtcgacgccaaccgctactactggaccgccaccagcaactacaacagcggtgcctgtggagtgattagctcggcgcagaaccgcaactactcggcggctgacgtcacccgggcgttcagcaccgtcggcgtgacctgcccgagcgcgttgtaa

SEQ ID NO: 340464 - DNA, 360 bp, Pseudomonas aeruginosa
atgccggagatcagcgccggccactccaataattcagagcccagcctagcgctgggctttttcgtttttgcgcctccccacagcgcatgcccgcagccgcgcgggcgttttattccttcgtgcaatagcccggtaagaagtatgaccgacgaccgcgtaatgtccgccgccagttacacgggtgccgggatatctgttttgtccggcctcactctgactgatgttggaattatcgtcggtatcgccacggccatcctgacgtttgttgccaacatggtgtggcaggcccgaaaagaccgcagagaaagggaactcaacgagctgcttaagcgtcaagccaagaaggcgctggacacgtga

SEQ ID NO: 340465 - DNA, 2037 bp, Pseudomonas aeruginosa
atggcagcacagatcccgcaatatcggcgcagggttggtcctgatgtaccgcaggcgccgcgtgcgcttggccagagcgttgatgcatcaggcctcgcccaaggaatcaactctgcggtaaacgcctttgtacaggtccagcggcaggagattgaggacgcgaaccgtaccgctgttcttgaggctgacaatgggctgggcgcgtgggaaaacgacacgctctttaacccggagtccggcgctttcaccaagaaagggcggggcgccctgaacattactcagtcgaccttggagtcgttcgacaagcagcgcgaacagatttcctcgaatctggcgaatgagaaccagcgcgagatgttcaaccaggcggcattgcgtcgccgcgaaggtctccaggcaaagctcgggcagtacgaattccgtgagcaacaggtctacaaggatgaggtcgataagtcctccatccaactggcaatggacactgctgcgctgaactacaacgaccctaaagctgtagaggaaagccgaagccgaatcgacgggatacttcagcttcaggctcaacgcaatggctggggcccagaggtattggaggctagacggcagaaggtcggcagcgagatgtacgccgacgttcttcagcgccaagctgccgaggatccatatcgagcacagaaaactctgaaagaggtccagggctctcttactgctgatgatctggttcgtgttggcggcatgattgaaagcaagatagaccggcttcaacaaaaggccgagatggccgctcttcgccgagagaacgcagctcagcagacgcttaacaagatcaatgctcagatagctagcggcgtacctgctagcgatgaaatgtggaaggagtggagtcggtcagtgcagggtacttctgcacagaaagattttcaggagttggtctctcaggaggttgaaactcaaaaggttctcaacgggatgcctattgatcagcaggccatgtatgtgaaccagaaagctgctgaactccaaaagaacgggggcacacttgcagaggccaacaatctggcccgccttggccgcgctatagctgcaagcaacaagatgcttggcgaggcgcctctcgaatatttccagactcgccttggcggtgaagtccaaccaatagaccttagttctgatgatctgcctgacgtgctatcgcagcgcatcaccgctattcgcagcttgcaagacaagttcgggcaaacggtttcaatgaagccactactgccgcaggaagcaaaacagcttagcgcacaggtcgaaggtatgagcccacaacagcaaagtgagctttttggcaagctacatactgctatgggtgatgatcgcgcctatgccggggcaatgcagcagatcgctcctgactctccaatcagggctcttaccggtatgctagcagggaaacaaagaagccttgtgacggagacaaaatggttcaggcctgatgttgaagttaccagcggcgacgtagcgcgcacaatggcgactggagagagcatcctgaacaagacgagagcgcagaggcaggcagatggcgcatcgacaaagtacccgattcctccagagaaggaatttgtggttgagcttgataaacaactaggaggggtatttgcaggtcagccgcaatcttatggccttgctctccaggctgttaaagcttattacaccggagccgctgccgagcagggaattgctagcgctgatgttgacagcgatcttatgaataaagccataaaggcctctattggcagcgtcgtcgactttaacggacaaaagacgatagctccttggggtatgagtggttcggactttgagcctgccgctagggcaagcatcgagcagttgctggaggaacaaggcgcatccgatcttgataaagcgatgatcgataattacacgcttcgccaggctcgtgacggagtctactacgtcatgcagggacagcagttcaaatatggcacggacggcaagccattgattatcaaggttggtggccaatga

SEQ ID NO: 340466 - DNA, 705 bp, Pseudomonas aeruginosa
atgaaaggtcagaaggttgtcggttacatgcgggtatcgactggaagtcaggagcgttcgggtctggggctggaagcccagagggattacattgaatcagccgctgaggctgaaggctgggaggtagttgaatggttcactgaggccgtaagtggctccatggctccggaggagcgccctgaactgtccaaggccgtggcctctggcttccccatcgtagtggccaagctcgaccggctaggtcgggacgtggagcacatcgcctcgttgattaagcgggtcaaggtcattgtcgccacaatgcggcacgctgatacattccagcttcacctcttcgcggctctggccgagcaggaacgccagtttattcgtcagcgtaccaaggacgctctacatgccctcaaggagcgggctgagggcggttgtgaggagagtaaggctaaggtagcccgtagggacgaagcactctccaagggccacacagacgccatcagagctaaaggccgtgaggccctaactcacaaggctgacgccttcgctgagaccgtgaggtctgacttcgaatcctgcctgttcaggggctgcaacactctgcaatcgatggctgattgcttgaatggtaggaaggtagctacagcccgtggctgtgagtggactccgattgctgtttctcgtctgatgaagcgtttaaatctcgctttctga

SEQ ID NO: 340467 - DNA, 480 bp, Pseudomonas aeruginosa
atgaccgaccacgcagagctgcggaggcttgctgaacaggctagcagcggaaactggtatggcgaagacagccaggtgttgatcggcaagcatgccgtcgcatactgcaaccacaaagtggatgcgcagttcatagggaaagccaaccccaagaccgtcctcgccctgctggaccagatagacgggctgagcgaagaactatccgcatgcaccgagcatcctggcggatgtgggtattggcgcgaggccgccaagcgtagagccgaagagcgcgaccggctgagggcgcagaacgatgcgctgcggggagcgctacatgccgttcaagccgaggtcgacgggaatctacgcccacttacccgcgacctcgtgaacatggtcagcggcttgaataacggcagtcacccgaatgacatctacgaccactgcgacgagatcgaaaggatcatcggagcagccctagaaggagcaacgcaatga

SEQ ID NO: 340468 - DNA, 309 bp, Pseudomonas aeruginosa
atggagcaagcaatgagagaagagtttgaagcgtgggtctgggacatttacgaagaaacgctctggtttgacatgaacagagagagcgttctgaagcgcaatggcgacgagtacttcggcaacttcctgaatgatcgatgggaagcctggaaagccagccgcgcggctctgagggtggaactgccggagcgtcgcgatccgttgaactggaccggagacgatgagaacccaagatctgccggcttcaacgactgccttgagcgcgtgaccgaagccctccagcaagccggaatcgaggtgaagccatga

SEQ ID NO: 340469 - DNA, 513 bp, Pseudomonas aeruginosa
atggaaacgaccatcaacaacctcaaggccatctctaccgcccgcatacggctgaaggacctgcacactcacgaagacggtgacggcgaaaatctggcctggtcctgcatcgtattcctcaagggtaagcggctggggagcgttcaggacccgggcgaagaaaagcccctgtcgatcgagatcgactccatccagcaagtagcaatggtaaaggcgctgaaggagcacgggtatcagctcaacctcgaggctgcttctcagatcgacgccagcgatacccacgaatacctggagcaggctctaccgcaaatggctgacgaggtggagtggttcaacaaggcgaagccgctcttgaagtccaacaccttgttccgcattcgaggtgacgaggaaggtacgttccgtctgatcctcgcgttgtacaacgagaagacggagcacgccctccaatcgaggtttggcgatcagcttgaggctgtcctgaacaatcagttgaaggggatcactctgtag

SEQ ID NO: 340470 - DNA, 276 bp, Pseudomonas aeruginosa
atgttcctggtctcgtctcgcgatcctgtccagatattcggtaacggtaagattcccgacctggacctgccaaagccatccttgttgctccctggggaggtagctggggctggtagccaccagaatcggtatcaggaggtggacgcacctagcccggttcaggtgttcaacaagggcgcccacgtctacggattcagccaggacccaatccggctcaagaccttgcatttcgtcttgaatccgcaggcacaccctctgggtatcctcaaggcatga

SEQ ID NO: 340471 - DNA, 237 bp, Pseudomonas aeruginosa
atgacctgcccattctgcaagcgtgatccctaccactacgtcaataacggaattggcatggagccagcggacgtcgactgctgcgaccttgggatcggcctctatctcggcagcaagcgagcttggcgagctttgcgcgacatgcgaaacccatcacctcgcgcaaaggcgagagccatgcgggtactgcgcgaagaaggaattcgccctgagaagaagatgaggatcaagccatga

SEQ ID NO: 340472 - DNA, 420 bp, Pseudomonas aeruginosa
atgaccgacaccaacaagctgaaggagctggcggagcgggcgcgcgacaaaggcgactggtacaaggcctcatccgtagatgctttcccggagttccacgttgatcaggagttcatggtggcgacctctccggatgttgttctctggctgattgccgaggttgagcggctggaggcagagcttagtcaatgcgcaagcgccctccccggcacctactacatggaccctccagacggcggcaatgtcagcattcccgagcagattcggcgcatggcgaaggatgctgcgcggtatcgcggattgcgcgatgaaggatacctccacaactgggcaagcctgcacgtctgcgatgagcatcttcgggcgcagcgaaccgatgaggctatcgactcagtattgaatataggagccaagcaatga

SEQ ID NO: 340473 - DNA, 231 bp, Pseudomonas aeruginosa
atggcaaagaggaatacgttcaagaccttgaaagacggggtgtacttggcgcggtgtcgcgagtcgagcctattggccgcagcttcgaacgggcattccatcatctggccagaggccagaatggtcatcaaaggcgatacggcttatttctatcacgagggcaagaaggtctggtcttgcaacatgacttacgcggcgaacaacttcgacgttggagccctggccgagtaa

SEQ ID NO: 340474 - DNA, 963 bp, Pseudomonas aeruginosa
atgtatttgatggctaaaaactggttgggccgaacacagaaaacaagtgcctggatgtgggcactgctgtgctttgtattgcttaccgtattccaagtccgcacccatcaccttgatgatcggttgtacttctggatcaagacccactggcacaccgacgattggcaggagcgctctgtgtggctgcctgactatcgggttgagctcgatgctaagccggttcccggtgtggacaacaacctttcgggcctgaccttcgaccctgacctgaacctgctatgggcggttaccaacggcccaaacgaactattggccctcagtcgtgacggtgacgtggaaaggcgctatagcctggacggtttccacgatgtggaggcggtgtcctatgccggcaacggccaactggtaatcgccgaggagcgccggcagagccttgttatcgtggatgtccccctcgccgaaggcagtaagctttctcccggtcgctcattgagccgagaccagtatccagctctgaccttggcacttggcaaggcggacaacaaaggccttgaagggctcgcctacgacctgaaaggtgatcgcttgtttgtgaccaaggagcgtgaccctcgccaattgctggaagtgggcggccttcgtgccagcctggcaggaggtttttccctgcacgtgcgcgacctgtccaacttggtaaaggacaaggtatttgccactgacttgtcttcggtcgtcttcgatcaacagagtggccacctgatattgctcagcgacgagtcgaaactgctgattgaaatcaccgatgagggcaaggtggtgagtttccgctccttggcgagggggtttgctggtttgctgaaaggcataccccaagccgaaggcgtaaccatcgacgatgaagggtatttgtacgtggtcagcgagccgaacttgttctatcgctttacccgcgagacagactga

SEQ ID NO: 340475 - DNA, 417 bp, Pseudomonas aeruginosa
atgactagacaggcggtgggccctgactctcctattcgctccaggtcgaagacactcgccgcgctcaacaaggtcgtcgacgatctcattgctggtgacggaaagctttccatcacatccgttgcccgtgccgcaggtgtgactccgggactcatccataacacttacccaagcatagcggaaaggattcgcaacatcgttggcaagtcggtgcgagcccagcgagactctaagcatcaagcgttgatgagcgagaaagaaaagaacagggtgctccgtgcagagaatgatcagcttttagcggaggtagctcggctggcttcggttaaccagcgactaatattcgagatgattcagctgaaggcggttgccaacggtaaggtcaccgcactccctctgaaaccagggcccaactag

SEQ ID NO: 340476 - DNA, 1602 bp, Pseudomonas aeruginosa
atgcctcgggcgcttattgatgactgcaaagctgttgcttatgcttggtttaaaagaggaatgcctagatccaaacctcctatcgcacggggcattactactttcgccgtcgtcagcgtgatgccttttgttcgctggttaaacaatctaggagtttcaagctttgcagatgtccgtccgatccatgtcagcaattacgttcatcattgcaaatatgaattgaagttaaggcctctcccgctgtatgggcgattacgggttattgattttctttgggtgttttctgtcgacacgatgtttcccattcagagttatccttggggtaattcgacattgtggcggatttgtggggtcgcgaatgtaaaagggttgggtgctgccactaaaaacgtcgggcgaacagatatcattcctcatgatgaacaatctaggattttcaactattgcgaaagcattgtccgggagatgaaggccgaattggcagtcaatggtattggatatcatcctagtgatgaacggatggcaattcgttgcagagatgctgttctgtatatagtttcaatcactagcggcatgcgcaatgacgaggcaattggaattgaggttggcgcttggcgcaaagagttaagaaatggaattaatttttgctgggtgaccacagtcgagcacaagacaggtaaaggccaagtcgaatatcttgtgccagaactaacgattgaagctttaagtcttttggcaaaatattcagcacccatcagaaaagagctggatgaagagattagacagcttgcaagcaatcgggatttttcgtattcaactgaacatctccttaggctcgaaaaagcccgaaaagacgcgaataaactatttttgggacgaaacacacaaggagggaaagttcaggaaagccatcatgttgaggctctcagcgggcaagcatccaatgctgcgtttgaccgtatagctaaagccgctggaagcgattggccgttgaggacgcatcaatgcaggcgaacatatgcaagatgctttgtagaatcccgtatgggccgcacttcattgatctacctcaaatggcagttcaaacacagcagcatgagtatgacccaactctatgcatccaatccgcagcaagacctgactctctttgatgagatcttccagcagatgacagagtttaaaattgacctgatcgaatcatggctcgatgatcagccactggcagggggcgctggcgaaaagattgtggaattgcgggcaattccaatcaaggatagagctgctttgcttgcccagaccgccccacatgccaacattcgtgcgactggacacggctggtgcatcgccacagagcggggctgcggaggtgctggtctatacgaagccacacggtgtccagggtgcaaaaattcggtgatcgatgaagtcttcgccagcacttggcaggacatctacattcaacagcgagagctgataaaaattgaggatgcaggcccggctgttaggcagcgcgcagaacgcgacttgcaggttgcactagatgtaattaccagccttggcctttctccagttgaggaaatggaggaggcggcaaatgactag

SEQ ID NO: 340477 - DNA, 1608 bp, Pseudomonas aeruginosa
ttggctcggcaaaaaagctacaaggcggttatgcggtcggttacaaaaggattcgaggctgtcgaagatgatatcaagattgacctgccgagaaacccgagaaaccacaggcaactcgatcatacgaaatatttaggcttgggcttcgacgcttgggcaattcaaagtcttcacgttatcaaagctttgctacaaggaggaaacttctcagtgacgaccttgattggttactctacgaacgggctgagattttttataaatttcttgagtggaggttcggtcaagtcgccacctgcaacgccaaacagtcttaccaaaagccacttggatcgatacgtctcttggctgaggctaaaataccctaacggctcgacagccaagaattactatactagcttcaagtcgttagttgttgttttggctgaatatggatttattgaagtcaatcttgacgatcttttgcccctcaatccatttcctaataattcgcagagcactaaagatgcagatccgctcaccttgggtgaaatgcaaaggctgattggcgctttgaagtcagatcttattgccatccataagggtacattccttggaaatggcgcggaggcgatggctgtattgctactaattactgcggcaaggtctggaatcaatactacgccgctcttggagatgaaaagggatgccctacagcctcacccatttattcctaatctcaggttgattactaccgtcaaacgtcgaggtaaaggcgcacagagcaaaacaatccgtcagactaatctgctagatgagtacagtgctattcccctggatggggtggcagtcctcaataaggcgctggagatttctaagccactcgtagcactggcacctgatgaaatatcttcatgtgtgtggttatatcgctcgggccagcctggccgctcgaacgacatcgttacccttacacccggtgctttatatgtcacggcaaaaagcatttgtgagcgtcatgcgcttcaggatgatcaaggcaatcggctaaatgtcacgcttagtcggctgcgaaagactatggaaagccgtttgtggaaactgagcggtggcgacattatagaagtttcctccgttatgggtcatacccctggtgtcgccgataatcactatttgaaaatcaacgatgagatcaaggtcgacggggcgacatttgttggggaggcttttccggacaaactacgtggcataaacgttataccaaccccaccaggcggctgcaaagatagcctttacggtagtctggcaccaaaggatggcgtcaatcattgttctgaattcatccactgcctcggttgccctagctatgcaattgtaggcaccttggaggacttataccggctgttcagctaccaacaattcttgtatgcagaagtcgaatactttctcacggacgagtggggcgcatggcgcaagcgtcagtttgactatattcgattgatagatgatttcacccagaagtttgatcttgcattggtttcgcaagcaagggctcaggctgagtcatctccgcacttgttctgggctaaaaaaatcgagttcatgaagaaaaaattgggcggcgaaatttga

SEQ ID NO: 340478 - DNA, 1158 bp, Pseudomonas aeruginosa
atgaggctggtattcgcaacaaaagacctagcattagcaggtcgatcctttgaaggctttccgttgctgattgggtcagagggatggccagtcgagccagctcaatccttcctttggcacacgcttatcgagtcaggtgaggccctaagcgatttgacttgggaagcctatggacggcgtctgtacgattactttgccttcctggaagccaatggattgggctgggacgaggaaagcccggctcacggtctgagtgctctgtcgaggtacagggattggtcgagcggagaattagcacttgatcccggcacggtgaacaatcgtctggccttgatcgtgaggttctaccgatgggctaagcagcgcaacctgataactgtgctgcccttcggtgagaaaagggtaagagttgcccaacattccggtcttctcagtcatatcgctcggcccggagccgagagcacgaaagtttcggtgatggttcgcgaccgaaagcgcttgaccaaattcctgaccaaggatcaagtcaaggtatgccttgccctggataccgatccaagccaccagatattgttccacctcatggtgcgtaccggccttcgctcctgtgaagcgaggtcttttcctctcaaatatgtgttcaaccccaggttgaagaagggactgcgcccagggcaaatgatcagtgttgctcttgatccttcagacatgcatatcaagtacgaccggcctagaactatcgacgtgccatggtcgttgatggagagcatgtggtcttactcccttcaccaacgagaggttcgtaagtccaatggtaatggacgtgttaccgcgctgctgctgactaatgaaggcaggcattattcaaaagattccgtagtggacgttatgaagtcctatgaaagaaagtgcggtttctatgttcgggcccacatgctacgccacacctatgggacttatactttgcttgctcttcgaaaaagcaaagagtttgaaggtgagccattgttgtatgtccgagataggctggggcattcagatgtgcaaacaactatgatctatttgcatctcataaaccagcttgaagcccaatccgtccttgctcacgaggacgaaattgacatgatgtttatgactgattcggtttcgcgtatctga

SEQ ID NO: 340479 - DNA, 372 bp, Pseudomonas aeruginosa
atgaccagacagaagcttggtgggcttgagaacgtggtgtccatccgtcctggtatggatgaacgcacaaccctgcgagattttgaagagcacctgagttcgatggagcaaattctcaaggtgttcgatggcagcgaaccggaggccaatattcacactggacgctatttgctccgggaggcgttgaagaacacgcccattgtcgccgtcgaaattcccgcactcctgaaaggtcgactggcgaagctgtatcaggacttgggcgcccttgaccagcagtttcaaggtaagtctgtagcccaggttctggaagaagacccggcactcgcgacctacctccgtgagcatggcttcggccctgagaacatctag

SEQ ID NO: 340480 - DNA, 234 bp, Pseudomonas aeruginosa
atgctctccgccttcgccggcacaggcctggcaaacgccactcaactgctgcaactcgacgcccaggacggccagttgctcgacgtccagttcgtcgccctccagctagcggccaatctcggcaatgcgcacccgacgcatgtgctcggcgcgggctgctcggtattcatagcggcgggttccttcgtggtttccttttacagtttgaggatgctgctgaagcagtccgcgtga

SEQ ID NO: 340481 - DNA, 435 bp, Pseudomonas aeruginosa
atgaaaaagcttgtcaccgccctttcactttcgctgtttgccgcggctgctagcgcggctgaagagcccatgaacattctctaccttggcgtcctgccactggtagtggaggacgtaggccctgtcatcaccgctagggtggatagctggggaaaaacaggctctgacacggggcagttcacaaaagtgaatcaacgcatggtggacgcccttcatgctcgtgggtgcaagatgacaatgcatgtacaagggcagatgcggattcagttgtcagacccgaaggccgtcctgacatgtgagtctggtccaggtgccaaagctcagatagaactgaaaggggcattgtttgaccgggaatttacccccgggctaagcgcagtgggcgccgacgactcagtgcttttcatagtggaagaaggcggtaagaaaatctga

SEQ ID NO: 340482 - DNA, 156 bp, Pseudomonas aeruginosa
atgaagaaatatgctctgcttctttgcctaaccctgactgggtgcactggaggcaaaaccatactcccggtcaccgcggcggacattcaggaccgcagccttatactcggggctcagcaggctgttcaacgagggcagtaccaggaggcagagtga

SEQ ID NO: 340483 - DNA, 906 bp, Pseudomonas aeruginosa
atgctgatcgacttcaaggccgagcacacacagtatctcaaagggcggccgtcagattctggctgggtgtatacccccgccaacccgaagatgccggccaaggggaagtacctggctgctcatcaggtgtttagcaataacgctctcaacgctgcgatctacatccgaaacgacgtgaattccgccggcgaggcgattagtgtgcacacagcactccgcctcaccttctcccataaggcgaagggcaggtacctactgaatgatgacccggacaagctcagtctcaaccttgggctcggcgcggtacgtgagttataccgatggctctctgaacagcagccgcggttggagtacgaaatagttcgtgccagcgcatctcccaaacgactccagggcttcactcttcaggacggccagttcgcccggatgcttactgcaacagagttcgactcagaagcagtaggtacgctgaccatccaggttgggctatcggatgacgatgtgatccatctgcaattttactgccttggttacgccaagctgatctatccaacattcactgatgtggccatcctccagctgctgaaagcgcctgcaagctctaccaacctggcgagcaatcctttcccagtttcgcatgcgaaatcggacaacgtagctgccccccagcgaacgcaagacgatgatcgtggtatggctgaggatgaacctgatccagtgagactggagcgttgcagaaaggcaatctacgccgttggtatgcaacgctggaagggctcgagagatgtcatcgagttcatccaggactctgctcctatcgctcagatggaccggttgatcaaggacgggaacgccggcgaatttacggagtggaaccgcatcgctgacatgtttaaaaactcctaa

SEQ ID NO: 340484 - DNA, 225 bp, Pseudomonas aeruginosa
atgccggaagactttcgcgcaatgaacattgcgttggagcagttagttaaagagaaggctatccagcgttacgaacacaccaaaattgccaaatcaaaagggaaaggagcaaaagactatacctacaaactctggcctactaatgagtttgtttccactatcatcaaagggcaccaagcggaagctcgtcgagaaatccagttgatggcaaagcgggcgcgttga

SEQ ID NO: 340485 - DNA, 138 bp, Pseudomonas aeruginosa
atgctggcgaacgagatgaagcgccaggggcggcggaacatggcggaaaccgccatggcatgggtaacagccaataaggtgtcacgcgaagaggttcgtgagtttacagaccgccggggcaggatcaacgagctttga

SEQ ID NO: 340486 - DNA, 294 bp, Pseudomonas aeruginosa
ttgcccggcgcatcagtcgcgttgatcgcccgagagcatgagatcaatgccaatctcgtcttcaaatggcgccgtcactatcgggaggggcaactgggaccagtcgcccagcaggccactttgttaccggtcaatctgagcaaggcgccgacgtcttcagcagaagaagaggccgtgcgactgccgctgagtccgggcggtctggtcgtgaagtgcggtcgggtcaccttgcgcattgagggcgtgcccgacccgcaaaccttgcaactggtcttgcagcaggtgttgcgatga

SEQ ID NO: 340487 - DNA, 252 bp, Pseudomonas aeruginosa
  misc_feature (237)..(246): n is a, c, g, or t
atgtcttttaaaagatttacggcggataacgctgttatgcttctgatcgatcatcaggttggtactatggggtgggccaaatctctgccattcgaagagctaaaacgtaatgcgttgatgttggctaaggctgccgccatactcaagatgcctactgttctgacttccagcatggaggagcatgctcaagggccattgctctcggagttgcaggatattttaccgaaggagtttgcnnnnnnnnnngtataa

SEQ ID NO: 340488 - DNA, 1680 bp, Pseudomonas aeruginosa; identical to SEQ ID NO: 10332

SEQ ID NO: 340489 - DNA, 441 bp, Pseudomonas aeruginosa
atggcgttaaccgaacagaagcgccggtatgccgccgcgcggctgtccgggatgggcaagaaggctgcggccatcgaggctgggtgcccagagaaaaccgctgcacaggcagcatcgcgctatgagaaggatcctgatgttcaggccgctatggggcggcagttaaaagttgcggagaagaaggttgccgctacgtcagtagatcctgatccatacatcccggctaggtcggatgaccctctggagttcatgcgccagatgatgaacgaccttgaagccgatccgaagctgcgccttgacgcggccaaggccctggcgggattcaccattgccaagccaggcgagaaaggcaagaaggaagagcgccaggagaaggccgaggaggctggaaagagctcacgcttcggtttgcgtaaggggcacttgaaggcggttaactga

SEQ ID NO: 340490 - DNA, 1668 bp, Pseudomonas aeruginosa
atgcaatggactaccgcctgccccgattgggagtcacggatcgaggcgggtaaatctcttgttccgctcaagccgatctttcaggatcaggcggatgacgcgctggatgtgttctgcaacctgcgcatggtggacgccactggcagcccgctaatgggcgagacgtgccggccgtgggtgcttgacctggtagcggcgctgttcggcgcctacgacgagtcgaccgggcgacgtctggtcacaaactattttctgatggtgagcaagaagaacggcaagagcacaattgccgctggcatcatgctcaccgcgctgatcctcaacgcgcggccatcgggtgagttcatcatcctggcgccgacaaaggaagcggcagacaacgcctacaagccgattcgcgacatgatcaaggcagacgatgagctggaggcgcgattccacgagcaggaacacatccgcactatcaccgaccgcttgaacaaggcgactttgaaggtggtggcggccgactctgccacggtgaccggcaagaaggccattggtgtgttcatcgacgaactctgggagttcggcaaacaggccaagtcggcgaagatgctgaccgaggccaccggcggactagcctcgcgaccggaaggtttcgtcttctactgcaccacgcagtcggacgagcctccagccggtgtgttcaaggcgaagctggattatgcccgcaaggttcgagatggactggtagaggacaagagattcctcccggtcatctacgagttcccgaaggcgatgatcgctcagggattgcaccgtgaccttgccaacgcccacatcaccaacccgaattgggggctatcggtcgaccaagaggtcctagagcagaaatatcaggaagcgcgagaagagggtgagcatgccatccgtaacttcctggccaagcactgcaacgtagagatcggtcttgatctgcgctctgaccgctggaccggcgcggaattctgggaagcccagggcgattccagtctgacacttgagagcctgctttcgttgagcgaggtggtcactgtcggcatcgacggcggaggtctagatgaccttttgggtgtcacgctgataggccgtgagaaaggtggtgaccgctggtttagctggtcgaaagcctgggcgcatccggtggcattggagcggcgacagtcggaagaatccaagtaccgagacttcgagaaacagggtcacctgcggatcatcgatgagctaccgggtgacgtgtccgaggtcgccgatctggtcaagctggtcgatgacgaaggcttgctcggctcggtcggtatggacccggagaaaacccacaaggtaatgctcgaagcactgctcaatcggcagattgaagagagcaagctgttcggtgtcagccagggctggaagctctgcggggcgatcagcattgccgagcgaaaacttgcggagaagaagctgacccatgccgcgcagccgcttatggcctggtgcgtcggtaatgcccgagttgagcctcgtgctaactcgatcctgatcaccaagcaggctagcggctccgcaaagatcgacccgctgatggcgttgtttaacgccgtcacgctgatggcgctgaacccgccggcagcgacgaagaaataccaaatgtttgtattgggctga

SEQ ID NO: 340491 - DNA, 2001 bp, Pseudomonas aeruginosa
atgaagaccaatcgagcgtacagcacccttgaggtgaaagcgctggacgatgagaagcgtgtaatcactggtattgcttccactccatcgccggatcggatgcaggacgtggttgaaccgaaaggcgcccagttcaagcttcctattcctttcctctggcagcacaaccacgacgagccgattggccatgtcactgacgcaaaggtcactcagaagggtatcgaggtgtcggttcagctaacgcaggttgaagagcctgggaagctgaaagaccggcttgatgaagcatggcaatcgatcaagtcgggccttgtgcgcggcctttctatcggtttctccgcaaaagagttcgagcagatccccggttcttgggggctgcgcttcttgtcctgggaatggttcgagctttctgctgtgaccatcccggcaaacgcagaggcaaccattacttctgtgaaatccatcgaccgcgagcagcgcgccgcgcttggcatcaagtctgttccggtcgtgcgtatcactcccgccggcgcttcggcaatcaagaccaaaaccatcaaagttccgaagccccaggagggcaacgacatgaagactaccgctgaacaaattgccgagttcgaagcaactcgcgtaagcaaggctgccgagatggaagccatcatgaccaaggctgccgaggccggtgaaaccctagatgccgatcagtctgagcaattcgacactctcgaagccgagatcgccgctatcgacaagcacatcggtcgactgaagcagatgcagaaggcgcaggctgccaatgccaaacctgtcactgaagaggccggtgctcagcgcatggcaaacgtgaaagctctggatttcaaagaggttcaggtccgcgccaagaatacccagaagctggagcccggcatcgccttcgcccgcgctgctaagtgcctggcgctcggtcatctggagcatcgcgacgctatcggtatcgccaagtctctgtatgagggccaagactcgatcatcgccgccactcagcgtttggtgaccaaggctgccgtcgccgctgctaccacctccgatgcaacctgggctggccctctggtcggtgatgaaaccagcgtgttcgcagatttcgtagagtatctgcgcccgcagaccatcctcggccgcttcggcaccaacggcatccccagcctgcgccgtgtgccgttccgtgtcccgctgatcggccagacctccggcggcgacggctactgggtcggcgagggtcaggcaaagccgctcaccaagttcgacttcgagcgtaagaccctggagccgctgaaggtcgcgaacattgcagtagcgaccatggaagtcattcgtgactccagcccggccgccgatggcatcatccgcgaccaactcgcagcagcactgcgtgaacgtctggatatcgacttcatcgacccggccaaagctgccgtcgcaggagtttccccggcttctatcctcaatggcgtagctggcatcccgtcgagcggtaacactgctgatgatgtgcgcgctgatatccgtgcactgttcaacgcctttatcgccgcgaacaacgctccgacctctggcgtgtggctgatgcctgctaccacttctctggccttgagcctgatgcagaacccgcttggtcaagcagagttccctggcatctccatgactgggggcgagctgttcggacttccggtgatcgtttcggagtacatcccgacttcttcggcgggtgctgtggtggctttggtgaacgccagcgatatctacctcggagacgaaggcggcgttgatctgtcgatgtctaccgaagcatcgcttcaaatggacaacgctccagacaacccgactaccgccagcactgtcctggtttcgctgtggcaacgcaacctggtcggcttccgtgcagagcgtgcaatcaactgggcgcgtcgccgcgcttcggctgttgcgtacctgaccggcgtgaactggggcgcgtaa

SEQ ID NO: 340492 - DNA, 219 bp, Pseudomonas aeruginosa
atgaaaaaggcactgcaaaaggcgagatcggcatgccgatctgcgctcgctttccttgtgagcgcggtgctctggatcgttgccctgttcatcggtggcgccgcttcgattgtggcgggagtcaatgtgttgctagggccaggtgccgcgctgattggcgccggtatagccatgctctgcgcctgctatctgctcaagagggctgtgatcaatggctaa

SEQ ID NO: 340493 - DNA, 561 bp, Pseudomonas aeruginosa
atgaccgacaagaaatggactggctgcacggtagcatgcgtcgccagcggccccagcttgtgtgctgaggactgccaggcgctcgagggagcaggcttgcccacgattgcggtcaaccactcctggcagatggctcgctttgccgatgtcgtctatgccggcgacagagtgtggtgggagcaatacggccacgagatcgacattccggccgagcgctggacgcacaacccgaacgccgcccaggctcttggcatcctcgccaatggaaaaggccagtcggtgctgaacagcggataccgcgccatcgaactagccatcaccttcggtgccgcccgggtactgctactcggttacgactgctctgtccgccatggcacccactggcacggcgaccaccagaagaccaagaacccggaccatcgtcggtgcgccgagtggttgaaccacttcggccgtctggccaggaatggcgccgaggtcatcaactgctcgcgggaaacggcgctgacgtgcttcccgcgaatgagccttgaggaggcgctttgttcattcgcggaatga

SEQ ID NO: 340494 - DNA, 618 bp, Pseudomonas aeruginosa
atgaccgcaagtttgccgaatgggctaaccgactgcctgctctggtctgaagagcttggaatgggtttccacccgcgccctccgatggactacacgggaccgtatttcgagaagtatcaggcgcttgacgcaactccaatgggggaggcactgaccagggcccgaatggaaatggtgaagcggcacattgatcccgcatcggtgcttgatgtcggcattggtggtggtcgtttcgtcgaggaggctggctgctttgggtatgacgtcaacgagcaggcaaacttctggcttagatcgaagaatgtattcagggatgcaagctttggatggcctgcaatgacattctgggatagcctggagcatgttcccgatcctgaggccctagttcgctcggtcggtgagtgggtattcgtctccatgcccgtctacaaagaccaggccgattgcctgaagtcgaagcacttcaagcctggtgaacacctgcactactggagcgttcggggtctagtcgggtggtttgcaaagatgaatttcggctgtgtcgagatcaacgagcgagagtcagaactcggtcgagagggtatcaccagctttgcgttccggagattccatgactga

SEQ ID NO: 340495 - DNA, 1713 bp, Pseudomonas aeruginosa
gtgaccccggtgctgtggcgcctgctgcgcacctatcgctggcggctggcggtggccatggggttgcaggccctggccgggctctgctcgctgttgccctggatgcttctcgcctggctcgccgagccgctggcgcgcggccaggcgcagccggccctgctggccctggtgctgctggcggtgctggcttggttgggctgccaggcgctggccgcgcacctggcccaccgggtcgacgcggacctctgcaacgacctgcgcctgcgcctgctggcgcacctgcaacggctgccgctggactggttcggtcgccagggcccggacggcgtggcgcgcctcgtggagcaggacgtgcgggccctgcaccaactgatcgcgcacgctcccaacgatctcagcaacctgttggtggtgccgctcgtcgcgttgctctggctggcctggctgcacccctggctgctgctgttctgcctgctgccgctggtgctggccgccgccggcttcctgctgctgcgctcggcgcgctaccgcgacctggtgctgcggcgcaacgccgcgctggaaaggctctcggcggactatggcgaattcgcccacaacctgctgctggcccgacagtaccccggcgccggtatacaacagggcgccgaggcgtcggcggcggccttcggcgaagcgttcggcgcctgggtgaagcgggtcggccacctcgccgcgctggtctacgtgcagttgtcgacgccctggctgctggcctgggtcctgctcggcgcgctggtcctggatgccctcggcgtgccgctggcgctcggccaggcctgtgccttcctgctcctgctgcgggccctggccgccccggtgcaggcgctcggccacggcggcgacgcgctgctgggcgcgcgcgccgccgccgagcgcctgcagcaggtattcgaccaggcgccgttggccgagggccgctcgacccgcgagccggtcgatggcgcggtggcgctgcacggcctgggccatgcctatgaaggcgtggaggtcctggccgatatcgatctggagctggaggatggcagcctggtggccctggtcggcccctcgggctccggcaagagcaccctgctgcacctgctggcgcgctacatggacgcgcagcgcggcgaactggaggttggcggcctggcactgaaggacatgcccgatgctgtgcgccatcggcatatcgcgctggtcggccagcaggcggcggcgctggagatatccctggccgacaacatcgccctgttccgccccgatgccgatctccaggagattcgccaggcggcccgtgacgcctgcctcgacgagcgcatcatggccctgccgcgtggctacgacagcgtgccgggacgcgacctgcaactgtccggcggcgaactgcaacgactggccctggcccgtgcgctgctatcgccggcgcgcctgttgctgctcgacgagccgacctcggcgctggatccgcagaccgcccggcaggtcctgcacaacctgcgcgagcgtggcggcggccggacccgggtgatcgtcgcccatcgtctggccgaagtcagcgatgccgacctgatcctggtgctggtcgctggccgtctggtcgaacgcggcgagcacgcggcgctgttggcggcggacggcgcctatgcgcgcttgtggcgtgaacagaacagcgcggaggtggcggcatga

SEQ ID NO: 340496 - DNA, 126 bp, Pseudomonas aeruginosa
atgaccaagtgcaccttctgcaacaagacgcgtgaatgggcaaagaagtgggctcgggtcgcgatggaacgcgcggcctctgctatggccgccaagccgaagcgacccggagcaagcgatgactga

SEQ ID NO: 340497 - DNA, 162 bp, Pseudomonas aeruginosa
atgactgagtccgaggaagaggttcgactcctcctgcgcgatctcctcgatgagcagcgcaagaccaatcagctattgcaccttctgatccaggctctggccgaagatggcgaggatcctgacgccgtgccgaccagctacctgagtggagagccgatctga

SEQ ID NO: 340498 - DNA, 360 bp, Pseudomonas aeruginosa
ttgaaacgcgccagcgatagtggtctgggcgcgcgcaaactggtcatcaatagcgcgtgtttgagacaggatcgcctcgaagacctgcttggaagtcagcttgccctgttcgccaagctttcgaaggtctccaaccgcaaccccgagaccgtttgcgacggcttgggccaggcctggagcctgctcaagtaccgagttcaactcctgtcctcggagcacgccagaggcaaaggcctgtccgagttgcaccagcgcaccttccgcagcggcagcggaaacaccactggccgacatggccttgctgatgttctgggtcacctggacaacttgctgttgatttaccccgaggtcgccagttga

SEQ ID NO: 340499 - DNA, 348 bp, Pseudomonas aeruginosa
gtggctgagaccttttcttactgtacccgccttggagctaccggcgagattgcccagcgcacctggcagaacgacttcggggatggatacgttcagtccggcggaacggggatcaacaccagatccgagacctgggatggaatgacgatcatcgggcgcctggaggctggtgatgatctcctgggcgcccgcgccttcctggaccggcacgaggggtataggtcgttcctgtggacgccccctggcggcgtacagggtcgataccggtgcaatggatacaagctgaggccgttgggtggagggctgtacgaactgagcttcacgttcgttcaggtcttctacccgtaa

SEQ ID NO: 340500 - DNA, 399 bp, Pseudomonas aeruginosa
atgcttgaaacactccacgctgtgatggagagcccggagtcgatccgtgccagcagcaaggagcagatcgctgcagcgctgatgtgtgtccacgcattctccgagcagctccgtttcacattgggtggcgctgaagctctgccggccaagttttgggaagggaaccgggaggacctcggtcgcgttcaggacaccctgatttacctgattcatggccacgaggagtttgccgcacgcattggctccgtactttacgatccgaagtacaaactcgcttccttcggccgattctgtgcattggagttggtcggaacgctgaacccagaacaggtgcccccgatcaacggacgcatggccaaggcgctgcggtttctcgggtttgacgtccgcgccacatag

SEQ ID NO: 340501 - DNA, 819 bp, Pseudomonas aeruginosa
atgagctggctttgttctcgggcgctggtggaggaattctcggcggccacctcctcggatggcgcacggtctgtgctgtcgagttcgaaccctatgccgcaagcgttcttgccgcaagacaaaatgacggcattctcccgcccttcccgatctgggatgacgttcggacctttgacggaagaccttggcgcggccttgttgacgtggtttctggcggattcccgtgtcaggacatatcagctgccgggaatggcgccggaatcgacggtgagcgctcagggctctggcgagaaatggcacgaatcgtcggtgaggtacgaccgcgattcgtcttcgtggagaactcacctctccttgttcgaagaggacttgccgtggtcctcggtgaccttaccgagctggggtatgacgctcgatggtgtgttatgggagccgccgacgtcggggcgccccatcagcgtgatcgcatatggattgtggcaaacgccagtagcggacgacgcagcgaaccgagcagatggcaagtggaacagccgcggcgaaccgaagctgagtgcacaggtgaagctatggcctaccccagttcgccgagattaccgaggaccaggtcgcagccggatggagaggactggcagcaaggctggcgaatgccttcctcaagtcgtaggtggccagttgaacccaacgtgggtcgagtggctaatggggtggcctctagagtggaccgcattaaagcccttgggaatggccaggttccaagagtggctgcaacagcattcacttatctcgcatctgaatggatctgaggaggcagcatga

SEQ ID NO: 340502 - DNA, 240 bp, Pseudomonas aeruginosa
atgaacagcaagcaacgccgacaagcctaccgcgccatgcccaagccaggcgccgtcgtccgctggaagtcggccatcactggcaaggtgcgcgaaggcgtgatggtcgggccgtccgatatctacacgaacgaacacccgaacgcctccaaaagcaggccgacaccgagcacccaccgcgtggccgtcaggatttccggcggcaagtgccacatcctggttcgccacctgatccgctga

SEQ ID NO: 340503 - DNA, 786 bp, Pseudomonas aeruginosa
atgagccagcaaaccctgcaagacctgctagcagaaagagtcaccctttacgcagcatccgacaggccgcgcgaactgatcgacgaaggcatcgacaagctgttcaaggaagtcgtgagcgacgcgttccgctcctatggagatttcggcggcgccatcaaggaagccgtcaaagctgcgttgccggcaaacgtgtccgacatcctcgaccttcagcgatacaacgccatcgtcgcaaatgcacttcgacagcgctgggagtcggctggcctgagtgcggtcatcttggaacaagccgataagtcgatcaccgaggtgcttaccggcgatggcctgctgaccggcgaggtgtcgctcaaagccctgctcgaggaattcatcgagcaccacaaggagcgcgccgccgaagaccagtgggagcgcccagagattcgcattgaagaaggtgacggcagctactcccacaagacgctgcacatctatttcgatcctgagccggaagacagataccggagcggcctctactcatcttcccctcgaagcaaccacagtctgaaacacgccattcacatcagcatcaagggcgagcgtgagaccggggatcgctggaagccaagggtacagttcggagaagtctatagcgccaagctcgatgacaagaagatcgcgatcgacatgcaggtctactcgaagtgggagcgcatgctggcatcgctgtacttcggcaacgccattctggtgatcgactgcgacccagacgacctgagctacggcctgtacgactga

SEQ ID NO: 340504 - DNA, 426 bp, Pseudomonas aeruginosa
atgaagacgctggagcaaatcaaaaatcgcggcagcaaaacactggacggtcgtgacttctcgcgactggctcgctttatccctgaggaccagctagccgacttcggcatgaccctcaatgaaaagtatgtcggaaagcacgagcacatcgaattcaatcgtgaaaacgtgcttgaggaactgaagaaagacgtggagtttggcttcaaaaaagctctaggccagcgtggaatctcggcggccctgatgttcgaggttgtcagcatgtggaactgggtgctcgaggaaggtcttgaagacttccccgaagatgattacgcccagtacggccttcctctgttcaagcagacagccgtgaagtacggctttgacaatcccatcggtgatgactacggcgacgagagtcattactcatcttgctgctga

SEQ ID NO: 340505 - DNA, 198 bp, Pseudomonas aeruginosa
atgaagaccgtaaccctcattgaatacctggctgagcacggcacgcaggctgatctggccaaagggcttggcgtgcagcagagcgctatctctcagatgctccgcgccaagcggaacataaccatcacgatccgtgacgacgggaagttggaggctgttgaaacgcggccgatcccggcgcgcaaggccgttgcctga

SEQ ID NO: 340506 - DNA, 1626 bp, Pseudomonas aeruginosa
atgtcagctgacatcgtggatggactgatcggccagtacagcgctacccgtgccaacattgaggctctggccgcagctgtgcgctccggtcagaacgccgcggtgctgcactacttcgtcgaaggcaacgttgaggagcagcgctacagcctgcccaagaccgtcgacactctgttcgcggtccagccggcgatcgcgcagctcaatgcggacttctggaaccgcgcgctcaagatgaccgacgtactcgactacatgccgcagaagcgccgcgacgagtggttcgagcagatccgcaacccgatggggcgcaagaccaacaactacacccgcgagcccgagcttccgccgctgccggagttcgaagagaccaccgtgcgcagcaccttggctggactgctgaacagccgcgccaagttcttcgccgagcgcgtcgacggcatcttccgctcgctgagcaaggagcacgtgaccaactgcccgcagggcttcaacaagcgcatgatcctgctgcgcgcgatcaacggctggggttccgtcgaccactccaccgccggcgtgatcaatgacctgcgctgcgtcatcgcgaaattcatgggccgcgacgagccgaagtacggcgccaccgatacggtgctcgccgtcgcgcgccaagacaacggacagtggatgacgatcgatggaggggcgctccgcatccgtatctacaacggcgttggcaccgcccatctggaggtgcacccggacatcgcgtggcgcctgaatggcgtgctcgccagcctgtacccggccgcgatcccggccgagttccggaccaagccgaagcgcgctaagaaaatcaagggcttcgagctgttcgacaagctgctgccgttcgcggtgttggcgctgctggccggcatgaagccgggctggcgcaggatcgagaatccaggcttcaacgagccgaagttcaaggacatcccgcggacccggcgtttcgagaacggggaccacgacaaggccgcgatcgccgaagccaagaaggtgctggcagcgctcggcgccgtccgcgacaaggaaggcggctgcgagttctggcgcttcgactacgagcccggtccggtgctgaacgaggtcatctgcaacggccgcattccggaccagaagagccaccagttctacccgacgccggcgagcgtcgccgaagtggcgatcgaccgggcgatggtcggcgccgagtcggacatggcctggctggagccgagcgcgggccagggcggactggcggacctgatgccctctccgctgtgcgtcgaggtcagcccgctgcattgctccatcctgaaggccaagggccacaacgtgatcgaggcggacttcctgaagttccagcccgccggatacttcgaccgcatcgtgatgaacccgcccttcagcgagggccggtggcagacgcacctgcagcacgcctctagcatgctgaacccgtttggcggtcgcatcgtcgcaatcctgccggccacagctaagggcaagcatctgctcgaaggcttcgatcacgagtactcgcaggtcttcgagaacgagttttccggaacctcggtcagcgtggtgatccttgctgcggaggtgcgccatggctga

SEQ ID NO: 340507 - DNA, 315 bp, Pseudomonas aeruginosa
atgaagggccgcactcccactcgctacgagaagcacatccacgaccgcatggcctccgagatcggctgcatcgcctgccgcaaggatggcatccgcaacatgcacgtcagcatccaccacatcgacgggcgcacgaagccaggcgcgcacctgaaggtgcttccactctgcgccggacaccaccaggacggcaccggagcgcccggactaatcgcagtacacccatggaaaagacgattcgaagagaagtacgggagccagctcgaactgctggaagagtgcatggaaatcctggccgagagggactgcgcatga

SEQ ID NO: 340508 - DNA, 228 bp, Pseudomonas aeruginosa
gtgagctacagcgtggagaaagtcatgcgcgtctacgacgacaaagaaggcgtgtacatcgaagttcggcagggtccggacgtccctgacagcagcctggagatccataccaccggcaaccaggcgtgcatcgagtggtacggcgagcagcacatcacgctgaacagccgtgagcacgcccttgctctggcaaaggccatcaccgaaatggcggagatgattccatga

SEQ ID NO: 340509 - DNA, 234 bp, Pseudomonas aeruginosa
atgagcaacatccgcaacgtccagtggaacgaaggggcgccggagaagcttcaagccgggatgctgatcgagattatcggaaagccgatcttcttggttggcgggccaattgataacccggctttcactcactcgttcaagaagatcaagcgctgggcctggcttatccagccccacgaactcgcctggctcgaagacatggcaaacaagcacaaagcgagggcgcggggatga

SEQ ID NO: 340510 - DNA, 201 bp, Pseudomonas aeruginosa
atgagcgaagtcgtgcaattcaaacgcaaggcggacgcagtgattgaagccgccgaggaattcgagggtaacggccttgcctgcgttgtagatgcgcaggagaagggcgttcctgcctggatgatgctcggcaagatgatggaggtcatcgccgacctacagcatggcggcgtggtcttggagccggaggacggggcatga

SEQ ID NO: 340511 - DNA, 291 bp, Pseudomonas aeruginosa
atgactgaagtgactgtaaatacatccatcgatcagacccttagcgagcgcggtagccgatatggatcattcatggaccacgcgcgcattgcgcaaaggctccaggatgtcatgcgggaagaaaagggatggtacgcactccagcatgaccagcgccaagcgcttacggtgatagcagacaagatcgcacggatgctcaatgggaagcctgactaccgcgataactggcacgacatagttggctacgcgaagttggtagacgacagaatggcagcgcaggagaacatctga

SEQ ID NO: 340512 - DNA, 1134 bp, Pseudomonas aeruginosa
atgtccactcgcagtttcagtgatgatgatctcatcgaagccctgaagagcatgacgaactcccaggcggcgaagcactttgacgtcagcaagcggcagattgagcgtcggcgagcggctctggtgcgcaaaggctggagtcctgcgcatgacctgcaccatgctgttccggacgggtacatgctgaagggcgcgtcgacgctctacaaagaaggcaagcccgttctccagtgggttaagtcgaccgtggacgaagaacggcagcgcgaactgttcgagtcgtcctgcaaggcggctgtcaaagaccttcctgtcgtggtgcctaaagaggccctcggaaagcacgtcgaccacctgatgactgtatacccaatcggagatccgcatttcggtgagtacatctggggcgacgaatgcgggcgagactgggatctgtcgattgctgagcgtgtgcactgccaggccatggctgcactcgtcgatgcggctccgaagaccgagcgcgcgctcatcatcaacctgggcgatgccgcgcactacgattccatgatcgcggtaactccgcgctctggccaccacctggacgcagacagccgctacgccaagatggtcgacgtgctgatcctggcaatgcggcaagtggttgagtcagcgctcaagaaacaccgctatgtccacgtcgtccacgttatcggcaatcacgacgagacgggtgcggtctggctcagccggctgtttgcccatctctacagcaaagagccgcgcgtaactgtggaaacctcgccgagcgtgtttagctactaccgatggggcaagactctcatcggcatgcatcacggtcacacagctaaagctcacgtgctgcccggagtgatggctaccgaccgcgccaaggattggggcgagacaatccatcgctattggtacaccggccacatccaccacgaaagcaaaaaagaattcccgggctgtgtagtcgagtcgttcaacaccttggctccggcggacagctatgcacacagcggcggctatcgcgctcggcagaacatgaagtgcgtggttctacacaaagagcacggcgaagtggcacggcacacggttagtcctgacatgttggaaggggaagcggcatga

SEQ ID NO: 340513 - DNA, 453 bp, Pseudomonas aeruginosa
atggacctgcagatcgacgacttccacaaggacgccgctggcggcctcctgcttctctaccaggcgtttccgcgcaagaccgcgctctacgtcgaagacctgatcggccgcgagccgccggacgagttcggcctgccgagcaaacgtcaccaaagttgtctgggcgcgttgctctggctcgccgaggaaggctacctgcgcttcgccaacaccattcattacgaggctctcgaccaggcggtgctcagcgaaaaggccttcctaagacttacccgtatcgtcccccgggccgcggcggcgctggccgaggcgccggccagcgtccgccgcgaacaggccagcctggccaaccagttgcgccaggcgctggcgcagggcgacggcgaacgcctggccgggctgacccgcctgctgttcgagggcaacctgggcgcgcaaggcgacacagtttga

SEQ ID NO: 340514 - DNA, 345 bp, Pseudomonas aeruginosa
atgctgtcgccccagtccggcgcgaacgtccaggcgatgatccgattgccggtgatgaccagcaccaggtccggctcgccctggagcttccagacgatccgcgcattgaccacgggcgggccgtcggtgccgatgctgaccgtccaggtgcgttcttccagagcggcgaaacccagcggcggcgacgcctggccggacagcgtgatgccgtctgcggcttcgcggtcgatagcggtcagcgtgcgcggactgaaatatgcattccagactgatgccggtcgtatctgggtgctgacgacgttgcccagttccattgcggtcggaatcagccataggcggttgtag

SEQ ID NO: 340515 - DNA, 345 bp, Pseudomonas aeruginosa; identical to SEQ ID NO: 332880

SEQ ID NO: 340516 - DNA, 1065 bp, Pseudomonas aeruginosa
atgtccgcagaaaaccaactggtcgaagtaccagccaaagaaaccgctctgcaagtctactcggcagccaatggcctggatcccttcctggccaagattcgagaagagatcgacggcttcgtgccggatgtgaccactcgcaagggccgagaggctatcgcatccatcgcctacaaggtagcccgctccaagacggcgctggacaacgtcggcaaagaactggtcgccgagttgaaggaagttccgaagaagatcgatgccgagcggaagcggatgcgcgatctgttggattcctggcaggccgaagtgcgcagtccgctgaccgagtgggaagaggctgaagcggcgcgggttgcgcgtcatcagggcgagatcgacaagataaaccttcgcctggaatgccgagacctggactctattgaactcaaagccaacatcgcttggttggaaggcctggccatcagcgaagcctgggaagagttcgaggcagaggctgctcgcgccaaagataaggctttgatcgctctccgagaagccctggttgcccgtgagaagttcgaagccgagcaggccgaactggaacgcctgcgcgccgaagcagcagcacgcgagcagaaagagcgcgaggagcgcattgcccgcgaagcagcagagcaggcacggcgtcaggaagaggccaaggcccaggcagaacgcgacgccgcagtacgccgtgaagccgaagcacaggccgcagcagagcgccgcgaacttgaacttaagcttgccgccgagcgcgccgaacgcgaagccattgaagccaagcagcgcgcagaacaagcagagcgtgatgcgcaacgtcgcgctgaagaagccgcagcggcagaacgcaaacggcaggccgatgagcaggcccgcatcgaacgcgaggctgctgcacgcgaagccgacaaggcgcacaagaaagccatcaacaacgaggcgctggcggctcttatcgccgttggcatgcccgaggaatgcgccaagcaggcgatcaccctgatcgctcagcgcaaggttcctcacatcacgatcaactattga

SEQ ID NO: 340517 - DNA, 678 bp, Pseudomonas aeruginosa
atgaatgagttatcactcttcactggcgacgggggcggactgctcgcatcaatgctgctcggcatccggtgcatcggcgctgttgagtacagagcacactcaagaagggtgctcactcagcgtcagagagacggagcagtcccacacttcccaatcttcagtgacatccgaacgtttgatggaagaccctaccgcggaagagctggactcgtatctggaggatttccctgccagaggtacagcactgcaccttctggacgaaacaacgctgaagacctttggccggagatgcggagagtcgtggcagatgttgctccctggtacgtcttcgccgaaaacgtttcggaagtcgcaatcgaatatgccgcagaagactgtcgggctatgggttaccgcacccaagccatttcccttggagcgtctgacctgggtggtgaccacattcgggaaagacattggctacttgcatacgccgacgacaaaagccaactacgccgcgcaatcaatgcagaaatggccttcagctcgggccttcgtcatggcgtttggcaggccaagcccggagaaccaagagtggctaatgggatggccagaaggatggagcgattcaagtccactggaaatggccaaattccaatcgtggctgcgacagcactggtgcttcttgcgctcgcataa

SEQ ID NO: 340518 - DNA, 540 bp, Pseudomonas aeruginosa
atgagcattgactggagcaaggcgccggagggtgcgactcattgggagccgagaggatctttgtaccttgaaggatggatgaggaaagtcggaaataaatggtcctattgggccgaaggaagaaaagtttgggttagcggaactccaggctgcaatgtatccgcagagcgtgaggcgacattcgaggctagaccgcaagaggcctgggacggccggggcctgccgccggttggcatcgagtgtgagttctcgctgaacgtgggcagtatcggctgggcggaaggtcgcgtcattggtcatgatggcgtgttcgctgttatcagccacaaggggaagtattacccgcgcaatgagcacggcgtgcgccccatccgcacccacgagcagatcgccgccgaggagcgggagaaggccgtgcaggagatgttggcgctcgatgagtacccgcatggccaggatcgcggcggaatgatgtctcgctccgacttctgccgcgttctctacaacgccggctaccgccgccaggagtcatccacatga

SEQ ID NO: 340519 - DNA, 261 bp, Pseudomonas aeruginosa
atgagcaagcacacgccgggaccgtgggaatactcgccggttagagggagtgttgcgttgctccacatctactgcgctgacaacaaaggcccgttccatgttgagagatcggacgctgagactgacgcaaacgccaagctgatcgcagcctcgcctgatcttctcgaagccctacaggcagtcgtcaactacggcgtcatgactggcgatgactggatcgaagagaaggttctcgccgcaatcgccaaggcaaccgcctaa

SEQ ID NO: 340520 - DNA, 270 bp, Pseudomonas aeruginosa
atgtttgatttcatcgtcgccacgaaccagggcactgaagaccaccacatcactggcgccagtctgtacgacgaagacggccaggtcatcggcggggtggtgttcttcgcgcacaaggacatgaccctgaccagtggtgaagttgttcgcccgttctccgggaagctgaacagcgtcagcttctatcaccacagcgcaacgctcatgcgcagccaggagaatgacgcgctgtttgacgccgccggcaacatcaccaccattcgccgataa

SEQ ID NO: 340521 - DNA, 1188 bp, Pseudomonas aeruginosa
atggacccaattctcaatccttactctccaggagcgggaactccgccaccagagcttgctgggcgggatgctgttagagagcaggtccgaatttcgctaggtcgccttctacaccgaaaacccacgaaaagcgtaatgctggtcgggcttaggggggtggggaagacggtactgcttgatcagatgcggcaagacgccgagggatctggcgtcaagacaataagaattgaagcccctgaaggaaggtcgctgcctgcgatgctcgctcctcagcttcgaatcgctttgctttccctcagtcgagtggaggctgcaaaagacaaagcagttaccgcgttaaaggcgctggcaggatttgcaagcaaactgaaattcaccttcaacgatatagaggtcggtctcgactatgagcctgaagccggcctggccgataatggagaccttgaaggcgatcttgctgtattgcttgaaagcgcgggaaacgctgcgctagatgctgggactgtgctcgcaatcttcattgatgagcttcagtacgttgaagagccgcaaatggcggcactgatctctgccttgcatcgctgcgctcaacagcggctacccgttaccgtgattggggctggacttcctcagttgcgcggacgaatgggcgaggcaaaatcctacgccgagcgtcttttcgatttccctgccattggcgccctttcggatgacgacgctgctcttgctatcgtgaagccagctcaggacgagggagtcgatgttgaagacgctgccgcgaagaaaattgtccaagaaaccaaggggtatccttatttccttcaggaatggggaaagcacgcttgggatattgcggatgccagccctatctcgttggatgatgtatctcgagcatctagcgttgctatcgccgcgctggatgagagcttctttagggttaggtttgaccgtctaacgccagcagaaaagaagtatctgcgagcgatggcagacttaggacctgggcctcaccgatctggggatatcgctgatcgcttaaatcgatcatcgacgtcattaggtccagccagaagcagcctcattgcaaaagggatggtctggagtcctaatcacggcgataccgcattcactgtcccacttttcgatgagttcatgaaacgaatcatgccgggcgatgattggcagtga

SEQ ID NO: 340522 - DNA, 822 bp, Pseudomonas aeruginosa
atgccggaactgaaagtacatgcaagcgcatgcaatgatgaacgtatggttcaagacatagatttcgaaaggcgggaattcgtaaaacgccttaagcatgcagcttccgcagccggctttgatgactgggggctaggcgcgcgcctagccgaaatcacaaaggtcacaccgaaggctgctagcaaatggctcaagtgcgagagcatgcctgggcgaacaaagatgaaggccatagctgcggccttgagcgttcgcgttgaatggctccagtacggtataggcgatcgccttgatttttccacggattcggcgaatatccttactcctaatgtggtcgaatcaggcagcgacccgttcacgagcgaacttttgcctagatcgccgagcgagagggatttcgtcttgattccggtcatctctatagagagtggcgaacctgctttgcttaatgagcacatcaagatcgaaggcggccaggcgctacctaggacattgatcgaatcactccgtctgaactcatcgaaatgcgtcttcataaagtcgccagatgcaggcatggagccatacattttcgatggggatctggttctcgttgatcagtcccagcgtgagatcattgacaaaatggtctatgcattcattggcacggactcaagggtctcgcttcggcgcatcagcatccagctttcaggacaggttgttttgcgctctgataactcagataagatcagattcccggatgaaaacgtatcaaagtccgaaatagaatctattcctattttcgggagagtccgatggaggatgggcggaggcggcctttag

SEQ ID NO: 340523 - DNA, 240 bp, Pseudomonas aeruginosa
atgagctacctgaaacagtcaattgccgacgctggcggggtcaccgccgtggcacttgcctgcggtcttagcccgcgggccatctacaagtggatctctgctggatccatgccacgcaccgagtacaccggagagaccgattacgccaagaagatcgcacgcttggcgaaggctaacggacatcaaattgatgcctctgagcttcgccgtagcgcatcaccaaagaaatcagccgcataa

SEQ ID NO: 340524 - DNA, 963 bp, Pseudomonas aeruginosa
atgtatttgatggctaaaaactggctgggcagaacacggaaagtaagtgtttggatgtgggcgcttctgtgccttgtgttgctcaccgtattccaagtacgtactcatcaccttgatgatcgtctgtacttctggatcaagacccactggcacacagacgattggcaggaacgttctgtttggctgcctggctatcgggttgaactggatgctaggccggttcccggtgtggacaataacctttcgggcctgaccttcgaccctgatctaaaactgctgtgggcggttaccaatggcccgaacgaactgctggccctaagccgtgacggtgacgtggagcgacgttacagcctggatggcttccacgatgtggaagcggtgtcttatgccggcaacggtcaattggtaattgccgaggagcgtcggcagagcctggttatcgtggatgtccccatcgacgaaaacggcaagctttcttctgaccgctcattgagccgaaaccagtatccagctctgaccttggcacttggcaaagagggcaacaaaggccttgaagggctcgcctacgacctggaaggtgaccgcctgtttgtgaccaaggagcgtgaccctcgccaattgcttgaggtgagcggccttcgtgccagtctgacaggaggtttttccctgcacgtccgcgacctgtccagcttagtaaaagacaaggtatttgccactgacttgtcttcggtcgtcttcgatcaacagatcggtcatctgatattgctgagcgacgagtcgaaactgctgattgaaatgaccgatgagggcacggtggtgagtttccgctccttggcgagggggtttgctggtttgctgaaaggcataccccaagccgaaggcgtaaccatcgacgatgaagggtatttgtacgtggtcagcgagccgaacttgttctatcgctttacccgcgagacagattga

SEQ ID NO: 340525 - DNA, 354 bp, Pseudomonas aeruginosa
atggaagaacgtgtgacttatggagaaatccgggcttggtttctgggcagctattacaactattgcagggtcaaactcaaccaccaaagtccatgggttgagggagaaagcgaagtaggctatgcctacagtgagcttgaaaactcctttgatttgcctattgagaaattaatgttggaagttttagtgcttattctctcggcgggcaggtcttcggataaagtcaagagatatcatcttgatgttattcatggattgctaaaggagatcaagctgtcttctgttctggatgatttgccttctgatgaggcagcagagctaagagacgatctcagagtgttaggtctttattaa

SEQ ID NO: 340526 - DNA, 150 bp, Pseudomonas aeruginosa
atgaaaggcgagaacctggaagtgaccgtagatcctccgcaacctggtagcgcagagttcgaagaattcgttgagcaggctgcggaggcggtttaccaagaggtgctgaggcggctcgaggaaaagcaatcctctgttacttcctcttga

SEQ ID NO: 340527 - DNA, 1128 bp, Pseudomonas aeruginosa
ttgagaaaccagttgaccattggcccaatagctcatgccacggtagatcgcggcgatatcgcgcagcagttcccatgcaccagccttgctctgcaggttcatatcacacaggaagcgcggctcctggccacccttgccgtccggcaccaactggtcgcaatactgcgcaatgcgatacaactcccacttgtcgaccatccacgacttgatgcgtttgcccaagccgaaaagatcgttggtgctgatgccgtaggtgatccacgccgggttattggtccaggcaagcttcatcgtgccgtcccagacgccggaataagttcgagtgtccggatcgtagttgctcggcaccatccacttccgccccttgcattccaaggtcacggcaggaatgttgctgaactgctctgcactgaactcaatgaacaacagcgcggtgcccggataccgcagcttggcgtcaatcacctcggagtacgcagcgatgagcatcgtgtcgctcaccaggctgctgttcttgttcggcgtgagccggcgcacgcgcacctgccagccgctggttgccttcggcaaatcgacccggcgagagcgctcgtagcgggtggtggtcttgccatcgacagcctcgcgcaacatctcctcgtacgcgccgccatcggtggctacgtcgacggcatattcgatccggtacccgccgatgttgccgttggtgtcctgctgctggagcgccggccatgcaaagcgcaggcgcactgcggaaagctgggtattactgagcgagcgcacccaaggggactcgccgcgcaactcgacgttgacagacgtctcgttctcaaccgcagggatgccagggatgtattcctgatccacagagccagggcgaaactcccacttcacgttcgggaagttcaggttgccgctggcgtccatcaggggcgtgttgtccaggtaaatgccgcgctccgtagggccatcggcaaactcgccctcgccaacagcgatcaggatcttcgcggtcgcaacggactgcagactatccggcgcgatcgacggctgtttcggcttgctactgccgcccttgcggccggccaggtgctggtgaactgcgcccatgctttcctccgggcatga

SEQ ID NO: 340528 - DNA, 585 bp, Pseudomonas aeruginosa
atgctgcaggccactgatggtccactgcgacccactccgcttcaccgacattacgcggtagagctgcacagccaggtcctcggcatccaatgcccagcagagttgcggctccggcgccatggagtaggccgtggtaacggtcacctgccgcccactcacagcctcaatcgtacggccttccgcacggccattcggcagattgatcagcaagcgatcaccggctttcgccaaggtgtcgcgatcaagggtgatgactcggccagcaacggcggatatccgcccgccaatctctcgaccagccagcacagcatcagccaccggaataatgtgcccaggcagaggaatccgcccctccagtccggtgctgaacgtcacggcacgatccagcacactggtcagtaccacccatttaccgcggcgcttagcctcgctctcacgggtacagccgatggcagacacctcgaccatgttgtcgttgtagcggcgctgcagctccggatcagcgaacgcggtcacgtcggtgtcgtagttgttcgccgggttgtcgtagctcaccaaggcacggccgtaacgcgcgcgcggtga

SEQ ID NO: 340529 - DNA, 294 bp, Pseudomonas aeruginosa
atgaccgctgaactccagggcgtcctgatctttacctcagctttcgcccaggtcttcctcctcggtctgaacagcaagctccttcgtgacgacaagatcgccgccggcttcgtagtgtcctggatgatcacgctagcccagttcggctacatctgggccgtcgcgcactcgcgcatcgataccgtccctttcctggtgatctctggcttcggaggttccatcggtatcacctccgcgcagtacttctaccgctggtacgacaagacttttcatcgcaaaggggagagcgcatga

SEQ ID NO: 340530 - DNA, 465 bp, Pseudomonas aeruginosa
atgattatcggtatcgacccgggctgcactggggcgattgtggtgctcacggagagcctgaaccacgtcgccagcctcaacatgcccaccgtcaaggtaggaaccaagagccgcgtaaacggcgctgcaatcgcggcgttcctgcgcgagaaggtgggtgagttcgtttcccacgcttacctggagcaggttggagccatgccggggcagggcgtctcatcgatgttcaccttcggccatgcggccggcgtagtagaaggcatcctccaaggcctaagcattccttattcgttggtcactcctcaggcatggaagaagcgcgctgggctgatcggcatggataaggatgctgcgcggagtcgagccatccagctctatccaaacctgcgggatctagataccaaatgccgcgggcaagccattgccgatgcattactgatcgcacggttcggagagaagccatga

SEQ ID NO: 340531 - DNA, 228 bp, Pseudomonas aeruginosa
atgagcgaagacaaagttgtcccgatgaagaagcgcgaagaccgatatgaggcccttattggggcccgtgacgagttccaggagaacgtctatggcgccatccatgcggcttggaactccggcgttgatcgtgagctgatgcgcgaccagatgctgtgcatcctccaccgaatcatggccgacctcgactttgaccaagtgaagttcgatccggaggagccggcatga

SEQ ID NO: 340532 - DNA, 336 bp, Pseudomonas aeruginosa
atgagcaagttcaaggcgggcgatctcgcactggttgttagcggaagtaccagttccgtgaacgtcgggcgcacggttctgttactcgaaagtatggggtctcctgttttctacgagtgggatggcgagcgatatcacaacgctaacggcgatcacatctggatcatagaggcgcaaggggaggcactggtaacaagatttggttactgcgcgaagcgtgggctgagcgagacaagcacatccttcttcgaaagctccacgtgccatacggcgaggaagacaaagcatgagcgaagacaaagttgtcccgatgaagaagcgcgaagaccgatatga

SEQ ID NO: 340533 - DNA, 405 bp, Pseudomonas aeruginosa
gtggctgaccgcacattccgcattcaaggttccgctgggatccgtccggctttcgttgcggcctggaacctcatccagggactgatgaaagaagcacagggcggctacgagctggtccttcgccccctcaagtcgaagcgctccatcgagcagaacaagcggtaccacgcgctgctccgtgatctggctgccgtggcttggctggatgggcgccagtacggtccggaagcctgggccgagtacttcaagcagaccttcatcggctgggatgacctgccgggtggcgggaagcgcgggatcagcactaccacgctcagtgtcgctgagttcggcgactacatgactcgtatcgaagcttgggccgccgagcaaggctggccgctgatgattcaggaggccgcatga

SEQ ID NO: 340534 - DNA, 1632 bp, Pseudomonas aeruginosa
atgccagctgacctcgtggatggcctgatcggccagtacaacgccacccgcgccggcatcaccgccctggcccaggccgtgcgcgctgagcagtgccgcggcgtgctgcactacttcgtcgagggcaacgtctccgaccagcgccacacgctaccgaaggccgtggaccaactgttccgggtggaaggcgcgattgcccagttgaacgccgacttctggagccgcgcgctgcgcatgaccgacgtgctcgattgcatgccgcagaagcgccgcgacgagtggttcgagcagatcaagcacccggaagggaagaagcgggacaagtacgacacggaatacgtgctgccgccgctgccagagttcgaagagagcagcgtgcgcgctaccctgggcggcctgctggccagccgggcgaagttcttcgccgagcgcgtcgatggcatcttccgcgcgctgagcaaggagcacgtgaccaactgcccgcagggcttcaacaagcgcatgatcctgctgcgcgccatcaccagcttcagcacggtcgaccactccaccgccggcgtgatcaacgacctgcgctgcgtgatcgccaagttcatgggccgcgacgagccgaagtggaactcgaccagccacgtgatcagcgtggcgcgccaggacaacggccagtggatgtcgatcgacggcggcgcgctgcggatccgcatctacaacggcgtcggcaccgcgcatctggaggtgcacccggacatcgcctggcgcctgaacgccgtgctcgcgagcctgtacccggcggcgatcccggctgaattccggaccaagccgaaacgcacgaagaagatcaaggacttcgagctgttcgaccggctgctgccgttcgcggtgatcgagctgctgtccggcatgaagcccgcctggcgcaagcgcgagaatcctggcttccgcgagcccaagttcgtcgacgtcccgaagaccaggcgcttcgaccatggcgaccacgacaaggctgccttggccgaggccgagaaggtgctggccgcgctcggcgccgtccgcgacaaggagggcaactgcgagttctggcggttcgactacgagcccggccaggtgctgagcgaggtcatttgcaacggcaggatccccgaccacaagagccaccagttctacccgacgccgtcgagcgttggcgagctggcggtcgatcaggccctggtcggcgcgaccagcgacatgaattggctggagccgagcgcggggcagggtgggctcgcggacctgatgccaacggggagaacgcagtgcgtcgagatcagcccgctgcactgctcaatcctcaaggccaaggggcacaacgtgatccaggcggacttcctgaagttccagcctgccggcaacttcgatcgcattgtgatgaacccgcccttcagcgagggccgctggcaggcgcacctgcagcacgccgccagcatgttgaactcggttggcggccgcctcgtcgccatcctgccggccagcaccaagggaaagcagctgctcgaaggcttcgaccacgagtactcgcaggtcttcgagaacgagtttgccggaacctcggtcagcgtggtgatcctttctgcggaggtgtgctgtggctga

SEQ ID NO: 340535 - DNA, 216 bp, Pseudomonas aeruginosa
atgaagaccttcgaactcctgcgcatggaaggcctgcgcacctacggtcggcaagttgaggccagcacctggcgcgaagccgagcagcaatgccgcgacggcgagatcgtaaacggcgaactgatcggtgtgtacgactgcgatccggtgactgaggcggtctgcactgcgcgcaatgacgtgatgattgagagtctgggggtgtgctgtgggtag

SEQ ID NO: 340536 - DNA, 306 bp, Pseudomonas aeruginosa
atgagcaagttcaaggttggggatctggcaattatcgtcgcatgcaggctgccagaacttatcggaagggcggttgaactcgtcaagctggtccctgccggcactcaggatgaacacggtggtaggccatggaagaatctgagcgacatttctgcatggatcgtcacagcagatgaccttcttgtcctgacggaaagtgggaatgtcgtgagagaccaattcaccctgatcgctgaaaaccgtctaatgcctctccgcggcgacttccagccagagcagcggaaggcgaaggaggtggaggtatga

SEQ ID NO: 340537 - DNA, 342 bp, Pseudomonas aeruginosa
atgaacgtcgtaccgatcactggccgcatccctgaagagcagccgaaagctacccatctgccgctctgcaccgtgctgacgccggagctagcccgttgcctggaagccgtcaacagcgccacccgcgccttgcgccaggccggcattccgattgagcagacgtcgttactcgatcgccgcctgttcatctgcgaagaggattcgctgcggctgcaccgccgcttccgcaacgccatccgcggcattcgacagaccactcgcgggatggtcatcgtccatgtcgtcagcctgctcggtgttgacgtggcctggacgaccctggtgaaggagcaagaccaatga

SEQ ID NO: 340538 - DNA, 588 bp, Pseudomonas aeruginosa
atgcagcccgctctccgcatcgtagtactgcccggggaagcgcaggttgacctgggtgctgccctggctcagcgcttcgccgcggccgaaggcgtcggactgccactgccaggcgatctggccgctggcgtcggtggccaggcgcggggtgtcgaggtggtcgccatggaggtagagcagggtcgggttgccgaccttgccctgggcgtcgtagtcggcgtcgatggtggccagcggcaggctgtccagccacaggtaatactgggctcgcagtttccggccgctgccgtcgtgttcggcttcgccgagcaactggccgtcgggaccatagaggtaggtggtgacgctctcggcggtgagcttgacgatgcgttggccgagggcgttgtagcggtattcggcgacctgctggccgtcgcggctgacgctttgcaggcggccctgagcgtcgtaggccagtttgcgtgcggggcggtcctgggtgaggttgccggcggcgtcgctcgtcaccgcttgcgcgccgatggcggtcaatcggttactgtcgggcgcgtactggtagtcctggctgctggaggtgccgcctga

SEQ ID NO: 340539 - DNA, 600 bp, Pseudomonas aeruginosa
atgtccaggcatgaagacctgctgttgcaactcatccagcgtgaccccgacaagatcaggagcatcctggggctgctgatggactcgctaccggatgattccgctcccgagtccaacgaaggcgcgaatgacgaaatcaaacagcaaatgcttgcgcaaaggcacggctgttcgtctcatcacctggaacggtggctacaggccttcgagcgtcgaataaaggaacagactgctcggctactggaacctcttattgatcctgcggacttttgggatctggtatcgaaaccacgttgtccggaacgtccccctgcgcaggcgctggaggccgaagagccggccaaaccggggcccctgaaacacatcgcgttttcagggccacagcgtgtcttgctggaccagttggcgcagtactggctcaggatcgccgcagtatcgaagcgcgaggctgaggcgaaccccaacccggaccagaagcgcgggctggagatgaggtacatggcgcactacaactgcgcggcggaattacagaatctgctccagaccggggagcttccgggccatctcggttttcaggtactcgcgcaaaagcccgaatga

SEQ ID NO: 340540 - DNA, 204 bp, Pseudomonas aeruginosa; identical to SEQ ID NO: 329441

SEQ ID NO: 340541 - DNA, 1014 bp, Pseudomonas aeruginosa; identical to SEQ ID NO: 29928

SEQ ID NO: 340542 - DNA, 657 bp, Pseudomonas aeruginosa
atgatctctgagtacctgaaggcccagcagctcaaggtgggacggtatctggccggaaaactcatggaggaggcaaatctggaaagcaagcagcgtcgtcctcatcggaatcgctccaaaggtgttgaagcgtttgtggccaagaacctgctcgaacgcaactttgagccaacagcaattaaccaggtctggtgcggtgacgtgaccagtttgatggtcgggaagcgctggtatcacctggcagtagtgattgacttgtttgcgcgtcggatcgttggctgggcgttttccctgatcaacgacgccaacttggttagcaaggcactgaggatggcagtaggggttaggggcaagcatacaggcttgatgtttcactcggatcaaggctgccaatacaccagccagcgcttccagtccgagctgcttgagcatggcataacgcagagcatgagtcgcaggggacaatgctgggacaacgcaccaacagagcgtttctttggaacgctcaagtcagaatgggtgccgcccaagggctacaaggaaattgaagaagccaagcaggacatgaccagcttcttcatgcgatacaaccgaatcaggctccacagctacaacgactacctgtcaccaatagctatggagcagcaggcggcttga

SEQ ID NO: 340543 - DNA, 309 bp, Pseudomonas aeruginosa
atgcaagaacgaaagacctacacccgcgagttcaagcaacgtgctgccagcatggtccttgatgaccactgctcgattcccgacgtctgcgcctcaatggacgtcggccctacagccctgcgccgctgggttgatcaggtgcgtaaagagcgacacaagggccagccagtagccggtaccaaagcgatcagcgacgaacagcgcgagctccagcagctgcgagccaagatcaagcgcctggagaccgaggctgaaatcttaaaaaaggctacggctctcttgatgtcggatcccgatcgtttttcctga

SEQ ID NO: 340544 - DNA, 279 bp, Pseudomonas aeruginosa; identical to SEQ ID NO: 339548

SEQ ID NO: 340545 - DNA, 981 bp, Pseudomonas aeruginosa; identical to SEQ ID NO: 339546

SEQ ID NO: 340546 - DNA, 561 bp, Pseudomonas aeruginosa
ttgcagggacaacgcatcggttatgtccgggtcagcagttacgatcagaatccggagcggcaacttgagcaagtcgaggtcggcaagctgttcaccgacaaagcctcgggcaaggacacccagcgtccccagctggaggccatgctcggcttcgtccgcgagggcgacaccgttgtggtgcacagcatggatcgcctggcccgtaacctcgatgacttgcgacgcctggtgcagaagctgacccagcgcggcgtgcgtatcgagttcctgaaagagggcctggtgttcaccggcgatgactcgccgatggccaacctgatgctgtcggtgatgggggccttcgccgagttcgagcgcgccctgatccgtgagcggcaacgggagggcatcgccctggccaagcagcgcggcgcgtaccggggccgcaagaaggccctgtccgacgagcaggctgctaccctgcgtcagcgggcgtcagtcggagagcccaaagcgcagcttgcccgcgagttcaacatcagccgggaaactctctaccagtacctacgcacggacgattga

SEQ ID NO: 340547 - DNA, 588 bp, Pseudomonas aeruginosa
atgccctactggttcttcgccaacggccgacgcttctgggtcgtcgtgaaagtctcgacgatctacgagtcggccggcgccggcttcatcctgccaccctgtccgccgtcgcagtatccgtacccgctcgcggtagtgggttcctatcgcggggacgtcgctgtgcgctggtccgacgtcagcgacagacaccgtggcatcagtagcccactggagcgcagttgctacgtccgcgaccaggccggacggtggctcggcttcaccgttgcatcgaatagcaacaatgaatcggactacaacaatcggaccctgttgccgctgggctgcgcccgctatgcgggtagtagcgacactgtgatcaaccagctccgagactctttcagcaagttccccctgaaagcgctgtcgttcgtcacccgcgaaaccgagggacgccggtacctcggtgacttcgacggcgctttctacgtgccaacgctcaactccggcgccgaggacgtgattgtcgaggacggagtggaccacgttgttttccaaaccgcctggcgctccggcaacccctggctctacgcaatcaggaaggactga

SEQ ID NO: 340548 - DNA, 219 bp, Pseudomonas aeruginosa; identical to SEQ ID NO: 340460

SEQ ID NO: 340549 - DNA, 468 bp, Pseudomonas aeruginosa
atggagcgctaccactcaacggccggcgatccacctcggcgtgatgctgacgtaaagcggcaggaggcccaggagctggacgaactggttcagcagttcttggccggcggcgggcagatcgagaaagtcgggtacaagatgcgcgagctgccggacactttcgtcatcaaccccatgaagacgccggtatacaacggtgccctggccgagaactcgtcgctcaaagccaagcctgccgcaccgcgcgcgcaagcaaagaccgagccccaacgctcaccagcgcccgtgccggctttgcagccggctcctggcgtgaacccgaaggtctggttgagccggatgatcgccgcccaggcgctgctggccgcgcagacggccaggctcgctcgcgaactgggcgtcagcgatgccgagctgcgccggctgggtcgtcggcatggcatggaggtgttccatggcactcgctag

SEQ ID NO: 340550 - DNA, 333 bp, Pseudomonas aeruginosa
atgcgcgacgagcaattggtgccactggtcaaggccgcgacgaccgagccagaggtagacgacgcgctcgctggactgacgctggccgacctgcggcaacttccgcaggcgctcgctcagccgcaggcggttctcctggatgcatcatccaacgctctggtctacgtgttcgactctggccgacgcggaggctggctctcaatgatcgtcaactatctcctgcagggcagctcgcgcagcaatgccgtccagtccggcagcgtggtcggcgtcgagcagctcgggcagcagttggccaatggacgtttggttttggtggagggtggactatga

SEQ ID NO: 340551 - DNA, 390 bp, Pseudomonas aeruginosa
atgaaggtcgagctggaactgtggcagttgatcactctgctgctgaccttcctcggggcctgcgcgggcggcggcaagctgctgctcaaccagatacagaagagcctggatgcgaggttcgcaagccaagaccaggcacgcctggcgaaccatgaacaactctcctaccggctggacgccatcgagcaggccgcgcgggaagaaaccaaccagtggcagcgcgttgagcgggagctgatgagcctgaaggccgagcttccgttccagtacgtgcttcgcgacgactacatccgtggccagagcgtgatcgagatgaagctcgacagcctggccacgaaactggaaaacgcgcagctgcgcggcttggtaggagctaaccatgcaaactga

SEQ ID NO: 340552 - DNA, 408 bp, Pseudomonas aeruginosa
atgcaccggccaatcctggtcaccccggccaacttccaaaagcccgagagcgcaatgctggccttcgatggcagcgctactacccgcaagggtgtggagatgctggcggccagccccctgctgaaggggctgccgatccacctggtgatggttgggccagtgaacgacgaatcgtccgcgcagctggactgggcgcagaaagtgctgctcaacgtcggattcactgttcgcgccgagaccctgaacggcgagatagagcctaccttgcacgcctatcagaaagagcacggcatcgacctgctggtgatgggggcctacggtcattcgcgcatccgtcagtttctggtcggcagcaccacgaccagcatgctgcgcaccaccactggcccactgttgctgctgcgctaa

SEQ ID NO: 340553 - DNA, 315 bp, Pseudomonas aeruginosa
atgagtgctgaaaagtaccgctccgagcaggtccagcgcgctctgcgggtcatgttggccctgggggccaacgatttccgagggctgctgttgaaggaggtagccatcgccgccgagtgcgatgcgagtaccgcgctgcgcgccctggagaacctgcgcattgccgggctggctgaccgcagcccacatgacgacaagcgctggctgctcggaccccgcctggtccagctggcctttggcttcgacgaagccctgcgccgcggccaggacgaactcaacgagcgtcgccaacgctacacccgccttccgaactaa

SEQ ID NO: 340554 - DNA, 201 bp, Pseudomonas aeruginosa
atgtacgcagatcagtcccacaagcgggacatcccccgaaaggtccgttttaaccgtgtcctcgacaggattcttgagcgcgccgctaacaaggcacgtcgtcagcacgccacctacctctacgaggtcatcgaatgggctgttgagaatggcgtgatcgaatcactgagcaaggaaggcgaagagtctagcgcggcctga

SEQ ID NO: 340555 - DNA, 1314 bp, Pseudomonas aeruginosa
atgtgggtagaagagctttccttagaaaacataaaatgcttcgaaagagagtccattaaatttacaaacaaaggcaagcactataaatggatcacttttcttagtgaaaacggctgtggaaagagcactatcctgcaatcacttggcctactcttggctggacctgaaggagtaattaatttactgcctagacccacaggctggctaagagatgaagctaaagctggaagaatttccatacgaatccaccaaggaaactctgaccccggagactttggcgagaaaaaggtcaggaaatcttatggttatagttatcatgtaagcggaagcactccaattcaaatcaggggaagaacttttacagaacccggcatacatgaaaactcagaccgaactttaacttggctccgtcaaaatgccttgacatcaaaaggacaaggatggtttgccgcaggttatggagcattccgtagactcactcgttcccatcagttaatcgtcccaactttagaaccacaagcaagatatacaaacttcctcagccaattccaagaggacgagtctttatctgtcttcgaaaaatggatgatatatcttgactatagaatagctaaaagcgacgaccctcaagaccataggttaaaatcccttggaattgcagccgtagacagtctactcccagacggagtaaagttcgactcgataaatactgaaggtcgtatactttacaatgtgaacgaggagattgtacccacaatatcacttagcgatggatacagaagtattcttgcttttgcaggagacttaatatggaggctaattttagcttttccggaaagtacgaacccagctcacgaagaaggagttgtacttatagatgaactagacattcatctacaccccatttggcaaagagatattgcactaaagctaaggactgcctttccgaatatacaattttttgtatcaacccatagcccactagttgctgccggagctgggcatgatgctctaacaataaaactaaaaaactcaaacgaaggaacttccgcagaaattataagtgacatacacaaattcccagttgacaaggtccttatgacagaggcattcggccttgtatctgcctactcgcctcaaacaaatgaaaaaatggatttttacaattatttatacaacaaggaaaaccccaccacagaagaaaaaaatcaattagcacttcttcagccgcaagtaaaggaaataataaaccaaaaagaagaaagcgaacttgatagcaaaatagactccctgctggaaagtttgaagaaatga

SEQ ID NO: 340556 - DNA, 663 bp, Pseudomonas aeruginosa
atgataaaagtcaatagaaccagaagaccggcagcgataaaagaaaatgcgaccacttggaaaaatgactacttactggcggtagcatcacaagacaaaggaagaataaaaaccacagagtccagatacaaaaacaaagcaataaagaatgagctacaaaaaatgttcagtaaaaaatgtgcattttgcgaatcgctaatagaacacatttcatattcacatatcgaacactttaaaccaaagtcaaaatacagaggaaaagcatttcaatggagcaatttgctattagcctgcggggtatgcaatggaaaagcatacaagggagacaactttccactaaaaaatgaaggcggcccaattataaaccctacattagagaatccttccgaccatttatcattcacttatgacgaagctgcaggtgcagcaatgattaaaagcaaaagcaagcgaggagaaacaaccttaaccctccttggactaaatcgtacagatttaataatttctcgctcacagatcataaaaaaaatatatacactccacctaatatacaaaaaccaaaaaacaccacaagaaataaaaagcgaaatactagaaattttaaatgaagctgccactgccactcagcagtattctgcttttgcgaaagcactattaccatag

SEQ ID NO: 340557 - DNA, 1266 bp, Pseudomonas aeruginosa
atgaacccgagcaccgccgcccgcgccctgggcatcgattttggcacctccaactccaccgtcggctggtggcggccggaggtcgaaccgctgatcgagctggaggacggcaagatcaccctgccctcggtggtgttcttcaacgtcgaggagcgccgcccggtctacggccgccaggcgctcggcgagtacctggagggctacgagggccggctgatgcgctcgctgaagagcctgctgggctccaagctgctgaagagcgagaccaccgtgctcggcagcgccctaccgttcaaggacctgctcggcctgttcatcggccagctcaaggcgcgcggcgaggccgccgccgggcaagccttcgacgcggtggtgctgggtcgcccggtgttcttcgtcgacgacgacccggaggccgaccgcgaggcccaggacaccctagtgcaggtggccaacaagctcggcttcaaggaggtttccttccagtacgaaccgatcgccgcggccttcgactacgagcgcggcatccagcgcgaggaactggtcctgatcgtcgacatcggcggcggcacctcggacttctccctggtgcgcctggcgccggagcggcgcaacctggccgagcgccaggacgacatcctggccaccggcggcgtgcacatcggcggtaccgacttcgacaagcagctcagcctggaaggcgtgatgccgctgttcggctacggcagccggatgaagagcgacgccttcatgcccaccagctaccacctgaacctggccacttggcacaccatcaacgcggtgtacgcgcagaagtcgcaattggcgctgaagaacatgcgctacgacatcgtcgacagcaccggcatcgaccgcctcttcaggctcatcgaggaacgcgccgggcactggctggcgatgcaggtggaagacagcaagatccgcctgaccgaaaccgagcgcctgcacctctcgctggagcgcatcgaggccgggctcggcgtggagctgacccgtgggctgttcgagaacgccgtcgacggactgctggagcgcgtgcgcaacagcgtcgcgcaactgctggcctcggccggggtcgacccggaccgggtcgacacggtgttcttcaccggcggttcgagcggcattccggcgctgcgccggagcgtctcggcgatgctgcccaacgcccgtcatgtcgagggcaacctgttcggcagcatcggcagcggcctggccatcgaggcgaagaagcgctatggctga

SEQ ID NO: 340558 - DNA, 633 bp, Pseudomonas aeruginosa; identical to SEQ ID NO: 52831

SEQ ID NO: 340559 - DNA, 969 bp, Pseudomonas aeruginosa
atgcagctgagcttcggggacgcggaacacacgggcaagcggaagaagacgcgacgcgagatcttcctggcggagatggagcaggttgtgccgtggaacgcattgctggcgctgatcgcaccgcactacccgaagatgggccagcgtggccggcagccgtacgcgctggcgacgatgctgcgcatccacttcctgcagcagtggtacgcgctcagtgacccggccatggaagaggcgctgtacgacacggcggtgatgcgccgcttcgcccgcctcagcgggctggacaacattccggacgagaccacgatcttcagcttccgccggctgctggagacgcatgatctggcgccgcagctcctggagcgcgtgaacgcgcacctggcgcgcaagggccagagcttgaaggccggcacgatcgtggacgccacgatcatcgcggcgccgagttcgaccaagaacagggacggcaagcgcgatccggagatgcaccagacgaagaagggcaaccagtggcacttcgggatgaaggcgcacattggcgtggacgaggagtcgggcctggtgcaccacgtggagtgcacggcggcgaacgtcaacgacgtgacgcaggtgcacaagctgctgcacggcaaggaagacacaatctgcggcgacagcggctacacgggcgcggacaagcgcgaggagctgcaaggcgtggaggctgcgttctggatcgcggagaagccgtcgaagcttcgtgcgatgaagaacaagcgtgatcgcaaatacgccgaacgctgggagcacttcaaggccagcctgcgggcgaaggtggagcatccgttccgagtggtgaagcggcagttcggttacaccaaggtgcgctatcgcgggttggcgaagaacacggcgcaggtgttgacgctgttcgcgctgtcgaatctgtggatggcgcggcgacgtctgttgctgccgacggggtaa

SEQ ID NO: 340560 - DNA, 258 bp, Pseudomonas aeruginosa
atgaagtcgatcaacgttgaagtcggagggcttgtatcgagcctgagcggtgagggagtgcgccgcaagctgctgtatcttcacggcgtccataatgcggatgccaactatgttgcgggaagcgcaacgattcatctcgacgagcgatgcctcagggtcaaggatctgcgccattgcatctccgaatgcggctatccggcaccgaagctcacccggactactgccgcagatggggcagtgccaagtcaaatcttgtga

SEQ ID NO: 340561 - DNA, 138 bp, Pseudomonas aeruginosa
atgatggaacaaggcagcgcctctcccgtctctgggctgcactacgccggcaagaagcataaggtcatcgctcccgaccgggagattgtcttcgagttctcgcaggactgtctggactcgggccgattcgctccttga

SEQ ID NO: 340562 - DNA, 372 bp, Pseudomonas aeruginosa
atgaacgcggagcgcatggcctggcgccccttgcgctggctcttcagccggcgcgcggcgacggcgctgctgtgggcggtggtgctcgtcgccgctgcggtgggtgccaacatcgccggcatctacctggtcggcagcgtggccggatgggagcggtggctcgcggccgcatcgggctacttcttcgtgtggcggctgtgtctgtacggggccacggtttacgggtggctctggatgcgccgccggctgctggcgcgcgaagaccaggacggggcagatgggcaggcacggcgccgcctgatgcgcagcgagatcgcgggcgtcgtcgccatcgtcgtgctggaagccagcttgttgatgcaggccgcttga

SEQ ID NO: 340563 - DNA, 399 bp, Pseudomonas aeruginosa
atgtccgagcagcagcacgtccgtgcggacggaacggtcaccttccttccgcaccggctcaaccgccatcccgttgtggtgcgcggcctcaccgctgacgaactctggatttgctgcggcctgtccggtgccgccggcctgctggtcggcgcgccgctgtcctgggtgttccgcacgatcgcgctggcgccgaccttcgtcgtcctgggcgtggcgctcggcgtcttcatcggcggcggcatcctgcgccgcctcaagcgtgggcgtcccgacacctggctgtatcggcaactgcaatggcgcatcgccacgcgccatccgctgatggccggctgggtgggtggccatgtgctgatctcgcgctcgggcttctggtccacccgcaggagcatgcgatga

SEQ ID NO: 340564 - DNA, 360 bp, Pseudomonas aeruginosa
atgcacaaccgcaacctcacttcccgttttgcccagcgcgccgccgtggccctgggcgccgccgcgctgccggcgctgtcgttcgcgcaaggtctgccgcaattggagaaccccacgcgcggcaccggcaacggcatcatggagacgatccgcaactacggctacgacatcatcatgctcgtggccctgctggtggtggcgtcgatgttcatcggcgtctgctaccacgcctacgggacctacgcggagatccacaccggccgcaagacgtggggccagttcggcctcacggtcgctatcggcgccgtgctgcttgtgatcggcatctggctgctcaccgaagccaccggcatcctgtaa

SEQ ID NO: 340565 - DNA, 384 bp, Pseudomonas aeruginosa
atgttggcttcgatctggctgcgcgccgcgcatcgcggcgtgcccacttttctcgtgacggccctcgtgctgggccggtccccgatggccttggccgagtccccggcgcagcgccaggagttggtcgccgcgctgcgccagctcgacgcgctggaacgcaccgtcgcggacagcgccgcgcatacccccatcacaccgggcgagcgctaccacttcgattacccgcggctccaggctgacttggcgcgcgtgcgcgccggcatccaatttcacctgacgccatcgcgcgctcaaccgcgcgccccctccgaactggccggcgaataccgcaccgaacgggcgaccgagccgctgccggcgacgactgcggagggcaagcaatga

SEQ ID NO: 340566 - DNA, 750 bp, Pseudomonas aeruginosa
atgaaggatgccgcctcgaccgcgcagcgggagcagaaccagcgccaggggctgatcgtcggcaccatcaccttgccgttcaggctgctcggggtgctgatcggttcgctgctgttctcgatcgtggtggagtgcgtcggcatgcacctgttctggaaggaccagggctggcgccactcccagcagatgctgcagtacgaactcgggcacctgtcgaaccacttcacgcgcagcgtggtggtgcaggagcccgggcgcacggcgcacgagctggtggataccgggtacgggtgggtgttcgtgcgctcggggttgctggagcgcatgagccagaccgccgagcgcgcccgtgcgcccagccgcgagccgacgcgcaacttccgctattacatcagccaggcctatgtctgggccgagagctacctgatcgccgcggccttcacgacgctcacgttcctcgtgcgcctgctggtcctggtgctcacgctgccgctgatcctcactgcggcattcgtcggcctgatcgacggcctggtgcggcgggacgtgcggcggttcggcgcgggccgggaatccggcttcatctaccaccgcgcgaaagcgagcctgatgccgctggccgtgctgccctggatcacctacctcgcgctgccgatctcggtgcatccgctgctgatcctgctgcccagcgcagccttgctgggactggccgtgagcctgaccgcgggcagcttcaaaaagtacctctag

SEQ ID NO: 340567 - DNA, 2190 bp, Pseudomonas aeruginosa
atgtcggggaaacagcccgtcgaagtcctgttgcgcccagcggtggagctatacaccgtcgcggcatgtgcgggcgccgcgtttctgtccctggtggccccgtggtcgctcgcgctgagcccagccatgggcgtcggtgccgcactggcgttcggcgcctatggcgcgatccgctaccgcgatgcgcgggtgatcctgcgctaccgccgcaacatccggcgcctgccgcgctacgtgatgacgagcagggacgtgccggtcagccagcagcgcctgttcgtggggcgcggtttcctgtgggaacagaagcacacccacaggctgatgcagacgtaccggccggaatttcgccgctacgtcgagccaacaccggcataccggctggcgcgacgcctggaggagcggctggagttcgcaccgtttccactgtctcgcctcgtacggctcacgggctgggatgtgtcattcaaccccgtgcggccactgccaccggtaggcggcctgccgcgattgcacggcatcgaacccgacgaggtcgacgtcagcctgccactgggtgagcgcgtcggccattcgctggtgctgggcaccacgcgcgtggggaagacgcggctggccgagttgttcgtcacccaggacatccgtcgcacgaatgcagacggtgagcatgaggtcgtgatcgtcatcgaccccaagggcgacgcggatctcttgaaacgcatgtacgtcgaagccaagcgagcgggtcgcgagggcgagttctacgtctttcacctcggctggcccgagttctctgcacgctacaacgcggtggggcgcttcggacgcatcagtgaagtcgccacgcgcattgccgggcaactctccggcgagggcaacagtgcagcgttccgcgagttcgcatggcgcttcgtcaacatcattgcgcgcgcattggtggaactggggcagcgcccggactacatgctgatccagcggcacgtaatcaacatcgacgcgctgttcatggagtacgcccaacactacttcgccaagaccgagcccaagacctgggaggtgatcgtccagatcgaggccaagctcaacgagaagaacatcccaaggaacatgatcgggcgcgagaagcgtgtggtggcgctggagcaatacctctcccaggcgcgcaactacgaccctgtgctcgatggcctgcgctcggcggtgcgctacgacaagacctacttcgacaagatcgttgcatcgctgctgccgctgctggaaaagctcaccagcggcaagatcgcccaactcctggcgccgaattactccgacctgtctgacgcgcgcccgatcttcgactggatgcaagtcatcaggaagcgcgccgtggtctatgtcggcctggatgcgctgtcggatgctgaagtcgccgcggcggtcggcaactccatgttctccgacctggtgtcggtagccgggcacatctacaagcacgggatcgacgacggcctgccgggtgcctcggctggcacgcgcattcccatcaacgtccatgccgacgagttcaacgaactgatgggcgacgagttcatcccccttatcaacaagggcggcggtgccgggctgcaggtgaccgcgtatacgcagacgctctcggacatcgaggcccgcatcggcaaccgcgcgaaggccggccaggtgatcggcaacttcaacaacctgttcatgctgcgggttcgggaaaccgccaccgcggaattgttgacccgtcaattgcccaaggtggaggtctataccaccaccatcgtctccggcgcgaccgatgcctcggacatccgcgggacgacggacttcaccagcaacacgcaagaccgcatcagcatgtcgagcgtgccgatgatcgagccatcccacgtcgtcggcctgcccaaaggccaatgcttcgcgctgctgcagggtggtcagctctggaaggtccggatgccactgccagcgcctgaccccgatgaagtgatgccggcggacttgcagcaactggctgggtacatgcgtcagagctacagcgaggccacgcaatggtgggagttcaccagttccccagccttgcaggaggctgccttgcccgacgacctgctggatgacgccgctccggccgagcctgacgcggtggccaccggcgccgacgacagcaccggcgaggccgcaccatga

SEQ ID NO: 340568 - DNA, 540 bp, Pseudomonas aeruginosa
atgacgaaaccgctctggaccctgcggggcctgctcgcgctgctggcggcgctgccgttggtcgcgcatgccgccgaaccgctgatcgtggtcgaggaccgcggcggcgcgtcggcgctgccgtactacgaagcgcttaacctgcagccacgcgccaacagcgcgttgcggcctcccattccgacgccgcagattcccgccacccccgctgacgaggcagcgatgctgccggtacgcagcgcgaagctgatgcccggcttcgtcgcgcggcgcgtgatcgaggcaccgggcctgcggcctttcgtggtcatcggcgacgatgagacctcgcaagcctggctgcgccgtcacgcggcgtcgctgcacgaccgcggcgcggtcggcctggtggtcaatgtcgagaccgcgcaggctttggcgcggttgcgcgcactggcgcctggcgtgccgatggcccccgtggccggcgatgatctggccgaacgcctgggcctgcggcactacccggcgctgatcacggcgaccggcatcgagcaatga

SEQ ID NO: 340569 - DNA, 420 bp, Pseudomonas aeruginosa
atgcgacgcaatggacgcatcgtcccatggccgtggaccctgaatgtcgccggccagtcgcggcgcttcgccacccgtgccgatgcctgcgccggtttgcagcaggcgatgcgatctacgccacccacgcgcatcgacgcgggcctgggccagatcaacctgggctaccacccgcaccgctacacccatgcctgcgacttgttggacccgtaccgcaatctcgccagcgccgccgagatcctcaaggagcagtacacccccggtgaagactggctgctggccatgggccgctaccaccggcccgcgggcggtgagcctgccgcccgctatcgacgcagcgtatcccgacacctcgcccgcgtgcagggcacgcactcaatcgccacggcgcgagccgtgcgtcaggagtcgaccccatga

SEQ ID NO: 340570 - DNA, 726 bp, Pseudomonas aeruginosa
atgaagccgtcgatcatcctgtacgcgttcctgctgggctccatgcagttgcccgcctgggcgcagcagcccgccacgacccccgcccgcaatgcgcagagccaggagcgcccgctggccgcccgcatcctggacgaccgggtggcaggcgaatggggcctgcaaccgcaggaatgggcgcgctatcgcgacttgatggatgggccgctgggcatctactcgccaaatctggacccgctgtccgccctgggcatcgaggcgcgcaccgacgaagaacggcggcgctacgcagagctgcaggtgcaagtcgaagcgcgccgcgtggagaagctgctcgcgtaccagcgcgcctacgacgaggcctggcagcgcctgaaccccggcatgcagcgggtgaacctgtctgacgagaggccaggcgccgccgctgcgcggggcagcggtcgcacggcagtgttcatcaaggacggctgcgcggcttgcgggcaactcgtccaacgcctgcaatcctcgggtgccgagttcgacctttacatggtcggcagccgccaggacgatgcgcgcatccgcgactgggccaagcgcgcccagatcgacccggcccgggtgcgcagcggcggcatcacgctcaaccacgacggcggccgctggctgtcgctgagcctgcccggcgatttgcctgcggttgtgcgcgaagtgaacggccaatggcaacgccagccgtaa

SEQ ID NO: 340571 - DNA, 645 bp, Pseudomonas aeruginosa
atgaacgcggcacagccgctccggcgcccgaccgccgccgtggtgttgcaaagcctgctctggctttggctgctgggtctcagtgtcttcgcgatcctgggccaccagacgatgaccgatcaggccgaccagcagcagctcgatgtccggttgcagcgcctcgaagcccaggtgaccgggctggccgagaccacgcgggccttgcagcagcagcccgcagccgccaccgccgcaggcctgcaagacgctcggcaggcaatggaggcgcgcatcgttcaagccgaacaggcgctgggtggctatgccaccgccgaggacgttcaggcgctgcgtaccgaagtcgagcagatcaaggtgcgccaagcgactgcgcgtgcagcggcgcctacccagcggcgcaccccgagccaaccggccaccgccaagtccgaaccgccgccgctgccatttcgtgtcgtcggcgctgagctgcgcgcgggtcagcgcagcgtgtccgtcgccccgagtgccggagatttcacgcccgatcagctccaggtgctgctgccgggtgatgcgctgggtccgtggcgcctgcaggcgatcgagggcaatgccgcggtgttccaggccggcgaccagacccgtcgcgtggcgattccttga

SEQ ID NO: 340572 - DNA, 567 bp, Pseudomonas aeruginosa
atgcctgcaatccatgtatcccggtgtctggtcggtaccagcctcctggccgcagccttggccagcggctgcgcgaccacgccaccgccgctggccgccagcaccgtcgaggacgtcccacccgcgcccgaggctgcaccgcccgagttcattcccgtcgtgcgctatggccgctacaccctggtggagctggcgccgatggcggcgcagcgcgatctgctggtgcagaccatcgacgtgtccatgcccgaggaggtccgcgccacggtcggcgacgggctgcggcatgtgctcaaacgcagcggctaccagctttgcgagaccccgcatgcggtgatcgagctgtacgcgctgccgctgccggcggcgcacttgcatctcggccccatgaccttgcgcgatgcactgctcaccctggccggtccggcttgggaactgcacgccgatgaccggacgcggcaggtctgcttcgagcggcctggtcgcgacaccggtgccgagccggtgtccgagccgcctgctgccgaggccgtgcagacgttcccctttgcgggaggccagccatga

SEQ ID NO: 340573 - DNA, 1299 bp, Pseudomonas aeruginosa
atgggcgcgcttgatgtactcgccccattcgtagctgacgatcctggccttgatgccgatcttcgcccagtcggcctggatcatctccgccatcagcttggcgttggggttgtagggacgctgcaccggcatcgcccacagggtgatctcggtgccctcggcgacgccggccttcttcagcagttcccgggccttggccggatcgaacggggcgtccttgatggtttcgtcataggaccactgggtcggcggcatgccgttcaccgccagttgcccggcaccctggtagacggcgtcgatgatggcctgcttgttcaccgccatgtccagcgcctggcgtacttcgagctggtcgaacggcttgtgggtgacgttgtaggcgatgtaaccgaggttgaagcctggctgcgagggcaccttcaggttcgccgcttcctgcagggccttgagatcggcggggcgtgggttgagggtgatctggcactcgccggccttgagcttctgcgcgcgcaccgcggcgtcggtgttgatcgagaagatgaggttgtcgatcttcacgtcttcgggtttccagtagtccttgttgcccttgaagcggatctgcgcatccttctggtagcggctcaggatgaaaggcccggtaccgatcggcttctggttgatctgctgtggcttgccggccttgagcaactgcccggcgtactcggcggactggatcgaggcgacgtccatcgccaggttctggatgaaggcggcgtcgacctcgttgagggtgaacttcaccctgtgctcgtcgagcttctcgaccctggcgatgttcttgtccaggcccatgtcggtgaagtagggaaactcggtggggtaggccttgcggaacggatgattcttgtcgagcatgcgttcgaaggtgaacagcacgtcgtcggcattgaattcgcgggtcggcttgaagtagtcggtgctgtggaacttcacacccttgcgcaggtggaaggtgtaggtcttgccgtcgtcgccgatgtcccagctttccgccagggccgggattgcccgggtgccgccgcgctcgaactggacgaggcggttgaacagggtgaccgaggtcgcgtcgtagtcggtgccggtggtgtactgggcgggatcgaagccggccgggctgccctccgagcagaacaccaggttgctggcggcgtgggagaacggggagccgaggatcagaccggctgccagccaggcccgaaggggaaggatcttacgcatgcaaacctcattttttctttttctaagggcatcgtctga

SEQ ID NO: 340574 - DNA, 651 bp, Pseudomonas aeruginosa
atgagcctggccgtgctgcgtatctccagccaactgccgaaggccttccgcatcatcccggtaggccgcttccatgcacatgacgggcgcgaaggtgggcattggtatctgatgccagagcgtggtcggcagatcgcggcgctggccaaccagaacagccaggggctgctgatcgacttcgagcatgagagcttgaagaaggccgacgcgcccgaggctggccgcgcgacggtgctggagtggcgcgatgatgggctgtatgtcgcggatgcgagctggacggctgaagcgaaagcccagatcgccagcggcaagaaacgctttatctcgcccgtgttccgcttcaatggggcaaccggggaagtgctggcactggagagcattgcgctgacgggtgatccggcgttgctgggcctgactgatctgtctcaggtggccgtggccagtgctcagcggcagagcggtgaggatgcttctggtagcggcatgactgcgcgagatcgggaggtttttgagcatgtgttcggcacgtctcctgaggcactggcagcgctgcatgctgaaaagcctgacacgccaccggaaggcgtcactgctgaagactgggccaatctgcggcacgtgtttggggatgcgctgaataatcggtaa

SEQ ID NO: 340575 - DNA, 666 bp, Pseudomonas aeruginosa
atgttcggcattaacttcaatgcagcggaagaggctgccaaatcactccgtacggctactgctgacttgcgctcgcaacgcagcaagctccaggcactaaaggacagtttgcacgcacagcgcgaggcgctgtatctccaggcgctgagcaaggcggacgccaagctgttcctgttcgactatatcgacgcctgggccgagcaatacctggcgcgcggggtgctggatgatctgtttcagatgatcgccgcaccgaatcgcgacaagacgtttgccgaggccaacaacctgacggtgccttacctctgcctgcgcgatgttgagaccgtgttgtactcgggtgaaatgcccaaagggcagtcgatcttcaaagccttcccactgccgatttttggcgatggaatcgccatgatgaacgctagccacatcggggcggcgtgcttcttcttcggtgacctggtcaaggcgaagttagagcagtacttcgatgcgaagtacccggaaccgaacccggacgtggtcggggcgcctatggctgaacgccgtgcgttgatccaggagctggatcggcagatcggtgagctggacagcggcattaaccagattgatgccaagctgcgacagttgggcgtgcgtgagccgcgtcgcctgctaggtggtgagtga

SEQ ID NO: 340576 - DNA, 318 bp, Pseudomonas aeruginosa
atggctaaaagtaagcgggcggaggtgcgtcgcaacgaatttctggccgatgtggcggatctgacgatgcggattatgaagcgctacggtctcgatgattcccaggcccaggccgccgccgacaacgtggccgacgatctggccgagagctggggtggccagtacatcacggttcccaaggacatcaactatcggagcgctaaacggcgacaggccatcgtcgaagcgttcgatggctccaaccattctgagttggccgctgagttcgggctgtcggtcaactacatctacaagattctgaaaggcgctcaggtctag

SEQ ID NO: 340577 - DNA, 444 bp, Pseudomonas aeruginosa
atgtcctttgccattcagcaggccgcagagttctacatccccatccccgccaaactcaaagaaccgatccggctcttaccctcgggcaacttcgtcagcgttggcggtcgaggtggtcgaaagcaggacttctacctgaacgatgccagcggcaaggcgttggcggatcaggcaaccgcacagccgctaccgttcaaggtcagcttggggatcgataatgagggtgatacgccggcagccggctggttcaagcaactggtttggcgcgcggacggcctctatgtcctcgacctggtgcttgccaagcgtggtgtctctgccgtggtcaacgatgaataccgctacttctctccggtgttctacgccgacaccaatatccctcggcagttgatcggactgctgatcaccaacgacccctcattgcgcagccgcaagtacggctga

SEQ ID NO: 340578 - DNA, 654 bp, Pseudomonas aeruginosa
gtgacagttcttaatccaatcctgcaaatagaacgaacagaattactgctggagatcgaacggggcgtcgctctgctgctgttcgagcgccatggcttggacaaggccaaagccgaagatatcgctcggcactacgtggaagagcttgctttcatgtatgcaggagagaatttcaccatccccatggattacatttatcgacgcgccatgattgcccaggttctgcttaaggagttcgatggcaccaattttgtcaaactatctcgaaaattcagggttcgtgttaataccgtttacgacatcatcaaaaggttcaagaggcgtgcgaatataactccggagcgtactgagtttatgcggacctgcgttgagagtattgctaatctgatggtgcgcaagcacaatttttctcaaccagaggccgaaaagatcggcaatgaggtggccgacttcattgcagatgagtttggcggaatccagttggtgctcccttgggactattcactgaaaaccgcgcacttgcatgttgagcttctacgggagttcgacggcagcaacgttcaggcgctggccgagaaatatcagttgcctgtcgatgaaatccagcgcgctctggatcgatatcgcaaccttccgctgagggcatcggcatga

SEQ ID NO: 340579 - DNA, 654 bp, Pseudomonas aeruginosa
atgactgccaccgttatccgttccgtgaccattctcggcacctgcctggacatcatccgtgcccagggccggctgtgggttgcagcgcgggatcttgcccaagtactccgctacaaatccgagtcaaccataaggcaggcttactaccgtcaccggaaacatgaagcgttagaaggtcatgtaatcaaggctatcgtaggcggctatgcaggcagtccttgccgtctttttgacgaagtagccgtcatgtttttttgccagcggcgcgaccgtcaatgcgcaattgagctgatgcgctggatcgaagctgggggcatgaggctcgaccagcaaccgcccttgcctggtgtgcaggagatcatcccggaagagatcgagttggccgacgcaccagagccgccgcccacggctacatcgtatttggtgccctctgttgtcgatgtgctgcaacagcgcctggccaaggacaaggcgtattgccgtgacttggtgaaaacgatggtgcgctactgcggcccggacgaagtggatgatctgacggccatgatcgaggcgcgaatctcatcgtatctggaagcccacaactgccccggcctgaatgccgcccgctacgacctttatcggaagtactggctgcaagggggtgaaaaatga

SEQ ID NO: 340580 - DNA, 1128 bp, Pseudomonas aeruginosa
atgagtggtggtcaaacccaaaacgcagcattaacaacagctctggcatttcactaccaagtactgattggcctagaaaaatgcttctcactgcaagaagatcaagctgtttggttcgaaaaagatggcgatgtaagtctgctgagcaatgaacctgagcggtcttcgcaaaccgaagtaaaggactatgccgcccctctaactgaccaccacgagaatctgtggaagacacttaaaaattggcttgccccaaactttgatcaaaaatcctacggagcattggttctacacaccactcaagcttttggcgcaacaacaagattaggaaactggaacactcaaacagccgagcagcgcctgcaagtacttaaagatatttatagcgagcgcaccgcagagcagctaagcgcagaaaaaccgcctgagataatcaagcttcaaataatagtaatgaacacaaaccaagaactattaattgaggttatcgccaaggtgacgttatttactgaagctgataacgcggacactcttcacaagaaccttctagccaagccagttggcataccaaagagcaatcttaaaagctatctacaaggactcgttggctttgtttatagtcaagcaaatcaaaaatcctggcatatccaacacgaagaatttcgcgcaaaatgcgaagaattaacagcaatattctgcaaacgagaatttacctttcctccctttactgggagcgaggcctccaaactcgaagtcgaaattcatcaagacaagcttttcgtccagaaaatcactgacattgagcatttttctgtaattcctgatgcagtgggcaactggatggagttgcagaactcactcctcgaacaactcgacgaataccctctttacgcagagaaaacaaaagcatatcaaagacgaattgtaaaactattcaagctagcttactcaagcgcgcaactcgaattaaccgatcaagttaaaaactcaaagttactttacaataaagtaatttccgagcagccactctccctaggcaatgataccccaccacttgagtacaagaacggcttaatccacgacgcaatggatgacgaagagcaagatttgaaatggattattgagccatga

SEQ ID NO: 340581 - DNA, 2028 bp, Pseudomonas aeruginosa
ttgaaaacaataatccacgaaattggcgttattgaccatgccagtaaaaagcactcggtaaattttaaaaagggacttaacgtagtcactgggaaatcatccacaggcaaaagtgcactaatcgaaatatttgactactgctttggcagcagcgaaaacacaataccaaagggagtcattaccgataacgcagaaatttactacgtagctcttgaagtcaacaatcaaaccatgattattgcgagaaggcccgacgcacacaacaaagctttcttccgaagagaagaagcattcaagccagaatccatcaaattaaattattttgaaagcagttacttcaggccattagaagattttaaaaaacatctacgaggtttcttcgtagatattgatgatgttgacgaatctttagcggcaagagcaaatcgcaaatacaatcgaaagtccgcaacaccgaccattcgaagcttcacatcatttatgcttcagcatcaaaaccttgttgccaataagcatgcactcttctatcgctttgatgaaaaagaaaagcgcgatcaggtaattgatcacaccaagatattcttaggcttggttgaccaaaatttcttcttgctctcccaagagcatgagcgtctgactggcgaattaaatcgtctaaaacggcaacaggacgcgaacaaacgcgctagcgagctttacaagcaaaatgttggccccgtacttaatcaattgtacgcaatgatgggctttaagagcgaaccactgactgtgcaacaggttctacgcgccccacaggacagcaaagaaagattagacaaaataatcatccccgaaagaatcgaccacatatcagatgcagtgacaaagcattacaaccagctcaagcagcaactcaccctaaaaacagcagaacttagaaagcttcaaagacaagcatcctccatcacaaaacacatcgacgaggaaagtcgactcgttgaaaactatcgccaacttggatcgcctaacctagtacacatatcagcaacagtttgccctttctgccataccgaaagtgatggattaaaagatagcgctgaaaaactacaagaggcaatattaaaacttactagcaacctgacacaagctcgccctatgaaggcaaagtttgagtcttcccttgtttcggtaaagcgggaaatcgaatcactcagtaacgaaatcaataaactaaatgaagagattggagagatagagaaaaccgaaaagcaactagcccaacaaaaaagtctatatgaaaacatattaatcataaaggcccgacttttcgctattttggacacactaaatctagcggatgacattgaactagacaagagcatcacttccaccaatgagcaactgataaaaatcaatagcgaactaagaggatatgacgcacgaacaggtttagaaaaagcgtcacataaggtcaatgaatacatgaccaaaatcggcagccattttgagttcgaagcaagctacaaacctattaaccttcatttctccttcgaaacctttgatctttatcatctaacacccaccggggaaagaatttatttgagatcaatgggaagcggtgcaaattggctttacagtcatgtaacgttattcttggcattgcataagtatttcgctgaactaggcgataaatgctcaatccccacggtgctttttttagaccagccgactcaggtttattttcctaatttcaaacgtgataactcagaatcatttgaggatcaaaagaataaagaggctgcacagcgctcgaaaaatgagcgcgtagtggatgaggatatcaaggcagtagaaaatttattcagtcaattatctatttactgcaactccattgaggcatctaacggatttagtccgcaaatcatcgttaccgaccatgcggatgatctgaccttgtcaaatggagtttcatttgagtctctggtaaacggtaatagatggcgtaaacgtggtttgattgaaccagtgcctacgtctgatagaaactga

SEQ ID NO: 340582 - DNA, 570 bp, Pseudomonas aeruginosa
atggcccaggaactttgcgctatctgccacgaacgtcccgccgtcgcccgcgtcagcctggtacagaacggccagcgccgcgaactcgccctctgcgaactgcactaccgccagttgatgcgccagcagcgcatgcgctcgccgctggagtcgctgttcggcggcggcagcccgttcgacgagatcttctccggcttcggcgagcagagcccggtcaccccggtgcgcgcccgcgagccggaggcggtggacatcgccgagtacttcagcaagcagaccaccgagtacctgcaacgcgccgcgcaggtcgccgccgaattcggcaagcgcgaagtggacaccgagcacctgctctacgccctggccgacgccgacgtggtgcaggcggtgctcaagcagttcggcctgtcgccggccgacctcaagcagtacatcgaggccaacgccgtgcgcggcgccagcaagggcgaggcgagcgaggacatgaccatctcgccacgggtgaagagcgccttgcagcatgccttcgccctgtcccgcgaactcggccacagctatgtcggcccctag

SEQ ID NO: 340583 - DNA, 1020 bp, Pseudomonas aeruginosa
atgtcgatctggtggattttatttcctgtggttttggtatcggcaggacttacaggagtattgaggttttacgccatctcaaaaaaagtcatggatattcctaacgcccgcagttctcacaccgtgcctactccgagaggcggtggggtggctatcgttctgacttttctcctagtggttttttttcttcccctattttccattctggagtggcgccaggcgttactttttctgctgggaggaggcggcgtcgctctgcttggtttccttgacgaccatggtcacgtggctgcacgttggcgcctgcttgggcacttcatggctgcactggtttcactcttccttctgactggtgtgccgccgttcaagctactgggttatcaatgggatttgggctgggttggggtcgtgctttttgctttctatctcgtctggttgctcaatctttataatttcatggatggtatagacggcctcgcaagtctggaagctatctttgtctgcgtgggaggagcgctggtgtattggatgaatgacaaggcagcgttttctttaccccccctgttgctggcttttgctgttctcggtttcttgttttggaactttcctcccgcgaagatcttcatgggtgatgctggtagtgggttcctgggattgactctgggagtgctatcgattcaggccatgtgggttgagccagagttcttctgggcatggctgattctgctgggggtcttcatcgtggatgcgacctatacgctggcacgacgcttgttgcgcggcgacaaggtgtatgaggcccatcggagccatgcctatcagtatgcctccaggcatttcggcaagcatgctcctgttacactcggcgtaaccgtactgaatttggtttggcttctacccctggcgctatgggtggcaagtggccatctcgagcctgttctgggcatcgccatagcttatacacccctcgttttcctggctgtgaagttcaaggctggtaagctagagtcggttggatag

SEQ ID NO: 340584 - DNA, 267 bp, Pseudomonas aeruginosa; identical to SEQ ID NO: 82585

SEQ ID NO: 340585 - DNA, 699 bp, Pseudomonas aeruginosa; identical to SEQ ID NO: 82584

SEQ ID NO: 340586 - DNA, 1197 bp, Pseudomonas aeruginosa; identical to SEQ ID NO: 82583

SEQ ID NO: 340587 - DNA, 393 bp, Pseudomonas aeruginosa; identical to SEQ ID NO: 82582

SEQ ID NO: 340588 - DNA, 1506 bp, Pseudomonas aeruginosa; identical to SEQ ID NO: 82581

SEQ ID NO: 340589 - DNA, 3177 bp, Pseudomonas aeruginosa; identical to SEQ ID NO: 82580

SEQ ID NO: 340590 - DNA, 1239 bp, Pseudomonas aeruginosa; identical to SEQ ID NO: 241731

SEQ ID NO: 340591 - DNA, 378 bp, Pseudomonas aeruginosa; identical to SEQ ID NO: 82578

SEQ ID NO: 340592 - DNA, 1098 bp, Pseudomonas aeruginosa; identical to SEQ ID NO: 82577

SEQ ID NO: 340593 - DNA, 258 bp, Pseudomonas aeruginosa; identical to SEQ ID NO: 82576

SEQ ID NO: 340594 - DNA, 1311 bp, Pseudomonas aeruginosa; identical to SEQ ID NO: 82575

SEQ ID NO: 340595 - DNA, 357 bp, Pseudomonas aeruginosa; identical to SEQ ID NO: 82574

SEQ ID NO: 340596 - DNA, 2496 bp, Pseudomonas aeruginosa; identical to SEQ ID NO: 82573

SEQ ID NO: 340597 - DNA, 480 bp, Pseudomonas aeruginosa; identical to SEQ ID NO: 82572

SEQ ID NO: 340598 - DNA, 339 bp, Pseudomonas aeruginosa; identical to SEQ ID NO: 82571

SEQ ID NO: 340599 - DNA, 759 bp, Pseudomonas aeruginosa; identical to SEQ ID NO: 82570

SEQ ID NO: 340600 - DNA, 195 bp, Pseudomonas aeruginosa; identical to SEQ ID NO: 82569

SEQ ID NO: 340601 - DNA, 375 bp, Pseudomonas aeruginosa; identical to SEQ ID NO: 82568

SEQ ID NO: 340602 - DNA, 945 bp, Pseudomonas aeruginosa
atggaacttcgtcacttgcgctgcttcattgcggttgctgaggaactccatttcgcccgcgctgccgagcggctgcacatcgagcagtctccactgtcacgggccatcaaggaactggaagaagaactgggcgtgatgctgtttgcccgcaccacgcgcagcactcggctgatccgtgcgggcgagctgtttctggagcacgtgcgccgcgtgctctccgccttggagcaggcacgcgatagcgtgaaagcggcagcaaacggttttcatggccagttgcgcgtggcattgtccgacggcatcacgccgtcgcgcctttctgcgttgctcgtactttgccgccaggaagaacccgaggtcgaaatccggttcttcgaggtgcccctatcgcaacagatcaaggggctgcatagcgatctgtatgacgtagggtttgctcaatccgacgaagtgggcgacggtatcgtcgccacgcccgcatggagcgatgcgctgatggtggccgtgccagctcggcatccgcttctggcccacaagcgcatccccttggatgagttgcttcgctatccactggttctgtgcgatccacaggcatgtgagggccatgccaagcaagttgaacgggtgttgcgccgtgcggatgtggagccactgattgcagagagggtttcgtccaccgacctgatgatggccctagtctcggccggttttgcgctcggcctagcaggcagtgcacacattgccgccagccgtgagccgggtgtagtggcccggccgctagcttcgcgcgtgtcgcccctcacgacctatctgttgcggctggacggagatccgtccgacgagttggcgcggtttattgagcgcgcacaggccatcgaacagccggaaacccccaggcccatacgaggccgtaatcccgatcacccggaggaactgacgccatga

SEQ ID NO: 340603 - DNA, 279 bp, Pseudomonas aeruginosa; identical to SEQ ID NO: 82566

SEQ ID NO: 340604 - DNA, 1131 bp, Pseudomonas aeruginosa
atgactcgccatgcgctggacgcagcgcactacaccgagccgcagacgctcgcgctggagcgcgaaaggctgttcggcaggctctggatcttcgtcggcttcagttcgatggtgcgcgagcgcaaccagttcttcacccgcaagatcgccggcgtgccggtcgtggtgcagcgtaccgagtccggcatccgggcctttctcaaccagtgtccgcatcgtctgtcggccatccagaccgaatgcaccggccagcgaccgctggtctgcccgtaccatgcctggtcgttcggcgccgaggggcagctacagggcattccgaactccagtctgtaccagttcagcgccgaggagcgggcgcggatcggcttgcgcaagctgcacctggaagaggtggggcaactgctgttcgtcaacctggcggacgacccgctgccgctgcgcgagcagttcgacgatggattcctggaaactttgcgggaggtctcctcgcacctggatacgcggctgatctacagctgccacaaggtgcgctacaactggaagctgaacatggagaacgtgaaggactacaaccatgttcctttcgtccatccgaagaccttcctcccggtgatgaccgccccggtgcgcggtctggcacgcgaggctgcggtgccatccgaggtgctgcgcctgctgcaggaaggcgaaacgccggagctgcgttcgctgagcttccccaccaaggcgccgatccagccctacaagagctggttctccgacctctgtgagggctacggcgacgagcacgcctactacaactggttcatctacccgaacgtgaacttctgcagcgtccgtggcgagcacttcctgctccagcagtacgatccggtggcacccggcgagaccgactaccacctgtggatgatgactgctcggcgcaaggatccgaagaccgatttcagcgctttgctgagcaccctgattcgcggcgagcgtaacgtgatcggcgaggacaccctggtcctggaacgcctccaggaggggctgggcgcacattcgccgccgttcatgcacggcgactacgaggtgcaactggtgcgccagcacctgtggtatcgcgcgcaggtactgggggagagggcatga

SEQ ID NO: 340605 - DNA, 768 bp, Pseudomonas aeruginosa
gtgaacgacgagacttccttcaatcccttcagcctgtcgggcaggcgcatcctggtcaccggcgccagttccggcctgggcctggccatcgcgcagagctgcgcgcggatgggcgccgagctgatcgttaccggacgtgaccagacccgcctggatggatgcctgacaaccttgcagtcgatctcggagctgccgcaccgtgctgtccaggccgatcttcgggtagccgaggagcgcgctgcggtggtagcggctgtcgacagcgaaatccatggactggtgcatagcgccggtatttcccgtctgtgtccagtgcggatgatgaccgaagcgcacttgcatgaagtccagtcgatcaatgtcgactcgccgatgctgcttacccaggcgttgctcaaacgcaacctggtagcgcccggcggttcgatcctgttcatcgcttccatcgccgcccacatcggggttgccggagtgggggcatactcgggaaccaaggccgctctgatcgccatgtcccgctgcctggccatggaagtggtgaagcgcaacatccgggttaactgcctgtctccatcactggtggaaacaccgcttctggatgcagccacccagacggtcggttcgatggacggtcaacgcagcaaccacccgatgggcttcggcaagcccgaggatatcgccaacgccgctatcttcatgctttccgatgccagccgctgggtgaccggcacgaccctggtgatggacggcggcctgaccatcagttga

SEQ ID NO: 340606 - DNA, 813 bp, Pseudomonas aeruginosa
atgaatctcgacccgtcgcggatcgaggcggcgatcaccccgcagaccaccgcgatcctgccggtgcattgctacggcaacccctgcgatgtcgaggcgatccagcggatcgccgatatccaccacctgaaggtcatctacgatgccgcgcatgccttcgccgtgcgcgacgccggcggcagcgtactgcgccacggcgacctgagcatcctcagcttccatgccaccaaggtgttcaacaccttcgagggcggtgcgatcatctgctcggacgaaaacacccggcaacgcctcaaccaccttaagaatttcggcttcgtcgacgaggtcacggtggtcatgcccggcatcaacggcaagctcaacgaagtcggcgctgccttcgggctgctgcaactcaagcacgtcgaccaggccctggagcagcgcagggagatcgccgagcgctatcggcgcctgctggccggcgtccctggcatccagtgcctccggcctggtacccagaccttcgccaacaacgcctatttcccgatcctggtggaagacgattttccgctttcgcgcgacgagctgtaccagcgcctgcgcgacagggatgtgctggtgcggcgctacttctacccactcatcagcgacttccccatgtaccattcgctgccctcggcggcgcccgccaatcttccggtggcgcggtcgatttcctcgcgggtgctgtgcctgccgatctatcccgggctggccgccgcagacgtcgagttcgtcgccggcctgatcgcttccgccgccatgccgcggcggcgggcatcaagttga

SEQ ID NO: 340607 - DNA, 939 bp, Pseudomonas aeruginosa
atgaccagcctcaacctccgccgcctggcagcggcggccgctaccttcagcctctcgttcacggcctcggccgcgatcaacagcgctgccatcgtctcctccaccctttcccctcagtgcctcgaatacaaggtcgtcgggatctgttactggctgctctgcggcccgcatggctgcaaagtgaagacgtcggtcaaggtccgccactacgtgcctgacgcagtcgtctccagctacgcgaataccgggagcaacccctggaccgaggtgtcggcgctgggcacaccgaatccactcgcccaggccggcaatgacgcaacgaccaactacaaggccgagaacagcatcggccgcttcaaggaagcggatgtgatcggccatcctggcggggccacgttcagccggttcgccagcgcctctgggtacgtttgtcctggcgccaccttcccgctggtgccctatttcctcagcacactggacgccattggctggcggcatggaattcccgagcaggtgtaccccgaagcgttggttccagggctgcgcgaggtgggtggaatcttctccggcgacatgtgggggaacctctatccgcgcagcggattcctgcaccagaccgacgactacaagacggcggccgtcatcgcccagcgcgccggcgatatcaccacgcgaatcggccagctccacgtctacctccccatgcgcgcagcccccaaggacggctactggccggcgggcgagctgaaagagggcgatgcctcgaccgggaaatggcaggagctgaccccatccctgagcctcaactgcgcggtgtttcccaactcagggccgaagacgcaagccgtcgacggcgattacgcctgggcgctctggcgtccctactcctgctgccagcgcaaggggcagatcttcctcggcagtaccgacttccaataa

SEQ ID NO: 340608 - DNA, 840 bp, Pseudomonas aeruginosa
atgcgaatgaacatcacctcggtcgcgctgacgtggctgctcgcagcgcaacttgcccaggccgacgacccgatcaacgtgtccaagaccggcacggtgctcagcgacgaggtcctctacagcattggcggcggcagtgcggtgagcatgggcagcgccggccagatggactcgatcggcgtcggcttcggctggaacaacgacatgatgtgcggaaacatgaaccttagcaccaccctggagaaccagctcaacggtgccacacagggtttccagaacatcatgggctcagtcatccagaacgcgaccggcgcggtcatgtcgctgccggcgttgatcatccagcgcgcgaaccctcagctctacaacctgatcaccaatggcatcctgcaggcgcggatcgactacgaccgctcgaaagggacttgcagagcgatcgccgagaagatggctgacatcgctggcgagcagaccggctgggggaaaatcgccgaaggccaggccctgggcgccacactggcctctggcgggaaagacgccgtatccgccctcgaagcagtggagaagaagggcggcaacgatggcgtaacctgggtcggtggagacaaggccggcggctccggccagaagcccattcgcatcgtcaacgacgtgacccgggcgggctacaacctgttgaccagccgctcagtgaatgactcgtcgagcgtgccttccgccacttgcaacaacggcctggtctgcaacacttggtcctcccccaggaggccgccgcattcgccacccggatactgggggagcaacagcaacagacctgcgaaggctgccagaagacggtga

SEQ ID NO: 340609 - DNA, 456 bp, Pseudomonas aeruginosa
atgctcgcaaaactcgaacgactcatcggcgaaatcggcgacctcaacagcaagttgatcctgctggtcggtcccagccgcagtggcaagacccaactgctgcgccaactcagcgtcaagctcagcatcgagccgctcaacgtcggcatggagttggggcgccgtttggctgccacgccgaacaacaagcgcggcttctcggcaggcgaactgctgcgggagatcgcggacaaggaacgaactgaagatccgctgctgctcgacaacctcgagttgctgttcgagccgggcctgcagatcaatccgcttgacctcgtcaggcggctggctcactccaagcgcgtcgtggccgtctggcctggcgagctgcgcggtgatcgcttggtgtacgccgacatgagccatccagaacatcgtgactacagccgcgacggcgtggtcgtactcgaaatttga

SEQ ID NO: 340610 - DNA, 3753 bp, Pseudomonas aeruginosa
atggccaagaacatgaaatacggagatctgatccagttcgagcagatcgagtcagtcattcagctgctcgatgccgggcgcccggacgaggccaagaagctcgtcgcgacctacgtcatctccgacgacatggccgagcggatctccaagctcatggttccccagctcagtttcgacgactcggtcgatcacaagggcgtgctgatcgtcggcaactacggcaccggtaagtcgcacttgatgtcggtgctgtcgctggtggccgaggatgcggcctacgctccgatgatccgccaccccaaggtcgccgaggcggttgccccgattgctggtcgcttcaaggtgctgcgcatcgaggtgggcgggctgcagatgccgctgcgccagatcatcaccctgcagctagagcgcttcctggaaaagatcggcgtcgactacaccttcccgaccgccgacaaagagctcaacaacaaggactccttcgaggagatgatggccgcgttcgcggagaaattcccggaccagggtgtgctgctggttgtcgacgagttcctggaatacctgcagtcccgtcgcgatcacgaactggtgcaggacctagccatcctgcggcagatcggcgaagtcaccaagcacctgaagttccgcttcgtggccggtgtgcaggaagccatctttgacagcgtgcgcttccagcatgtggccgacagcatgcgccgagtcaacgagcgcttcacccagatcctgatcgaccgccaggacgtcagcttcgtcgtctccgcgcgcctgctcaagaaaacggccgaccagcagaacaagatccgcgaatacctcacgccgttcgccaagttctatggctccatgaacgagcgcatggacgaatatgtgcggttgttcccggttcacccggactacctgaagaccttcgagcagatccacttcaccgaaaagcgcggcgcgctcaagaccatcgaggccgccatgctggccatcctcgatcaggacgtgcccaccgatcggccgctgttcatcagctacgagagcttctggaacaccatcaaggccaactcggtcttgcgcgctgaccccaatatcaaggaagtcatgcgcgtctccgaagtgctggagtcccgtgtgcagcaggctttcacgcgcccggcctacaaagccatggcgctgcgcgtcatcaacgcgctggccgtccaccgcttgaccaccggcggcgacatccacgtgcccatcggcccaacggctgccgagctacgcgacgccctgtgcctgttccagccgggcgtggaggacatgccaggcgaccctgccgaaaacctgctgtcgatggtgcagaccgtgatgcgggaagtgctgaagaccgtcaacggccagttcatctccaaggcaccggacaccgagcagtactacctcgacctcaagaaagacatcgactacgacgcgcagatcgaaaagcgcgccgaagccctgtccgacgacgcactggaccgtgcctactacagcgccgtcaaagcgctgatggagtgcagcgacgacttgcgttatcccggtttccagatctggcagtatcagctcgaatggcaggaacgccgcgtcgaacgcatgggctacctgttcttcggtgcgccgaatgacagacccacggcacagcccgagcgtgacttctacatctacttcattcagccgttcaacaaaccgaagttcaccgacaataacctggcggacgaagtgttcttccggcttacgggattggatgacgagatcatgcgtcatatttcttcctatgccgcagcgttggatttggcctcgacggcaagtggcggggccaaggcaatctacgaatcgaaggcccgagacacactgaaggccatgaataagtggttccaggaaaagtacagctccgccttcgaggtcacctaccaaggcaagaaaaagaacctgcaggagtgggccaaaggcgtgtcgctgcgtgaccgggcgcggctgggtgcggacgaacgcatcaacttccgcgacgtggtgaacgtcatttcgggcctggtgctgggccagcgcttcgtcgatctctcgccggaatacccaacgttctcggtgctggtcaccgaggccaaccgcaagcaactgatcggcaatgcgctgcgcgcactggccggcggtactcgcaccaaggatgcgctcgccgtgctcgatgcgctggagttgctcgatggcgaccgcgtcgatccggccaactcacgctatgcgcaggaagtgctgaaccgactcaaggccaagggccacggccaggtgctcaaccgcagcgaactgctgtcgggcacgtctgacgtcgagtatttcgcgccgatcaagtaccggctggagcccgatctgctggtcaccgtgcttggcgggctggtctactccggcgacatcgtgctgtcgatcaccggcgacaagatcgactccggcaaactggcgcaactggcagagcgctcgctggaggagctcaagcagttcaaacacgttgaggcgcccaaggagatcaacctcgcggtgctgcgtgccttgttcgagttgttcgacctgccgtccggtctggcccagaaagtcagccagggcgacaccgagccggtcatcaaactgcaggagaaagtcagcggcctggtgccgcgtgtgctcaaggccggctccgacctgcagcaaggcaagctcggtttctggggccagaacctactgcgcgaagaagaagccaaagactggcacgcccggctggattcgctgaagaagttcaccgagtcgctggcgccgtacaacaccgtcggcaaactcaaaaacctgcgcgtcacacaggaagacctggacggccagaagaagaatctggagatcctggccgccgtcgagcgtctgctcgaactggtggtggagttgggcagcacggcgtcctacctctcgcaggccgagatggtgctgccggccgagcacccgtgggtgaagcaggccgagaccgcccgcaaggacatcttcgagaagatcagccaggaccgcaccgccgagcacgccgccctgattttgggtaatggccggcaaacgctcaaccagctcaagaaggactacatcaccgcctacatcgccagccacagcaaggcgcgcctcggcgtggccgaggacaagacccgcaacgctctgcgcaaggacgaccgcctgcaggcgctgcgcgtgctggccggcgtatcgctgatgcccaccagccagctcactgccttcgaggagtcgctcaacggcctcaagagctgttcctccctggatgagccgaccctggtcacggccgccgtctgcccgcactgccagttccgcccatctgccgagcagttggagctgatcccagcggccaaccgccttcacaagctggacgacgacctggatcagttggtggccaactggcagcaaaccctactggagaacctggaagacccgttcacgcaggacagcctaggcctgttgccgcccgcatccaagaagctgattgacgccttcctggcctctcgcaagctgccggacccgatgaccaccgagttcgccaacgccgtgcaggaggcgctatcagggctggagaagatcgcggtcaagggcgacgagatcaagcaggcactgctgcaaggcggctcgccggccacaccggacgacctgcgcaagcgcttcgacaccttcatgaacgagcgctgcaagggcaaggatgccaccaagctgcgcttcgtgatcgagtga

SEQ ID NO: 340611 - DNA, 2817 bp, Pseudomonas aeruginosa
atgagtgatcttttccagaaccacgcggccacgtccggcccggttgaatgtctcgggcaaacgttcccgagcgatgaggcgcgccgcgagcactacctgaaattacttgccgagaaacttaaagatccggcattcaaaagaacagaaggattccctgttgggtcagacgagcaaattctttcgctctcgaatccgccttactacacagcatgtcccaatccatttatatcgagctttgtctcgcatctaggtaaaccctacgtatctggagaaggcttcgtgcacgagccatttgctgcagatgtcagcgaagggaagatggatccaatctataacgcgcacagctatcacaccaaagtgccccacaaagccatcatgcgctacatcctgcactacacgcagcctggggacattgtctatgacccattttgcgggactgggatgaccggtgttgcagcgcagctgtgtggcgataagaaggtaatcgagtcccttgggtacatggtggataaagacggtgtcgtgtattcaaaagaacaagaagacgctggcggaaaatggatgccgttttccaggcttggcgctcgccacgctatcttgaacgatctatccccggttgcttctttcattgcagccaactacaactctcctgtcgatgtgcactccttcaaggacgaggcattgtcaatccttcgcgaggtggagagcgagttcggctggatgtatcaaacactgcatttgccaaccgaagagagcgttgttaatgcgattaagttaattcggtcagagcggaaagcgttagcagagctttcagagaaggtgggacgcatcaactacaccgtatggtctgatgtgtttacctgtccggattgtgccggcgaagttgtcttctgggaggccgctgttaataaaagtagcggaaaggtgagtgatgcatttggttgccctcactgcggggcagaactaacaaagcgaaagatggataagctgttggtactgactcatgatgatgcactcggggagaacattaggcaggtaaaacagataccggttcttatcaactactcggttggtaaaagtcgattcgaaaagaaacctgatgcttttgacctcgaactgattgcgcagatagacgcaatgacgattccatattggtttcccaaagatcgcatgatcgaagggcgagagacgcggagaaatgatccaattggactgacccatgtgcaccacttctattcgagacgcaatcttgcctacctggccgcactcaaagccagatgcaagtcgccgcaaacaaagctttggtttaacgcgcagttaatcaacgtaagcaagctaaatcgatacaggccggaggtgtcttttccatataacccgctcagcggaacgttctatatcggctcgcagatttcggaggcggatgtctatgtggcatacgagaacaagctcaataggcttgttgcggctttctcgcagattaagcacttcaatatcgttggaacaagctcagcaaccaatgagactccagtgcttgctgactatatcttcacagatcctccttttggcgcaaatattgattattcagagttgagctttctatgggaggcctggctcgggattagaacggataaccgccatgaggccatagccagcaaggcgcaaaaaaaaggccttgatgattaccggcgactgatggcggattcatttaagcgggcctatgaggcattaaagccgggtcgatggatgaccgtggagttttcaaacactcaggcttcggtatggaacgcgatacagacggcacttcaagaagccggctttgtggtggccaacgtgtcggcgcttgacaagcagcagggaagttttaaggcagttacaacgactactgccgttaaacaagatttggtgatttctgcgtataagccaaatggcggattagaagatcgggcgactcggagcggaggcactgaagaatcagtttgggatttcgtgcgaacccatttggggtacttgccagtcgtcaagcacgcaaatggagtgctcgaatttgtaggggagcgtgatccgcgaattttgtttgacagaatgattgcctggtttgtccgacacaatatgccggttcccatgtcatcacaagaatttcagtctggcttaggtgcgcacttcgaaattagggatggaatggtctttctttcgagtcaggcgatggaatacgacaaaaagcgtctccagtttgcaaatgcaccacagatggagctttttgttgctgacgagcgtagtgcgattgattggctaagtgactatctgaaagcgagaccctcaacgtaccaagatattcatggtgactttattagccagctgggtgctgggtggaaaaagcacgaagaaaagccggagctgctatcacttcttgaggagaacttcctcaaatacacagggcatggagaggttcccagtcaaattcatagctatctatcttcaaacttcaaggaccttcgtggactcgcaaagtctgattcaaggcttgtagagagagccttggatagatggtttgtgcctgacccaacaaaagctctggatttggagaagaaacgagagaaggcgctgctcaaagattttgcacagtatcgagattttgcagggcgtcgcctaaaagaattcaggctcgaagttatgcgcgccggatttaaggatgcttgggcaaggaaagactacggaactatcgtctcggttgcccaaaaactcccagaagatgctttgcaggaggacgaaaagctattgctttggtacgaccaagctctaactaggttagggatgtag

SEQ ID NO: 340612 - DNA, 720 bp, Pseudomonas aeruginosa
atggcacaagcgacaccaagctatggatttgcgacaggaaagccggaaaaaccaattgtggatgctcttgttaacaagtatgggcaccagtcagtcgtatggccaattgcactgtccgacaaaacctcaacgttggcttatatctttgagagaaacagcaataacctgattaactcgcaaggtgacactcgcccaaaaagcaattcaggagtaggcgaattttacctcgattacacagcccagccaaggctggtaattccaaatgatccgttcttttctcaatttatccagccacagtttaacaacagttatgagtacatattgtctccgatcaatggaggctacagtaccgtagatcttgattatgtttggcacaacggaaaaatatttcgtggcttcgaactgacgacgtattgggtggatttctcgtccgaagcagaagcaaaaaggctcgtctcaacaatgaatagacggccatcttggagcggaccgaatggtgctcatgcccttcaaaaagttgcggcagccgcgcaagacttaaatattgaataccacatggtatttgcaaacaccgttggcaaagtcggcagtgctctaaagacaaatggaaatgtgctttattttcctctgacagcggctgcagttaatttgctttcaaaggggcaggttcctccgaatgcaatcttctgctcgttccagactttcataaaccagatttaa

SEQ ID NO: 340613 - DNA, 2832 bp, Pseudomonas aeruginosa
gtgaagtttctgtcaggattttccataggtgactggtgctggttctcccggcaggctactgcgtgccgcgtagtcgagcgccaagatgtctggggcgagattgcctaccgcgtctggctgcccgccaaggacgcggtcgtgcgcgcgcggtcggtggatctggcctcgctggagagtgtgcgcccgagcgtggagcagatcctgcacaccacggcggcggccaagatgctggatgcgctggaggacaacctgctgttggcgcccatccagtccagcgtggttccgctgccgcaccagctttacgcactgaatcgcgccatcagtcgcgaccgtatccgctacctgctggccgatgaggtaggtctcggcaagaccatcgaggccggcttggtgctgcgcgaattgaaattgcgtggccgggtgaagcgcatcctggtggtggcgcccaagggactggtacgccagtggcaggccgaaatgcgcctgcacttcggcgagaagttccagttcatcgagccgtccgagctggcggccttccggcagtggcgcagcggcggcgcgggcgaggaagagaacctgtggcgcatgcacgaccaggtgatctgctcgctggattcggtaaagccactggaaggccgtcgtggctggagcctggagcaactcaacacctacaaccgcgagcgcttcgaggacctgatctcggcgtcgtgggatctggtcatcatcgacgaagcccaccgcatgggcggtagcaccgagcaggtggcacgctacaagctgggcgccgcgctggctgaagccacgccctatctcttgctgctgtcggccactccgcatcagggcaagaccgaccagttcatgcgcttgatgcagttgctagacagggaagcattcccggacgagagcagcgtcagccgcgaccgggtgcggcccttcgtgatccgcaccgagaagcgcgcatcgatcaacgccgaaggccagccactgttcaagccgcgtgtcacccggctgcaagcagtggcctggcaggcccgacacgggtcgcagcagcgcctgtacgaggcggtgaccgactatgtgcgccacggctacaaccaggccatggcagccaagcagcgccacatcggcttcttgatgatcctgatgcagcggctggtgacctccagcacggcagccatccgcaccacgctggagaagcgccaagccctgctcgatgcgccacagccgcaggccaacctgttcgagaacaccagcgccgacgaatgggcagacctggacggccagtcccaggtggatctggcgatgcagtccagcggctgggagctggagaagtccgaagtcgagatgctgctggagctggcgcgggaaactgaggccgctggcactgatgccaaggccgaggcgctgctggagctgatctacaagctgcagcaggaggaaggcgacccggcgctgaaggtgctgatcttcaccgagttcgtgcccacgcaagcgatgctggccgatttcctggagagccgtggattttcggtgacgacgctcaacggcagcatggatctggagacccgcacccgtgcgcagcaggcgttctccaaggatgtgcgcgtgctgatatccaccgatgccggtggtgaaggtttgaacctgcagttctgccacgtcatcgtcaacttcgacatgccgtggaacccgatgcggatcgagcagcgcattggccgggtggaccgtatcggacagaagcacgtggttcgcgccatcaacttcgtgctcgaagacaccgtggagcatcgggtgcgccaggtgttggaggcgaagctcgaggtcatcgcgcaggagtttggcgtcgacaaggcggctgacgtgatggattcggtcgaggccgacccgctcttcgacgagctgttcgtgcatggtctgcagaacccggatgccatcgaacaggagtgtgacgcggtggtgtcgcagctgcgaaccaccttggcggagtcgaagaagaacagcgatctgctcaccacggagcacgatctggacgccgacgacgcccgcaagtggcgcgaccacccggcgcagttctggctggagcgcgccatcaccagcgggttggctgcgcgcggcggctcggcaacgaagattggcaaggcgtggcgggtgaagtgggcagacggcagcgagtcggcgcaggcttgttttgacgcccgcacggcggatgagaacccggagttggaatgggtcacgatggaagacccacgcgcccgggcggtgatcagcgagctgccgcgctttgtcgctggccaaccactaccggtgatccgcgtgaccggtcttccggactcggtacgcggcatctggtcgctatgggagatcagtctggcggctgaaggtctgagccggaagcgcttccttccagtgttcatcaacgaggaaggccgtcccttcgtgccgaccgccaagcgcgtctgggatctgctgctcactgaaaccgtagacgtgcatgcggtgacgggtgccgaggagtcggcgaagtggttcgaggcatcgcatgcggctgccagtacccagggtgaacggatcttcacggagctgctgactgaacaccgcgcccggctgaaggaagagcgcgaacgtgcggtgtatgcgttcgaggcccgaggccaggccattggacgaatcggcctgcccgccgtgcgtgagcatcggcgcaagcgactgcagcaggaacacgacgcacgcatggccgctctggacgacatggaggccagcgtgccggatttgaatgccgtgatgatggtgcgcgtctccggcgatgtgatgcccggaggacaggtgggatga

SEQ ID NO: 340614 - DNA, 2016 bp, Pseudomonas aeruginosa
atgagccagtggtcagaacgcattctcagccacttcacggccgatctcacccggctgtgggtggcgtgcgaccccgacgatgtgctgctggacgaaaagctcttgtccgaactgcgcagccggggcttcgaggtcatgctgtacgaagacccgttcgcctttcgggcggaatacgaggaacgctatcgcgcagcctgggatcgcggtgaggcggggccagcgccttcgctggttctgcatctgcgcagcgccgacgcgaatgagttgccgtgggacatcgtgcaccacggacgtgtggttcgattgagccttgcggaacttttccccaggctggcatacagcgcggtacagcaagtcgagccggagcattttgccgggctgtttcatgcccaccagaccgaattgcagtctgcacgcggcgagaacgagtccaaggacttcattctcgagcacgtctaccaactgacgccgagatctattcgcaacccggtcgacttctggcgtgagctgctacgcatgcacttcgccaaccgctcgttgccagcactgtttgccgagcacgcggcaggcatcatccagggtaaaggcttgttcgcgggcctgcccgtcgccacatggcttgcatccaagagcgcgctgctgcgtgtggtgcaggatgcgtggtatcgctacctgacgaccctggggctggatggcacgcgtacaggcgagccgccgccaccggactacgtcgcgaagatcgtgattccgttcgatcactccgatgttcaggtgctggtcgattccatgttccttgacggcagcttgcatccgttggcggtgcacagcgttccggcggggatgccgagttggatcaaggccggcattgttcaggacccggcggcgttgcaggctttggtgctcaaaggcatcgatggcctgatcgcagcgacaccaacggcggtctcttcgcacaaggactggagcgagttcgccaaacgctacggtgagatcctggcccgcacgcatggtctgccaggcactgaaggcagcgaacacctgccgatgattcgggaacggatcaagaccttgcagtcgcaatcagacgagggtctgcgagcctgggtcgcagctaagcattacgccgacctgatcttgcagccggtgaccaaaggcccggtgatggtgcaccacgtgccgcgctttttgcgccatcggcggtccgcaggggaaaccaaggtggctctactggtattcgacgggctggccttcgaccagtgggtgcagatccgcgagcgcctgatcgccaccacgaaacgtttcgcgttcgacgagggaaccgcgtttgcatggctgccgaccgtgacgtcggtgtcgcgtcaggcgctgttctccggcctgaaaccgcgagagttcgacgactccatcgacaggacggacaaggaggaatccttgtggaagacgttctggcagaacgaaggcgtcaattcgaatgaggtgatgtatcgacgcgcgctgcgtcagacccatcagctcgacgcactggaagcggatttgatcgaccggcgcccgaaggtggtgggcctggtcatcgatgaggtggacgatcggctccacaaggagcggtccaagaaggacgtggcgatgtggatcggcaactggctgacgaccggtttcgtcgaccggctgttctccctgctgctggacaagggataccacatctatctcacggcggaccacggcaacgttgagtccaccggcgtcggcaggcccagccagggcgtgatcgccgagacgcgcggagagcgtgttcgggtctaccggagtgagccattgctggccgattccgctgcggcctatcccaccacagtcaggttggacatcgctggactgcccgcgaacttcatgcccctattcgcaggcggacgaaccgcctttgtgccggagggcgagcaggtagtggtccacggcggggtgtcggtcgaagagttgatcgtgccctttgtgaaagtcagttatgtgatgggtaccgaatga

SEQ ID NO: 340615 - DNA, 585 bp, Pseudomonas aeruginosa
gtggaagccaagaagaaaacacgcaccgtgctgaatcggctgtggctggagccacgcgccgaactgctcgattacgccgatcgcggcgtcgccatccacaagacgcagccggacataccagtcgcggcgctgtgctggggcatgtccgtggcaacctacccgttttttggcaaagtggccgagctggtgggccgcctctccgccatccagggcgactgcgccgccgccgaagtacaccgccgcatgagcgaaacctacggagagcgcgaaggcactcggcgcatgaccaacatggtcatccagagccaggcgagctggggcgcggtggaacgggtcgagaaaggcaagcgggtcattcgcttgccacagatgagcatcgacaacgacgaactcacgacctggttgatcgaggcagccgtgcgctacgccggcaagccgctttcagtacccagtctgcagtcgctgcccgtgctgttcccgttcagcttgacgcgacccttggcttacttggtggcgaacagcccgagcctcaccctccggtcggaaggcccgagtaaccagttcgtcgcgttgcgaggcacgtga

SEQ ID NO: 340616 - DNA, 1128 bp, Pseudomonas aeruginosa
atggacataaaagatctacttcggtcaaagcccgtcacgcatatcgagacatcagcaggtcgtatttacctgtatccactgcggatgtgtgacatgaccgatttcgagaagctcggaccaggcgaagcggtcagccagatcaggcgattcctgccgagtattggcagcttgactgtggaatccgatgaatcgccagatcgtattcctctcgatgccgagattgccagtggacttacagacgatgagattgagcggatcgctgaagcctatgggagttcatccgcatggcaaacgacccgcgaaagctcccaagatcggaagcctgcgttgcgggaagctgatgaaacggcgtcggcctttctggtgcgactactcaaagccgaagtcgaggagtatcaccagagcgcgaaggaaatgcgcgacaagatgtttggcacggcgcgaagtatttttgatcaagtccaaaatagcaccagcatttttgatcaagttcgcaagagcacatcggcattgggatcgaccttgaacgcctacgatgaactcacaaaatttgcaaagtcatcgccaccagaaatccagccgattcgcacagatcactttgatgccttgaacaggcgtatgctggagcaagcacgggagcgtgcggaggagcgcgccgaagaaatggcgttggctcgcctgactggacagatgacggcggagtccgccaagacgctcaaggatttggccgaagcggcgactaccctgatggagcagttcgacgagcgcgaccgaaaaacagacaagtccacgcgcaagcaaatcaccatcgcggtttggtcggttggtatcacggcggtattggctttgctcgccttgatcgtctcgggatttgcctaccttcaagaccggaacaacagctcctccggggatcagtggcaagtgaagctgctgaccgccatcgagcaagggaatcagcagcgttctgcagtacagcatgagaacgaaacgcttcgagaacaagtaaatgtcctgggggcgcatatcgcagacctggaagcagctcaacgcgccgctaccgctgctgccaagaaagcagaagacgctacctctcctcgtgcggctacgaaccgtagcgctgcacagtag

SEQ ID NO: 340617 - DNA, 360 bp, Pseudomonas aeruginosa
atgcaaaaccgcatcctcattactcgttttgtccaacgcgccgccgtcgccctgggtgccgccgcgctgcccgcgctgtcgttcgcgcagggcctgccccagttggaaaacccgacccgcggcgccggcagcggcatcatggacacgatcaggaactacggctacgacatcatcatgctcgtggccctcctggtggtggcgtcgatgttcattggcgtgtgctaccacgcctacggcacctacgcggaaatccacaccgggcgcaagacctggggccagttcggcctcacggtcgccattggcgctgtcctgctcgtgatcggcatctggctgctcaccgaagccaccggcatcctgtaa

SEQ ID NO: 340618 - DNA, 234 bp, Pseudomonas aeruginosa
atgaacggtgcccaggtctcggcatttcaagccaacagcggcatcgcgccgtccgcaatggcgaccgtcctggtcggcgtcgtgttcgcggttctgctcgtctggggcgtctgggccatccgaacggcctacgtggggtgggccgagaaccgcctcaaccagcgccagttcctcggtgtctgcatccgcttcgtcgcgatgtacctcgtgctgactttcttcctcctctcctga

SEQ ID NO: 340619 - DNA, 642 bp, Pseudomonas aeruginosa
atgaatgccgcgcagtctccccgtcgcccgatcaccgccgtggtggtgcagagcctgatgtggctctggctgatcagcctcagcgtcttcgtcgctctcggctaccaggcggtgaacgaccagaccgaccagaatcagcttgatacccgcctgcaacgtctcgaagcgcaggcgatgggcctggccgagaccattgatgccatccagcagcgtccagccgtcgcaacggcggcagacctcaaagacacccgcgaactcctggaagcacgcgctgctcaggtcgaaaaagcgctgagcggctatgccgctgccgaagaccttcaggcgctgcgcaccgaagtcgagcaaatcaagacacgccagactgttgcgcgtgccgcagcgtccgcccagccgcgcgtaccgaccaggcccaccgccaagccggaaccgccgccactgccgttccgcatcgtcggcgccgaacttcgcgccggccagcgcagcctgtccgtcgcgccgaacaacgggaacttcacgcccgaccagcttcaagtgctgcttcccggcgatgccgtcggcccgtggcgcttgcaggcagtcgagggcaacaccgcggtgttccaggccggcgaccagacccgtcgcatggcgattccttga

SEQ ID NO: 340620 - DNA, 1245 bp, Pseudomonas aeruginosa
atgggcaagctcacgagcaagacggtcgagtctctggcaagggcagggattccgggcaaaaccaacgatggcgatgggctgtatttccagataagcaaagccggcgcatcgagctggattttccgctacaagttggaagggaggggtagggagatggggttaggcccatatcccaccgtcacgctcgccgaggcccggcaactgtcggcagaccagcgcaaggtattggctgccggcgctgacccgctcgccgcccgtgatgcggcccgtgaagcgaagcgcgaggctgagcgccaggcgcaggcccgccgcattacgttcgagacgctggcgagtgagtatcaggcagcccacggtgcgagttggtcggagaaatggcgcaagggctggctccgcaagctggagctgtacgcgttccctcatatcggcaagatgcctgctgccgagattcagaccgagcacgtcttaaaggtgctgcaaccgatctgggcaaccaaaacccgcaccgccgatgaggtgcgcggccaggttgagcaggtgctagatgccgccaaggcccgccgcctacgtgatggagacaacccggcacgctggcgtggccacctggacaacctgctgtcgaaggccgagaagaagaaggcccgccagcgccagcacttccccgcgatgaagtggcaggacgtgccggctctgatgcagaagctggcgcaggatgagagccgcgcagccgtcgccgccaggctgatgatcctcaccggagcgcgtgcgcagatggtgcgcttcgccgcctggggcgagtttgacctagatgcaggcgtctggtcgctgcccgcgacacggatgaagatgcgcaaagccttctccgttcccctgtctgccgaagtcgtcgaaatgctggagtctctgccgcgcatcgatggcagtccctacctgttccccggccagggcaagaccggcgttatgcacgccaacgcaatccgcaatctgctgcacggcttaggccacgacgatgtgacgcggcatggattcagagcgagcttccgcgattgggcgaacgaatgcacccattacccgcgtgaagtgtgcgagatggcacttgcccatgatgagcgcgaccaaaccgaggctgcttattcacgttccgactttctggagaagcgccgcgccctgatggccgattgggcgacctattgcaccagcacgccggcgagtaacaacgtagtgccaatgcggagggcgaagtga

SEQ ID NO: 340621 - DNA, 159 bp, Pseudomonas aeruginosa
atgagacgtgtatcggatcatcttttgaagcgtctcaaggtattcgccaagttcgtccttttccgttctggcattcggaaacttatgaacctgatcgaaacggtaacgtccaagaagaataccaagccattgagtaaactcgccgtgatctacttgtag

SEQ ID NO: 340622 - DNA, 198 bp, Pseudomonas aeruginosa
atgtccaatacccaaccccgccgcatcatgcgcctgccggaagttattacggctaccggctacaagcgcagctccatttacctgttcatggatcggggcgagttcccgaagtgccaccgcatcggcccgcgtgccgtcggctgggacagcctggagattgaagcctggattcgctccaagttgggaggtcagcactaa

SEQ ID NO: 340623 - DNA, 339 bp, Pseudomonas aeruginosa
atgaccgaccaacaaaaaagccccgagctggttgccgccagcatcgaggccaatcacatcaagttcatccgcgctcattttaacagcctgaccccccgcctgaaacgcctgctgcgtgccctgctggataacccggatggactgccccgcgaagccgccgaccgcgcaacgccggcaagcaattcgcccgagtacatcagccagctacgtgaccgtttagctctagtaattccttgtgagcgcgttagcttcaccaccacggacggtgtagcgagctggtacggacgctatcacctgacgcggactgaccgcgaacgcctgacagcggccctgaactaa

SEQ ID NO: 340624 - DNA, 912 bp, Pseudomonas aeruginosa
atggaggctctcgacctgttccggcaacggctgggcaggcggccttattgcagcgataacctggccacggatggcctttatcgcctgccggtcgctgatgctctgacccatcaactcatccaacccaacaccgccaagcgcatggtttgcttggcgttcgacgttgaccgccccgccgcagctatcgactggagcgaccgcaatgcacccgcgccgaccatgacggtgatgaacccggcgaacggtcacgcgcaccttgtgtacctgctggccgacccggtgcccgtgtctgatgcttcccgcatcaagcccgtgcgctacctggctgcgattcaggaaggcatccgtcgcagcctggacgccgaccgaggttatgccggcctgatagtgaagaaccccctgcacgcgcattgggtaacgcgccagtgggccgatgcctacagcctcgacggcctggccgccaacgtcgaattgcccacgcctgccgagatgaagcgccgcgccaagcaagccgactatgccggcctgggccgcaattgcaccctgttcgagatcgtccgcaggcaggcttacagcgtcgtccgcgactactggcgacccggtggcgctgccccctttgccgctgccgtgctggcgctggttgaggccgcgaacactgactttgccgtgccgctgtccgtgggcgagtgccgcgccattgcccgcagtatcagccggtgggtgtggcagcgattcaccccggacgagttccgcgcaattcaggccgctaggggatcgaagaaaggcgccaccaagcgcgagcaactgatgcccaccgcgcaatctatggcgcatgacggctacagcttgcgcgagattggcgaagcgctgggcgtgtcgttcaagacggtgagcaactggctcaacgaatga

SEQ ID NO: 340625 - DNA, 219 bp, Pseudomonas aeruginosa
atgagcaccgaacgcccaaaaggtatacccattgctgtaggccgtcgcattgtcgaaaacgaccagaaacctcaaatcgacgcctacggattggcaatgattgagtctctgtgcggcaggcttcagaccttgcacttcacggaagacgacgagggacttagggagaagctggagcaagtgatggagtacgccgagaggatcgtcgatcgctacagctaa

SEQ ID NO: 340626 - DNA, 1218 bp, Pseudomonas aeruginosa
atgaaactgcaccaactccgcgaacaacgttcgcaagctgtcgccagcatgaaagcgattgtcgataccgctgccgctgctggccgcgacctgaccgccgatgaatccgccaagttcgacaccctgaaggctgaagaacgctccctgtccgccagcatcgagcgccacgagcatctggccagcctggaagcccgcaccgctgccccggtcggcaaggacaccgccgagaacctggaaggccgcgtgtccctactgtccgtcctgcgtgccggcatggaaggccgcagtctgaccggcgccgaggccgagtatcaccaagaaaccgagcgccgcactggtcgcaaggccgaaggcgtgttcgtgcccatgggcctgctggagcgccgcgccaacaccaccagcaccgcgccggaactggtgccgaccgaccaccgcgccgaccagtacatcggcccgctgcgtgaagccctgatggcccgccgcctgggcgtgcgcgtgctgtccggcctgcacggcaatgtcgtgatcccgaagttcggcagcggcctggaaacgggttgggtggccgaaggtggcgcagtgccggaaggtgagatgacgttcggcaatgtcgccctgtcgcccaagcacgtcggcggcaaaaccgagctttcccgtcagcttatccagcagtccagcccggacattgaagccctggtgcgccaagacctggcgttcctgattgccaagcaaatcgaccgcgccatcatcgccggcagtggtgccagcaacgaaccgcgcggcatcatcaacaccgtcggcatccaaaccggcaacctggccaccctggattgggccagcgtcatgaccatggttcagcagttcgaggacaccgaactgactagcgccgcctggctgaccaccagcgacgccaaaaccaagttcgccaccaccctcaaggcagccggcttgcccggttatctgctggaaaacggccaggtaggcggctacccgctgcacgtcacccgccagtttgccgccgacagcaacggcgactccccggtgctgctgggcgacttctcgcaggtgctgctgggcgtctggtccgagctggacattctggtgaacccgtttgccgaaccggcctacagccgtggcggtgtgcaggttcgcgcgatggccacctgtgacgtggccctgcgctacccggaagccttcgtgctggccgagggcgtgtaa

SEQ ID NO: 340627 - DNA, 519 bp, Pseudomonas aeruginosa
atggaactggagcgccgcttttctgccggtgctgccgtggaaggtcgccagcttgtcgggctggcggcccccttcggcgcagagactcgcatcggcgacttccgcgagatcattgcgccgggagcgttcagccgcaccctgagcgaaagcgctgacattctcgccctggtggatcacgacgagagcaaggtactgggccgcacccgttccggctcgctggagctgcgcgagacgccagaagggctggagtatcgcctgaccctgcccgacaccagtgcagctaatgacctgcgcgccctggccaagcgtggcgacctgggcggcgtgtcgttcggtttccgtgtcgtgcgtgattcctgggccggcgacctgcgcaccctgcatgaagtcgagctgcacgaaatcagcatcgtgcaggcgcacccggcctacccgaccaccaccgttagcctgcgttcccgtgtgggttactgcccgcgcctgaacctggctcgccgctacctggaggccgttgcgtga

SEQ ID NO: 340628 - DNA, 1161 bp, Pseudomonas aeruginosa
gtgaagtttccctggagcaagaaacgcgaaacccgcgccgaccacttcgacccgtattggtcgcaattccagtacggccagaacacagccggcgtccacgttgaccaccgcagcgccgagggcgtgagcgccgtctatggctgcgtgtccgcgattgccgagacggtggccagcctgccgctggacgtgtaccgccgcactgacgacggacgcgagaaggcccgcaaccacccgctgtatcacctgctgcacgacgcgccgaacgattggcaaaccgccctggagttccgcgagttgctgcaacggcacgtcctgctgcgcggcaacggctatgcgcggatcgtctggaatggcgcgggccgtgtcgaagccctcaagcccctgcacccggatagcgtcaccgtcctggccaacgccagcagcgaccgcctgctgtacgacgtgaccgaccgcaacggcaggctgacccgcctgaccgccgacgatgtgctgcacctgcgcttccactccgatgacggtgtgctgggtcgttcccctattcaggtggcccgcgacaccatcggcctggccctagctgaacagacccacggcgccaagatgttcgagcaaggcaccaagctgtccggcgtcatcgagacgcagccgggcaccaccaaggatcaggcccgccagattcgggagagctgggccgagggctacggctccgtatccaaccacgggaaaaccggcgtactgccgcagggcgccaccttcagggcggtgtccatgaccctggaggatagcgagtgggtatcggcccgcaagctgtcggtcatcgaggtttgccgtctgttccgctgcccgcccgtcatcgtgcaaagcatggagagcgcgaactactccaacagcgtggagctggcccgccagttcgtcaccctgaccctgcgccgccacctggtgctgtgggagcaggcgattaaccgcaccctgttgggcggcccgttcttctgtgaacacaacgttgaaggtctgctgcgtggcgactctgccacccgcgccggcttctatcagcgtggcatcgaggacggctggttgctcaaatctgaggtgcgcaagttggaaaacctgcccgctatcgaaggtatcgacgatgaagaagcagcgccgactcccgctgaatag

SEQ ID NO: 340629 - DNA, 363 bp, Pseudomonas aeruginosa
atgaagaagcagcgccgactcccgctgaatagcgccgcctggaagcgcctgcgcgctgaggtgctggccgatgagccgctgtgccgcatgtgtgccgcccgtggcctggtagttcccgccactgatgttgaccacatcgaagacagccgcgacgactacagcgacgacaacagccgcgccaaccttcagcccctgtgccatgaatgccactcgctcaagaccgcccgcgacatgggcaagcgcgtgacgctgggctgcgacgtgtccggcctgcccgtcgatcctgcgcacccgtggaacctcgaaaaatcacgaggaaccgacgacggcaagaccgcccccgaccctctttttcaacgctaa

SEQ ID NO: 340630 - DNA, 465 bp, Pseudomonas aeruginosa
atgaaactgacctcccgccgcccccgctctgacagtgccaaagccgccgtagcagcagcgcaagccgccgcccttggccctattgcgcctcctagctgcgtgcgcgtgtgcaagcgctccaagccgttctgggatgccatcgtgctggcccgtccgcgcgatacctggacggaggctgacttgatcctggccgccagcctggcccgtgcctatgccgacattgaacacctgcaacagcgcatcgacgatgacggcctgctgctggacggcggcaaaccgaacccggcctgtgacctgctggacaagctgacccgccgcgccctggccaccgcccgacagctcaaggtggacaccatcgccaccgtgggcaaggccgagagcatcccgaaggctgccgccctggagcgtgacgcccgcgcccgcctcgacgacgacctgataccgacgctggggaccatgcaatga

SEQ ID NO: 340631 - DNA, 1497 bp, Pseudomonas aeruginosa
atgacccgcgccgagaaaatcattgccttcatcgagcgctattgcgtgacgcccgaaggtgccgacgtgggcaagccgctggtgctggccgagtttcagcgcacgttcatccgcgacgtgtacgacaacccggtaggcacccgccgcgccatcctcagcgtggcccgcaagaacggcaagagcggactgattgccggcctgctgctggcacacttggtcggccccgaggccaagcagaacagccaactagtgtccggcgcgatgagccgcgaccaagctgccctggtgttcaaccttgccgccaagatggttcaacagtccgaggctctgagccagattgtgcgtatcgtgccgagcggtaagcgcctgctgggcctgccactgaatacagagttccgcgcccttgctgcggatggtaggaccgctcatggattgtccccggtgctggctatcctcgatgaggtgggccaggtacgcggccctcaatccgacttcgtggacgccatcattaccagccagggcgcacacgccgacccgctgcaaattgtcatcagcacccaagccgccaacgatgccgacctgctgagcacctggatcgacgacgccaaggcatccaacgatccgcgtatcgtctgccacgtctatgaggccccgaaaggctgcgacctgctggacgtggacggctggaaagccgctaacccggccctgggcctgttccgctccgaagacgatctgcgcgagcagatgacccaagcggcccggatgccgagcatgggcaacaccgctcgcaacctgctgctgaatcagcgtgtcagcctcgacagcccctttatcagcccggacgtgtgggcgagctgtggcggcgatcctgagccgttcgacggcccggtgtatggcggcctcgacctgtccgcccgcaccgacctgacggcgttggtgctgattggcaaggtggccggtaagtggcaggtgcgccccttcttctggacgcccgaacagggccttttcgaccgagccaagcgcgaccgtgcgccctatgacgtatgggttcggcagggcttcatccgcaccaccccgggggcgactgtggactatgaggccgtcgctctggatgtggccgagatcctggccgacttggatgtgtccgccatcgccttcgaccgctggcgcatcgatctgctgaagaaggagctggaacgcatcggcctggaactgccgctagtgccgtacggccagggcttcaaggatatgtccccggccctggatgccctggaggccgagctgctgaattcccgcctcgcccacggcgggcacccagttctgacgatgtgcgccgcaaatgccgtgaccacacaagacccgagcggcaaccgcaagctggacaagtcccgccgcactggccgtatcgacggcattcaagccctagccatggccttcggtgccgcgcagtccgccgaggcccccatcgaaattgatacagaggtgtttttcgtatga

SEQ ID NO: 340632 - DNA, 276 bp, Pseudomonas aeruginosa
atgaccctggaagaagccaaagagcacctgcgcgtcgtccatgacctggaagacagcctgattcaaacctacctcgacgccgccttgcagcacgtcgccatctacctgggcgacgatctgcccgacccgctgccgaagcccatcgaagccgccgtgctgttgctaatggctgacctgtacctgaaccgcgagcgccaggttgaccgcgtgctgagcgagaacagcgcctatgcgctgctgctcaacccgtaccgctccatgagcgtgaccgcatga

SEQ ID NO: 340633 - DNA, 318 bp, Pseudomonas aeruginosa
atgaacgccggacgcctgcgccacccgctgaacctccagcgcctggagctgacccaagacccggagacgggcgagatgaccgaggcttgggtgacggtgagccgggagtgggccagcatcgagggcgtgaacggacgcgagtttctggccgccagtgccgagcaggccgaaaccacctaccgcatcaccatccgccaccgcgacgacctggacgccacctggcgcctggtatccggtgccaccacctacggcattcaggcgatcctgccgggcaatcaaccggtctggctggtgctgatgtgccgagtgctcgcttag

SEQ ID NO: 340634 - DNA, 351 bp, Pseudomonas aeruginosa
atggccaagtaccgcatctcccatgatgctcaagcggacatcgtcgatatcctgcgcttcacccataaccgcttcggcgatgccgcgcgccgacgttaccaggcactcataggggcggcgctggaagcagttgcgacagacccacaacaggtaggcagcatcagccgtgaagaactgggagctggcctgcgcagcatccacctcgtttactgccgctcgatgcccagcatcggtaaggttattcggcccaggcacttcgtcttctaccgggttgcggcagaccaggtgctcgaggtggttcgcgtgcttcacgactccatggatctggatcaacacctgccccaacgatga

SEQ ID NO: 340635 - DNA, 1920 bp, Pseudomonas aeruginosa
atgtttcaactcctttcctggatatccaggaagccgtcccccaccccaccaaccaaagctgccccagggggattcctccctcctctgagcagcatggaactgctcggcacgcctcggcgccggcagctactggagaacatctggcaacgtgcctcgctatccaagcagcaattcgaggagatctaccggcggccactggccaactatgcagagctggtccagcagctccctgcttcggaaaaccatcaccatgcccatccaggcgggatgatcgatcacggcctggagatcgtggcctacgcactcaaggtacggcagacctacctgctcccgatcggcgcagcgccggagtcacagtcagcccaggctgaagcctggtcggccgccgcggcttatggtgccctggctcacgacataggcaagatcgtcgtcgacctgcaggttgagctgcaggacggcagcacctggcacccttggaacggaccgatcaaccagccctaccgcttcaagtacgtgaagtcccgcgaataccagctccacggcgctgcatcagcgctactcatccaccaactgcttccgcgcactgcactcgactggctcagtcgctttccagagctgtgggctcaattgatctacctgttcgcggggcagtacgagcacgccgggatcctcggagagatcatcgtgaaggcagaccaagcctccgtcgcgcaggagttgggagggaatccggatcgagcgctggctgcaccgaagcagtcgctgcagcggcagttggcagacgggctgcgcttcctggtgaaggacaaattcaagctgaatcagccgggcggcccgtccgacgggtggctgactcaggacgcactctggctggtgagcaagcccgcggccgatcagttgagagcctacctgctggctcagggaatcgaaggggtcccctcctccaacgcgccattcttcaacatgctccaggaccaggccgtcatccagacgaacgccgaagacaaggccatctggacggccacgatagacaatggtgctgggtggagaaacaagttcacgctcctcaagatcgctccagccttgatttgggctgaccctgccgagcggcctgattcctacagcggatcactcgtagttgaagagggcaacgcctcccctgaaaagccggaaacgacctgcgaaatccccaacgatccgattgaacagcgacaggcgccagaagcaaagatgaccctccgccagcctgcgccgaccattgcgaaaccgtcaaacgacatacaggcgattgcgaaaccctcaactgatgatcaagaagaaacagacgatttgtacgcacttcttggtaatatcaattcgccaccagaagagctagacactagccacgactcgccggctgtttctcctacgaacacacgcggggaggagaacctacagcagccactagggaccaaggagccaatagattgcgctcctgaagcaattgaagacgtatttatgcctagcagaagcactgatctgggacagggattcgttggctggatgaaatctggcatcacggcccgtcgcctgttcatcaacgacaccaaggctttggtgcataccgtcgacgggaccgccatgctggtcacgccaggaatcttcaagcgttatgtccaggagcatccagagctcgaaaagctggcccaggccaaggagaccgccggctggaagctggtgcagcgcgcgttcgagaaacagggtcttcaccgaaagaccagtaagaacctgaatatctggaccatcaaggtttctggtcctcgcaagacgaaagagctcaaggcctacctgctccaggatcccaaattgctgttccctgtgcagcctctggacaacccaagcctcacggtcatcaccgatgccgaaggaggtgtggaatga

SEQ ID NO: 340636 - DNA, 513 bp, Pseudomonas aeruginosa
atgtcctactccgatccccgcatttgccaccaccagcgcgtcacccaatggctcgccgcgatccgacagcacgccgcatggctgtatgccgcggatgagcagtacgtgtacctggtgggtgaggccaacgagctctaccagtgcggcgtcgtggggttgcaagacaggcacgacatggtcaccgacgccttgggcatgtactcatgggcgatcgagcacggcatcacgcgcgagacgcactactgcgctgactgctgctacgacgtgctcgacggcggcgccgtcgtcgggagcgtggacgacgagggcatctaccacgggcccgcacccgagcgacagcgcctgggctgcatcagccgggatccgctggatggtcaggtctatctgcgcctgggccaggcgcttgagcgcgcgggcgttgtgcgtggtctcacgatcgaactcgacgccggcggcacgctgctgcttgtcgagcagatcccaagcgacttccggccatggcggtgggcctga

SEQ ID NO: 340637 - DNA, 228 bp, Pseudomonas aeruginosa
atgatcgactggagcaaggtaaagaccgctgaacagcaggcgcaagagcgcaggcaggctgagtacgatgccgcagccgtggcgcgggcaaatgcataccgcctggagagtgacccgctcaagaccgaggctgaattcgatgcgatcaaggccggtaccgagccggactactctgcctggatcgccaaggtcgaggagatcaaagcacgtttcccgttgccagattaa

SEQ ID NO: 340638 - DNA, 792 bp, Pseudomonas aeruginosa
atggcatggtattcaaccggcaccgtcgcggtgacagaaaatagcccgaccgtcaccggcaccggaactcagttttcttctaatgtccgggtaggcgacgcctttattgcccctgacgggcgcctctacgaagtgagcaacgtcgccagttcgacggtcatctcgatcaaacccaactaccagggcagcacggctagcggccaggcctttgcggtggcgccgatactgggctacgacaaggacctgtcagatcgtttcaaccagatcgcgatggattggggagcgacgctggcaggcataaagccctgggcgctctctgcaaatgccgcagcggcgcggggggatctcggcctcggcagcgcggcggtacgggaggcacttggtagctcgggggctttgtactctcgagacagtattctcggcacggtttcgcaggcgagcggcgtacccaccggtgcggtgatccagcgcgggagcaacgcgaacggagagttcgtgcggtttgcggacggaactcagatatgcgctggcgttagcagtaccgctctggtgtgcagcgttgcgaccgggggtgggtttcagtcggggggcgttgctgcgttctattttcctgctgcgttttctgctgcgccatctgtttcaccggttccggcgtttagagagggcgcaacagctcgtgcatggctttcgatgaaccctccgtcggcttctgttgtgacgctgatttctcacggatttgttgatagagccgaggttatgcccggatacatcgcgtttgggagatggtactga

SEQ ID NO: 340639 - DNA, 249 bp, Pseudomonas aeruginosa
atgccgctcgaattccggcttgacctccagctcggcggccagcagttcgcccagttcggtctcgaagccggtgagcttgccgccctgcttgaagttgaacggcggataggtgccctccagggcgatgcgcagggcgccgcgctggtggacgtcgtcgagcagctcggcatgggccagcggggcggccagggataccagcatcagcaggcggggcagaaatcgcatgtagtactcctcgggtgggaatga

SEQ ID NO: 340640 - DNA, 1395 bp, Pseudomonas aeruginosa
atgacccgcgaagccctgatcgaatcgctcaagcccctggtcgagcctggcaagctgctcgacgacgccgcctccctggacgcctacggcaaggactggaccaagcatttcgcccctgcgccgctggccatcgtgttccccaagagcgtcgagcaggtccaggcgatcgtccgctgggccaaccagcacaaggtcggtctggtcccgtcgggcggccgtaccgggctctccgccgcggccgtggcggccaacggcgaagtcgtggtggccttcgactacatgaaccggatcctcgacttcaatgccttcgaccgcaccgtggtctgccagcccggcgtggttaccaagcaactgcagaccttcgccgaggaaaacggcctgtactacccggttgacttcgcttcttccggttccagccagatcggcggcaatatcggcaccaatgccggcgggatcaaggtcattcgctacggcatgacccgtaactgggtggccgggatgaaggtcgtcaccggcaagggcgacctgctcgagctgaacaaggacctgatcaagaacgccaccggctacgatatgcgccagctgttcatcggcgccgaaggcaccctgggcttcgtggtcgaggcgactatgcgcctggagcgcacgccgaagaacctcaccgctatggtcctcggcacgcccgacttcgactcgatcatgccggtgctgcatgccttccagagcaagctcgacctgaccgccttcgagttcttctccgacaaggccctggccaaggtcctggcccgtggcgacgtaccgcgggcgttcgagaccgactgcccgttctacgccctgctggagttcgaggcgaccaccgaggaagtcgccaacgaggcgctggccaccttcgagcactgcgtcgagcagggctgggtgctggacggggtgatgagccagagcgagcagcagttgcagaacctgtggaagctgcgcgagtacatctccgagaccatctcccactggacgccgtacaagaacgacatctcggtcacggtttcccgggtgcccgccttcctcaaggacatcgacgccatcgtcgaggccaactacccggacttcgaggtggtgtggttcggccacatcggcgacggcaacctgcacctgaacatcctcaagccggaaaacctcggcaaggacgagttcttcgccaagtgcgcgaccgtcaacaagtgggtgttcgagaccgtcgagaagtacaacggctcgatttccgccgagcatggcgtgggcatgaccaagcgcgactacttgacctacacccgctcggaaaccgaaattgcctatatgaaggcactgaaggcggtgttcgaccccaacgggatcatgaatcccggcaagatcttcgccgagtag

SEQ ID NO: 340641 - DNA, 261 bp, Pseudomonas aeruginosa
atgcttgtcaaactccccgatgaatcccccgacttcgtagagaaactcaaggaacagaccggtgcgaccacggctgccggtgcctatcggttcgccgctgagcggtacgggtcgctgacctatcagctcaagcaggccatggacgaactggcgaggttgcagacccggtgcaacgtccaacagcagatcatcgacaacgcccgcgcttctgcctcttcgctgcttgaccacgtcgcccagggcgatcttctgcaaagctga

SEQ ID NO: 340642 - DNA, 651 bp, Pseudomonas aeruginosa
atgcggctgaaacgaatgcggggtctgcacctgcgcaccggtcgcggcggacgctgcgctacgctggctgccgccgctcgcggtgcttgtcgcatccatcactgtcgatatcgctccacggcccgtccaaaacgtcacacaggtaacgtaacgccgaggtcattatgcgaagccagagcttcacacaggccgatcaggcatcagggtatgcaaccccagcgcccacaaccgaaaagcccaccagcacgatcctggagccgctcaacgccaaccccattcattggcgtatcccgcactggcaattacaacctgcctgcgcgccctcggctggttgtaatcgccagtacgcagttgagcccctggacaaagttccgcgccttaaggccatcacggaagcacctccagaactgtcagccgggaaacctcaacgaagtccgacgagtagccgtcctgtttcaacaacaaactggttgccacgccatccgcaacagaaccaacctgcacagcaataaccctggcctcgtacacgatggactcatcaacaaacccccgatcatccccatagtgcgactgaacctgttcgcctactcgaatacgtttaccgaaaaaatcgaagggatttgcctgagagcagcccccaatccaacatga

SEQ ID NO: 340643 - DNA, 1209 bp, Pseudomonas aeruginosa
atgacttgtcaaacactcagatccagtgcaacacccaaggccctgaccggctgggttctccttgatgacaataaccttccccgctattgggcgactgtctgggccgacgtcctgcaggcgaaactcaaagacagcacgcgaagccgatgcttgtacgccattgatcgcttgtaccagcactttgcgctgctgtaccaagccgatgtccttgatcagcttttgactgattgccaattcgatgcacttgaggctggcctggccgccttcctgagcgtcctgcgaaatcaggccaaacgcgatggcattgtcaattccacagtttgggcttcggccattagattcgttgtcgatatcctccgctaccttgccagaggcatagacgccgacaacttgaagggccggctagagaatctggacaagttatatagccagcttgatccatccccaccagctgagccagctcctattcgagccttgcctgggattgtagtcgacgacctttaccggattatggaaccgctttctcccggcaacccttttcgtaccgaaagaaaccgctggcgaaattattttgtatttatttgcgcgttagcgtctggcttgaggcgaggcgaagttgcctctcttgcaagcgatgctatccaatccgaatatgattacgcagctgaagatgatcggagctggatatgcgttcgggagaacccatatgttgaactggatcctcgccgcgaggcgcccggcattaagaatgcacagtccagacgtcaattaccaatttcccaagacttattacagataaacgaccgcataattttagacttcactagaaacagatcacacagttacctggtaggctcgcagaaaggaaaaccaatttccctgcgtcagttacaacggatttttgaaacagcctctactcgattgtccccagcagcgaaaagagctttgcgttttcgcggaaaacatagcgtgactcttcatgatcttcgccacacttgcgccgtatataggctcaagtgttacatggagtcaggacttgacttagacacagcagtggaaaagttgcgggtgttctttggttggtcagccagttcagaaatgcctaggctttatgctcgcgcatatttcgagtcagtgcacgcggatgtctggagcgacaagtatgacaaaattgttagcaccttgagagagttggacggctttgcatga

SEQ ID NO: 340644 - DNA, 351 bp, Pseudomonas aeruginosa
atgcaacagaaaactcaacgcgcgcaagtcccctgcgccgttaccaccgaccaccaggtttgcttcgatcctctcaacggggatgagttcttgttctccattgttgccgaccggccggttgacgcggctctggccgccgccgaggacatcagcgaggcggttcacctgattcttttgagaatgaccctggcgatggacgatgccggcgagccgctactctctcaggaactcaatactctcgccctgctgggggccatgtctggcgcattgctcagagcttgccgggccggtgtcgcgacccaatccggaaatcctgaaagcgtgtcgcgacacgcaggcggtgcagcatga

SEQ ID NO: 340645 - DNA, 837 bp, Pseudomonas aeruginosa
atgctcaagcttcacgatttttgcaacagagcccggccagggacgctggctgcatttcagtcgcccatcgtggtggaaaccgagttcgtgcagcaccggcaccaccatgacctcaccgcaacgcagcgcttcaccgtcgcggacgttcttcacatgccactggctgtgccggccgactgcctgcggcaggttctgctcgaagctggcgtcgatgtgctgggcatagaggaagccgatcggcaggccgccgggcaaggcgtcgagaaatgccttcaccgccgccgggccgccgagcgaggccgccagcagccacacctcgcgggccgcttcgccggcctgcagcggcatcgccgcgaggtcgccgggaatctccaggcgcggcggacgctcctcgtcgagcaatgcgccgaggctgtcgccaacgccatcgctggggtcgccgatcaagcgcttcagcttgccgatcagccgccgctcccagcgcgggtaatgttcggtatgccgctccggcgcgtggccctcgccgaacagcaccggcgcacggtcctgctccagcaggctgtccagcagcggcgagtcgtcctgctgggtcaggtccaccagccacaggtcgggcgcgcactccagcgcggcgtcgtcgaccctggccgggtcggcgttgagcaccacctcgtagccatggccgagcagcgcctgttgcaacacgtggcgctgcaacgaggtgtcggcgatcaccgcgacccgtggcgtggcgcgctcactcatgctggccgaccagggactggatggcttcgagcagctcggtttcctggtaaggcttgccgaggtactggttga

SEQ ID NO: 340646 - DNA, 972 bp, Pseudomonas aeruginosa
atgaaagccgaacaccgcgagatcatcgaccgcgccaaactacacggttactacccaagcactatcgcgcacgagttgctggagcgcgacctggtcaacacggtggtcaccgaactgcgcagtgtccgtgtgcccttccacctgctgaaggaagacgagcagcaggaagtgatcgatcgcatagcggaaagcgtgagcgaagtgaccagggtggccatcagcatcattgcttcccgcggcgcagtctccgttccagtcgatatgaaagcgatcaaggtcgaagccaagaccatgacgatcacggcgaaggtagacggcgcagagccgaacaagcacgaattgaccgacgccgctggcaagttgtgcttgctggtaatggcaccgagcgattacgacgaggggttggacgacgtccgtcccgaccgcgaccagcacgaaatgccgctgcacgctggcaacgtcgcagaggggctgctgggcgatggcagtgaagatcagttgtacctcgaggctgtcgcacatgtccgcgacacccgccaggcaaccatcagttccatccagaggcacctgaagatcggctacaaccgtgccgcgcgcatcgttgaagcgatggaggcggccggggtcgtatcggcaccgaactccaacggcgagcgcgaggtgatcctgcaatcgccgccggaaccggaaaaaggcctgctgagcagcgccgccgagcccggcgacacaacctacggcggccacaccatcgacgacatcactgtcctggtgctgcgtaaggaccagatcacccccggctggctgcagtcccgcttcgcgctgagcaccgacgagtcgctggccgtggccctgaagctgctcgacgacggcgtgatcacgctggacgccgagggcgaaacaccagacctcaacacctaccgcgtgaccgttgccgagaaggccccggccgaagcgcccatcaccctggagtga

SEQ ID NO: 340647 - DNA, 747 bp, Pseudomonas aeruginosa
atgcctcatttcggcgcaccggcgctgctcctgctgcagttgctcgcggccctgccagcgacggccgcggagaccgacgcgacgccattgcgcttctcggtgatggaaagctggagcatgccgttggtccgcctgcaacggggccagccgatcgacggcatcgtctacgacatcacccgctccctggcccggcaggtcgaccgcaaggcgctctaccacccctacccgcgcgggcgcatcgagcaggcgatgaacgctggcgaaatcgatgtccgctgctacatcagccccgcctggctcagccacgacttccccggctatcgctggagcgtcgcgctgctggtgcaacgcgacatcctggtcgcccgcgaaggcttcgcgccgattcccgaggcgctgccggcccagcgtatcggtaccgtccttggctacagctatccgcgcttgcaagcgctgttcgacatcggccgactgcgccgcgacgatgcgcgcacccaggatctggtgctggaaaagctgcgcgccggccgctaccgctacgcggtcagccatcaactgtcgctgcactggagcaaccgccaggcgccggggcagccgccactccaggaagccgcgcagctcgaggaaacggcggtgagctgcctggtgcgggattccgcggaggttccggtggaagcgatactgaagacgttcgaggaaatgaagcgcagcggagagatcgaggagatactgcagcgctaccgatga

SEQ ID NO: 340648 - DNA, 618 bp, Pseudomonas aeruginosa
atgagagaccttgaggagaaaattctggaatacagaagacttgctccggaaggctggataataacggccaaggacttcctgcatgctggatcgcggagtgcagttagccgtgcgctagtgaggctcgagaagactggaaggctcatccgagtttcacgcggtctttatgttgctccggttactggtcgcttcggcactcgagcaccagcgacacagaaagtcgtttatgcgctggctgagcgaacccacaaattaatcgtatgcagcggcgcgcttgcagcctgtcatctagggctcactcaacaggttccagttcgcgaggtgtttctcacatgcggtcgggccagaagtctgcagttaggtaagttaacaattaaaatccagcgtgcgcctcgatggcaattggcgcttggtaaaactatcgcaggggacgcggttcgggccatggcgtggttgggcaaaccacatgcatacgaggctgcggaaaagctgtacaagctcctacctaaatgcgaatggatggcccttgagttgaccaaaccctatttaccagcttggatggctgaagcaattaggcgatgctcagacgtgcatggcttcaaatttagccgtaattag

SEQ ID NO: 340649 - DNA, 5130 bp, Pseudomonas aeruginosa
atgccaatcattggtcaattggcaatcgaggggcaggagcggcccgagtcggcacagttgccgggttgtcgggccctgttgctctaccccatgaatgccttggttaatgatcaattggcgcggatccggcgcctcataggagatgctgaggcgtcgtcgatcttgacgcaaagccgctctcagccgatccgtttcggtagctataccggtcgcaccccgtatccgggagagcgttccaaagaacgcgacgaacgctttatagagccgctgtttgaagagttctataacaaagtggccatgaaacctaccgtgaaagacgaactggtcaggatcggacgttggccgagtaaggacctagaggggttttatggcgcctcaactattgaggccaagacctattcatctggcaagaagaagggcgaaaacttcaccaaaaagcattgggccgggcggcttcagacccagcccagtgatcgcgagatgatgactcgtcatgaaatgcagacgcgctgtcccgaactattgatcaccaactactccatgctcgagtacatgcttatgcgaccgattgaacgcaagatgttcgatcagacgaaggcgtggctcaaagcggactcgcgcaacgaattcatcctcgttttggacgaggcgcatatgtacaggggggccggtggagccgaggtggctttgttgatccggcgcctctgcgcgcgacttgacattccacgagaacgcatgcgttgcatcatgacaagtgcgagcctggggcccgcagacaccgctgcagtggagggtgagcgttttttgcgggacctgacgggcttggccgacacatcgccgagacgcgtcagggtaatccaggggactccggagcaacgctatgaggcacaggcagtgccaatcgtgcaccttgaggcgctggcagatttcaacttggccgattttcaacgcgcggccgaggaccttgacgcagcgaccgaagcggcggcgcaccttgcccatcggctcagttggagtcaaccaccgcgcggggagcatgctgcgtttcgcaactggttgttcgaccaactcaccggatttgaaccgctggagaacttgattaccgcagtatcaggtcatgcagttcgattagactatcttcgtgatcggctgtttggcgaccatccctcggtcgatgcggaaaaagccactgacacgcttttggcattgggtagctacgcacaacggagcagggatggccgggtattgctgccgacgcgcctgcacctcttccatcgcgggttgccaggtctgttcgcttgcgtgaaccctaactgctccaagcgcctaggccatcatgacgggcccacgatcctgggtcgactgcttacgaaaccgtcagcccagtgtggttgcgaggtcaatggccgcgtgtatgaactgctcacacatcgcgactgcggagccgcttttctacgtggttttgtaaacaaggatatggacttcgtttggcatcagcccagtggcctgttatccgacggtacggtacctacgctgatgccgattgagttgtgcgtggaggacgccgtccatcctcgcagtcgacatatcgagaaatggctgcatatggccactggcaagctctcgagtgaacagccgagcgacgaagccgggttccgaaggattcgcgtgccggacaaagcggcggacgctggcgacatgacttttgaccactgcccggtctgtacccgcaagataaaaaacgccaaagacgccccatcaaaaatcatggatcaccttaccaagggtgaggcgccgttcactgcgctcgtgcggacgcaaatggccaagcaacccgccagtcgaaccaaggataaacggcacccgaacgccggtcgcaaggtgctgattttctcagatggtcgacaaaaggccgctcggctagctcgtgatattccgcgtgacattgaactcgatgtttttcgacaggctgtcgcattggcttgtcacaagctcagaggattaggaaaaaccgccaaacccacggccttactctatctagctttccttagcgtcttgaccgaccacgacctaccgatgttcgatggtggtgattcgagaagagtcgagaatgcacgcaaattatttgatgacaactataactccgatttggtcgaagctattgaggcgcactttacgccacaggaaattccggcgcgctaccagattgcgctcctcaaactgctttgtggtaactattactcgctgacgggaacaatggtcggcttcgttgagccaacccctccaaaactgcgaaaactcggccagcacttgtcgacggccggattcactatcagcgaaacgaacctccgcgaattggcggtaggatggattaactcgatgctgcaggaatatgccttcgacaaatccattgagtcagtctatcgctggaaagcagccggttataccaactcagtctgggggagtaccggtcagtttggaaaagctttgaaggagagtctggccaaccatttcggttggtcaagcaacgctgtgaaaagtgttgaagcgattttccgagatcaactggcggaagagttcgaaggtgcctggttcttggtgcccgactccttagctgtggttgtcgacttagcccactgctgggcgcaatgcgctgactgtactgcgcttacacccttcgctttggcgggcaaggtatgcctggcgtgcggcagcaacgcagcgtcgccccttgatccgaagaacagcgattatgtcactgcgcgtaaagacttttggcggcttccagtggccagggccctaacgccaggtgcagaactgtccaacatgagcgtcgaagaacataccgcacaattgtcgaaccgtgaccgtagccgggttcatgccaccaccgaactctatgagatgcggttccaggacgtactgatcgaagatcgagatcgcccgatcgacgtgctcagttgcacaacgaccatggaggtaggggtcgacattggttcgctggtcgccgtagcgttacgaaacgtccctccacaacgggaaaactaccaacagcgcgccggtcgagcagggcggcgcggttcgtcggtttcaactgtagtcacctactcgcagaacggcccacatgacagccactacttcttgaacccggaacgtatcgtggccggtccgcctcgtacaccggaggtgaagattgataatgcgaaaatcgcccgacggcatattcacgcctacttaatccagacttttttccatgaaatcatggcgcaatgcgccgactcggtgactgaaaataactcatcactgctaaaagcgctggggccgactgaggatttcttctgccgtatcgagcaaaccgggcccacgttgaacagcttcgaggcttgggtgactcgccgggtgctggcctgtaatggcgatctgcgcgagtcgattgtcgcctggctgccgccggggttggatacccgtgggctttcattgatggaatggttggctgagaccagtaagggattgctggttgaactcaaacaactgggcataaccgtcgaagcggctaggaagcctgatgtcctcattgaacaagagattgaggatggcgacgatccccgacctagtatcgaacaggcggagcttctggagttcttgtttttccacggtttgctccccagctatgcgttcccgaccagtctttgcagttttctcgtggaaaagctcagcaagaactcgcgggatcgatgggaggtgcgaacggtgcaacgacctcaacagtccatcatcaaagccctgagcgagtacgccccgggacgcctgatcgttattgacaagaagacctatcgctcaggcggtgtttttgcagatctaccagcgggtgttgtaaatcgtgcgagccttctcttcaagaacaaaaaaccgcacacccactgcaaagcctgctcctttgtacgtgaccctaatcgttcagctaaagatcagatgacctgtcccgtctgcggccaacagttggtgactgaacagatgatcgtgccacaggtgttcgggccggagggcgctgccgatttgccggaaaatgaccgcgagcaggaaatcacctacgcgacgatggctcagttgccgcaacctgtagatccggagatttttagcttttctgcctgtggcccgtatgcaagcttcacccatgctgtcgaccgcacgcttgtcaccgtaaaccgaggcaaagagggtacaggggaagggggcttttcagtctgcatggactgcggtaatgcctcggtctttgatcaagaggcgaaagcgggagcacacgaccgcccctacaggcaactcggtccaaaaggaacgtcggagaagtgttctggccagttcgcacgagtgttgctgggccatcacttcaacacggacctcttgctgttgcgtcttagaatcgcagaaccaatcgtgactgatacgataaacagggtagtgttgcatattctcgaagatgctttgcattcacttgccgaggctctacggctagcggcgagccggcatcggcagttggatctggatcctgccgagttcggctctggctttaggattgagccagcgctgcaagatgagacccgtatcttggatatctttttgtacgacaccttatcaggaggcgcagggtatgccgagatcgtagcgcggcacatggtcgagattttagacgcgacgcttgagctgttggaaagctgcacatgcgagacttcctgcacagaatgcctcaaccacttccataaccaacaccttcagcaccgtcttgatcggcatttggcggcaatgctcttgcgttatgcggtacgtggagaggttccaacctgttcgtcggcaaccggccaattggtgaaactcgctccgcttcgagccagccttgagttggcaggatatgtctgtcgagttggctcgattccgtctgcgccattgctagttgagcaacagggtaaagccgtggcggtgggctgctatcctggcctgatcgatagccttgagcgtcagcaacccagcactaggacagcaggcgttaacgcaataatcgggctcaacgagtacctactacgctcggatcttgcgagcgcccagttgaaagttcaagcacttttcaaagtgtag

SEQ ID NO: 340650 - DNA, 396 bp, Pseudomonas aeruginosa
atggcagggattgcgatgaatgaagcatcgggtgttcacgagacagcgaaaaatctggccgagagccttcgacaatacatcgaagcacaatatcatattcgcgatgaagggctcgtcagagaacgtcatgctctgctcctgcgccctgaaaccattgcccaggcgccttatgtagaggcaacggcggtctacaaagtaggcgacccgttcgatcaactcaccattccgaaagtagccgcccatacgctcacccagttgtcgcatctggggctaggtctttaccccaatgtcatcaacctaagctgcagccctgcccaaggcaaaccccccgaagcagccagccgccatggccgtcgggcgatgaccaggcctctgccgctcaatcaggcggtctag

SEQ ID NO: 340651 - DNA, 1038 bp, Pseudomonas aeruginosa
gtgaagtggctagggagcgatcgcgatgccgctcgcaaaatcctggcaaccggtatgggctgtagaagtggcgatgaaggattgcggatcgcggcggtagctgagtgccttcgggccgcatcctatctgtcctctgtgcccagtacggatcgggaagattgggtaccagcaagcacgctaagtttaacaagccaggttcgcaggcgtttgcttccactgtggccgactctcgacgatgagcaagccgctgagccgggcgtcaaagcgattctggaaagcctcggagagctaggggatctggtgcgactcgacggcggacgttggctaacccctccgccacaggcgatcagaaccgagggctcgctggccgttgtcaccggcggtgggcctgcacaaacttttccttggccaatcacgatgcgcggggcagggcgactcaggctaatcgacgtaaatgcttgcgcaggacgcatcgacctctgggagccgcaggaatggattggcgcaccgctcgaaggattgcaagaatggtcgatccagttattgacgaatgccaaggaacaactgaaacctgcattggatgagcttgcggacgtttcactccgcagcaatggcaaatggatggcactgtctgcctgcgggaccgccgagggtctgttccttgccaaatgccttacaggtcctcggtacgaatactttgtggttctgatgtcgcgagggcatctgcggcaaatgtcgggactgcgacgggagcaggctagacgcttgctgttctacctcgacgcacaagccggtcatcccctgaaagttcaagcgcaggtgtcgcaatcactggttcgactgcgcctgaatcgtcatttgccgagggaagaggcacgcgcactactgctaggctggcaatcaccgccgcatataggtggcggcacaaccgcgacccactatgtaataccgcgcgaaatgtttccgatcgtgcgccaagcacttacaggtctgagcgtgaacctgactgagcgtgaaatttcagaggaacgagtataa

SEQ ID NO: 340652 - DNA, 1836 bp, Pseudomonas aeruginosa
atgattaccgagtttatcgaagaggtaccccatgtctttcgcaagtcattcttcgaccgccaagcctcgatccccgggtttaggcgcggttccccgccagaagtcaaagagaaacaacgacggttgatcgggcacttggtgcatccccagccgggtcagaaaggggaggcggactggcaagccttcgctagcttgtgggtggcatgggcaaagagccgcttggactgcgcgtttcccgctgcagacaagtttccccaatcggcggacacaggcgctgatttcttcaaacgattggctgagttgtacccggacgcccctcgggaaacggtcgagcgactggccgtgtacagcggtttcgccgaagatccggcgatgcaggcagtcctgaacagctttcatccggcgtccaccctggccaggaatcgaatgatcgatggcttgccgggacgtttggataaaattgagagttattttgaattggcggaaacggcgaccgaggagaccgctgagcacatcgatcaactggaagtgactgtcactgcaacggctgaagcagttaaacaactgactggcagtttcgctagtgttgaccatgatgtcgaagcattacgtacagcgctacacggtatcactgagcgcttgcaacaactgagcgaactggctcagtcaacggccagggcgcagcaagaggtatcgcaagcgatcgcgcgctcagacctccgcggcgagcacatgtcgactgcgctggactccctctctgttcaggtcacagacctggtggcggaacgcgcgcaggtcctagctttcgaggaagcactgaccacacttggtgcgcgtattcccgattgggagctcacggcagccactattgcagcgttgcgcgaacgcctcgacgaccacgattttcgggttgccaaaccacgtgacgagaccagtggccatacacgcgtccgcttgatcgagaacgaagcaaccggtccgttcgttgaagtcagttccgtggatgtcgcctggaaggtcatagccaacaacctgcaggcatgcggtgttgtgaaaaatgatgccaatcgttgcgctgggcatatcctagcagcagttatttccggccaactgatccagttcaaagggtcgacggctgacttaatagcagatgccgtggcagcagccgtaggaggggcgattttccatgagtggcgggttcccgtcggtcttctatcggaggacgccgcggccgactgcctcgaagtagtgtacgagtcgtctgggtgcctactgctcaagggggccaaccggtctgcgtttgaggtgtatggcagtgccatccgtgatcttgtagcgcgtcgtcagttcaccctagcggtcgatgcgcgcctagtgctgatagcgtcttggactcatggcccagcagcatttccagacggaggtacgttgtctgaactcggccccgtgtttgatacggatgaattatctatgcgggggttatctgcccaactgccgctgatgcagttcggccaccttgctgtggatgactggagagtcctgcacagtcctgctgaaaacacgcaattggcgttaccgagcacattgagggagcgccttgcacaggtggactttgttccagggaatctgtggctacgggtcgctgaccgggcgtatgcccagttgcgactgctatcgccaggccctgcggagcgaacgctccatgcagtgttgaagcagtgggcactgccatgggcgcaatcccttggtgggccggtcgaggcgctaacgcgcagcatcatcgaactccagagtgaaatcgacacgcaggcggtccatgcggagcatgtcgagtga

SEQ ID NO: 340653 - DNA, 1647 bp, Pseudomonas aeruginosa
atggattgcgccatagacccagtcgagaataaattggttaccgccgatatagcgtcacgcaccggctattatatctgttcctactgccgcaagcgggtcggacttcgttcggggccgtcgcgaaaaaactacttcgcccattggcgtggcgtgtcctctagttcctgcccctatttcatctcgggatcattaggtcacgtcagtcatgacaaggttcaaccacttccaacgcggcagatggacctgcgcttgctgataaaaaaaggtgagaacgccggggcatggtggattgaaatagtcctgcccccctgtcgagcgtgtcatgccttcgtcaaactcgatgttggcggcagggtacaaaaactcgatatgcgcgggatgggctcaggcttcagggtcatggctgagcctacggcgaacgactacaggatcatgtccttcgaaggcgagccggacccttcgttcgtagtggaagttgcgcggacctgcccaggtctacctgcctggggtgcggctgcattcaccgccattggtcgaggcgccgaaagtgggtttccccgcgctcaagcgctgaatcgctgcgaaacctacgcactgctatggtcggcgccggtgaccccggaattccccgaagaactgcttgtggataggctcaagtcacggcaaggctggaatttggctctggtcaccgtaccggaagccccgtcagacatctgcatcagttggctggaagactttacccaactgagcgtgatgccagcggcgcctgcgatcacgaccatttggccgttcctgagccgcaacgcgagcatcaatacggttgaatatatcgagtccgacgcggtcatcctggccgctcataggatgccgggtggcccgcatgacggcggaccaaccttgcaagccgtcaatcagcatgattgcatttccgcaacagcccccgatcgatcacccgcattattcaccgtgatacgagctggaagcgatgaattcaggatcggcaagagcggtctcccagatgtcgacaagttttttttcaagagcacgtcgctggggcgaagctttaaataccctacggtggacctggtcttcattgacgagcgtaacgaacgctttgttgccccattgcacagcagacaaagccaatcctatgtgatggccacgcgagcgggggaactacattttgactccctcactatgccgagaggggccaaaggcagactggaggttgtctcacccaatgggcacaagcaataccgccgactggcgtctagcgaagtgtcggctgaccactcaccacaggcatgccagttgccatcggcaatgaatagtttgctcaaagaatatctcactgacccgcaataccagttctatttggactttggcggtttgggccggttgtccatcggggcgatgcagcagttggccacccacacacccgcttttctgtcgctcgagcgatccttacgcttgcgcctgcagagctttctatcccagctacacgtcggtggggtaaccgcactctctggcagtgatcaggcattggtcagcgcgtttggcgcatcagtaccgaggccggaattgctcccgcactaccgccaactggcggctgctgtgcgcgcctgtggatttgatgttcgttattaa

SEQ ID NO: 340654 - DNA, 1221 bp, Pseudomonas aeruginosa
atgccaatcggcagagcgattattattggagtcaatccgagagaagcaaatctcaaacgaaaagtgcgagagcatttgcatcaattaggtttcacgaggacccaggagggcgcgctatgcccgcctggaaacggtaaggaagcgatccgcactttacacggcggccaacgtgaagaacggctcagcgccagtacacgcttcatcgagcgcagcggtgccaaactaatgcaatattttgcagatggccgcgagattattccggaaaaaatttctccggtgcttgagcgcgtctcttccggcacgtggcaaagcgacctgttccggttggcgtcactgtcgtggtctgtccctgtgtctaatggttttggtagacgcttgcgttaccttgtctgggaccaggcgaatggcaaactgatggggttgattgccataggtgatccggttttcaaccttggcgtcagagacaaattcatcggctgggatactgcggacagggctgcccggctggtcaacttgatggatgcatatgtccttggggcggtcccaccttacagcgccttattgggcggtaagctggtcgcttgcctgcttcgtagtcgggacatttatgatgattttgccagtgtttacggaagttctacgggcatcatctcgcaggccgaaaaaaatgcgcgtctgctggcagtcgtgactacctcgtcgatggggcgttctgcggtctataatcgattgaaactggatggcacggagtacctcaagtccatcggttttaccggtggctggggacatttccatatacccgactggttgtttattgagcttcgagactatcttcgtgaactcgaccatcattatgcagaccaacacgccttcggccagggccctaattggcggttgcgcaccacgcgtgcagcactgaaggcacttggctttaaggacgacctgatgcgccacggcatccagcgtgaagtcttcatctgtcaattggccgacaacgccacgaagctactgcattccggcagtggaaaacctgacaccaaatcgctgttgtcggtaggtaaaatcggtgagttagcgctgaatcgctggatgattccacgttcaaggaacaggcccgaatttcgcgattggaagccgacggatctcattcacttgtacggcagccaagcgtgccatttttcagccctcagccacctagccccgcgtcgcgttgcattttag

SEQ ID NO: 340655 - DNA, 171 bp, Pseudomonas aeruginosa
atgtcccagcgcaagagatacagtcctgagttcaagcgggaagccatcgagctggttcgccgtcgcgctgggttcgagaggcacagtctggtggagaaaaagcctttctcggcacgggaagcccgcgagatgaggaacttgctcgtctcaagcgtgaattggccggaatga

SEQ ID NO: 340656 - DNA, 393 bp, Pseudomonas aeruginosa
atgcacgaggatctgctcgaagaaggcgaaaccatctgccagcaccgcgttgcccgcctgatggcggcagagcgcattcaaggctggcggcggctatggccgagcaatccggacgacttgctccaagccgcaggatggaacgtaggtgacaccctagaactggagcaagacccgaacggcagcacggcgatccggctaagtgtggtcgtgaaatgcaacgtgtgcgacgccagtacggttgaggaagggcacggagtcctgcaggcgctgtggcgtgatagcgaggctgagagcatgcgcttgtgcaagtcctgcttcaactacgcgatggccgcgctcaggggtgagcaccgggtgagtcatctattcgatgacgagggatcggatcagtag

SEQ ID NO: 340657 - DNA, 561 bp, Pseudomonas aeruginosa
gtgaaacagctccagcaggagcgcgacggcgtgaccccgaagagcaaggcgctcgccccagaacagcagaagatccaggagctggaggctcggatcaaccggctggagcgggagaaagcgatcctaaaaaaggctaccgctctcttgatgtcggacaaactcgatagtcggtggaagtggtctgttcagctttcgatgtggcgcggtcttgctactacgtccaccgtcttcgacgtcgtcgggtcgatgcgcgccgcgttgatgcgtgagctgggcctggtcagcaagcaaccgggctcgcacgcctatagacaggccatggttgagcggccggatatcccgaatcggctgaaccgcgagttcgcggtccagcgtcccaatcaggtgtggtgtggcgacatcatgtacatctgggcgcaaggccgctggcattacttggcggcggtgctggatctgcaggcacggcgggtgatcggctgggcgttctcggccaagccggatgccgagctggtgatcaaggccctggacatggcctacgaacagcgcggcaagccacaatag

SEQ ID NO: 340658 - DNA, 126 bp, Pseudomonas aeruginosa; identical to SEQ ID NO: 329847

SEQ ID NO: 340659 - DNA, 1374 bp, Pseudomonas aeruginosa
atggacacgcccgttaccttcgattggaagatccgcctgcccgacgtgctcggcgtactccgccgagactatgccggacgcttcccgcagttggcctccgccgcactggagacgctgctggagcgcctgcgcgacgaccttcccgaggatttcctgccagccctcggccaggagctggaatccctgggactggcgttggtggaacgcctggacgaagacgacagcctgaacctgtatgtggtcggcgccacccacagccggcgcctcttcgatgcgctcgcagcgcagggccacaacgcccgcacgctgcgccaggaagacgcccccgagggcgcccgggcggccctccccgccgccgcgccggccggcctggcgccggcttcggcctacatctgcctcgaacacgccgagcacctggcgcccggcctggccatcgcccgcctgccgggcgaggacagccgcaacctgctggacctgcgccaatggcccaggctgcaacgcctgcccgatggcgcggaggaaacccagggcgcgttgctctgccgggccagttcggcggacggcctgcacgcctgggtcaggatgacccgttcgggaagcccctacgcctggctgcatcgctcccgcgacctcgcctcgttgacgcccgaactaccgcccttgccgctgccgccggcgcagtcgttgcgccaacgccgcaccccggaacttgccatcggcctggccggggacgacctgctcctggccgaccgcggcctgctcttcctctatccgggcttcgcccagggcaacgacgaaccgcggttgctcttcgaggtgccgcaagcgcggcgctccatcgagaatccgccggcggtcttcaccactccggaccagcgcgtctgcctgctctcccgcgggcagttcttcgaatggcgcgaggcacgcatccagcccctgccgttccccgtcggcaaggatctgcccgccgatccggcgcaaccgacctcggcggcgcccgggaccatcgtctggctggagcgtgaaacgctctgcgaaggccggctcgacagcggcgagatccgcagccactcgctggacggcctggccgaaggtccctacctgaagctccaggccctggacggaggctggctgctcctggcaccgtggctggaaccgcatcgctcgcgggacctcgcccagctctggcacctcgaatccggccgggcgctgcgcatccgctacggcgaactggacctggagggcggactacagcactgggcggagctgcccgacggccggatcgtcgtcggcgaccatgcccggcatgtcgacctcggcaggttcgaaagcctgcgccaacgcctgctgcggcggcgcctggcgccggcctga

SEQ ID NO: 340660 - DNA, 309 bp, Pseudomonas aeruginosa; identical to SEQ ID NO: 332811

SEQ ID NO: 340661 - DNA, 1719 bp, Pseudomonas aeruginosa
atgaatgaatggttctccgcacagaaactggtcggcctgcccggactgcctggcacggttcaaggcatcaatagtcgcgccatccgcgactcatggcagcaaagaaaacacatgggtagaggcggtgggcgtgagtaccacatttccagcctacccgacgaaacccgcgccgcactgctgaacgccgccctgggcgaggtggccaccaaggtggtccgccaggagacgcagctggccctggtcgaaaccaaccgccagcagctggtcgccgatgctcggcagggggtgctgcacgccctggacctgatgatggcccgcaccggctacagccggaagcgctccatcaccctgatgctggacatggcgcgcctcggccaggtcgagccgcagctgctcgcgatgctcaagatggcccgcgatcctcgcggccgcccgagcgcggatggcctgccgagcgtgcgcagcctggagcgtttcctggaccaggccgagcgcggcgccctggtgccgaaggtccgccgcccggacatgagcgttcccgactgggcgccggccttcatgacgatctaccaggggccggagaagcgcagcgcccgcgctgcccatgcactgctggagaagcactggcaggggcaaatgcccagcctggaccaggtttatgcgttcctgcgtaaggtcggcaacgtcagtcgcgaggtcgggcgcatgggtgagcatgaaataaaggcgctgcgcccgttcattcgccgcgacttcaccaagttgctgccgaccgacgtctattcctgcgacggccacacgttcgacgccgaggtccagcacccgatgcacggccggcctttccggccggaaatcaccaccatcattgacatccgtacccgccgcattccgggatggtccaccggcctggccgagtcggccctggtggtggtcgatgccctgcgcgacgcctgcaccaagggcggcatcccggccatcttctacgttgacaacggctcgggctacgtcaaccacatgatgcgcgacgaggcggtcggccttatgggccgcctgggcatcgatatgaagaacagcctgccctacaacagccaggcgcggggcgtgattgagcgcgtccaccagagcctgtggattcgggccgccaaggaactgcccggctacatcggcgccgacatggaccgccaggccaagctggccaccttcaagctgacgcgccgggccatcgccaagggcggcaccatgccgctgatgtcttgggaatcttttgtcgcgttctgcgaacagcagattgccgaatacaacgaccggccgcacagcagcttgccgcgcatcgttgacccgaacaccggccgccgccggcacatgacccccaacgaggcctgggcgctgcacgaagcggagggtttcagcccgatgcgcgtcaccgacgacgaggcccggccgctgttccggccccaggtgctgcgcaccgtccgccgctgcgaactggagttcatcggcaaccgctacttcgcccgcgagctggaggaattccacggcgaccaggtggccgtgggctacgacatccacgacgccagcagggtgtgggtctacgacggcgagggccgcttcctctgcaccgcagagctgaacggcaacagccgcgactacatgccggcttcgtatgtcgagcgtgcccgcgagggctctgttgcaaagattggcggcagtcagaggtag

SEQ ID NO: 340662 - DNA, 603 bp, Pseudomonas aeruginosa
atggtagagtccgtccctttccaaaatcgctgcggagagcaagggatgcgcaccctgggaattctcgtgctgctggttggagtcgtgatgctcatcagcgcgctcgccatggacactactgtcggcaccatgtctggcgatcgagtgaacaacataggcctcattgctgccagagaacagagaactatcattgccggcattgcactgattataggcgtgctgcttgtagtccttgggaaaaggaatgtgcctacgccttcagttgcctttgacactcggtcatgtccgtattgcgcagagactatcaagtgtgccgccgttaagtgtcgattctgcggcgcggatgtggaagcgattccggctcccaatgggccgcctcctctaacttatgggtggacggtgaatatcgcatgtaagcccggagaagagttcgatgggcgtcttgcgaagcttgaagaacttcagttgccaatattctccagtgctgagtccataattgtggttggcccatacgcggagaagaaaaaggcagactcagtgaaaagaaggcttagtgcagtccactatatgcatggagaactggactggatagagaggaagtag

SEQ ID NO: 340663 - DNA, 1443 bp, Pseudomonas aeruginosa
atgaggattaagaaatgtatatcagccctgaggatatcgctttttatggcgtgcttattgccctcgctattctttgttcagggcgctaggtctgaaaattattactggcaattaaatggcccgaccgcccctgataagtttggcagtcctggtgcggcttgtgaggtcgggctgggaatctataaggctcagtatcccgccgtcgaaatggtgataggttcgcgggaaatgaagaactcgaccaactatgtgtgcatggtgtttcgttatttcaatgggagtcgtattgagccaaattttacgatttccgttgttcgtagaggtacgacctgtcctgcgggggctacgtacaatgagcagaaggggacttgtgatgagccgccaccgtctgagtgccaagaaggtctgccaaatttatttagaagttcgaactatccgattattgttatcaatggaaaaaacacggttcctagctctccgccgtctggctgtttgaatgggtgcgcttatgaggctgatagttctcgaccaaattcttgttatcgcactccaggctctactactgaggggttctgtaactacacactcaagagcaacggtcagaattgcgcgacagattccggcaacctgggcggtactggtccttcactcaacgagccggatcagccgccagtcactgatccgccttcggacccgaatgacccgggctgtccgaaaggctatagctggtccggcaccacgtgcgttaagacgccgaccgatcccacggacccgaccgatccgaaagaccctggtggtgatggcggtggaactggtggtggcgatggtggcggtacaggcggtggcggtgatggcggaacgggcggcggtgacggtggtaccggcggcggagacggaaacggtggaactggcggtggtgatggcgatggcggcggcacgggtggcggtggcgatggcgggggagacgggcagtgcgatccggccaaggacccgaacaaatgcggcagcggctcctcgatctccggcgacggtgactgcaaggtggcgattcagtgcaacggcgacgcgatccagtgcgccatcgttcgccaggaaaaggccgcccgctgcgcggacgaagagtttcgcacggtcgatgacaagaagattcaggacctgaaaaacacgctggccggcgagttctccgggcctgagtacgaacccatcaaggccaccggcgagaacacccatgacctgtcgaagctgctcgacactagcgggcgcttctccaaggcctgcccggttattcctgacgtctcgttcccctggttcggcagtactcagacggtgtcgctcagtagcgtgtcgtccgatctgtgcacgtatctccagtggttcgggtatctgcttgtcgcgttcgccatgcgcgccgcggctgaaatcattgcgcgagggttgaactga

SEQ ID NO: 340664 - DNA, 666 bp, Pseudomonas aeruginosa
atgagctacggagtattaattcgcggggatgctgggcaaacaataatcgacgatagtaatccgtgcattcatttcgctgcgtcgggaacttatggacatacgaccggcagagaaactgttattcaatatgcctttccaatacagtccccgtatgagccgtatgtcttcgtgcgcccaaatggtccgcatcaaatctatttgttcaggcatatcggcgccccggggaactggactggatttgcattctggcagacgatctatcgggacgtggaccctccaatctacggcggaaagtggaaagctggcgcggtcatgttgccgaaaaccggtgggtggggaatgcaggttttcgactcccagtcgcgtgtgatgttcgacagtaaccgggacatcgttcgctatgtcggtggcgcacaggtttggaataagtattcgtacaacccgagctggccaggcgggatggcactacaaacgtggtatctgccgttcacatatggagttgaggcctacttccaagtcagccatttcaatgtcaaagcattcataacgttagaagcgccgcgcataggttttcttgagaactcaatgagcttgatatttgtttcatcagttgtagagtttgaaactaaccatcagttcaattggccgcttattgtagtggcgtaa

SEQ ID NO: 340665 - DNA, 1011 bp, Pseudomonas aeruginosa; identical to SEQ ID NO: 50915

SEQ ID NO: 340666 - DNA, 399 bp, Pseudomonas aeruginosa
atgatggcttgtttgtcttggcttgaaaagctcaaggaatcattcgcttccactggtctggactatgaagacctatacgagctaatagaggcatctataacgaggaagaggactaacttccctgcgtttataaatgaggcttcgaagggggttggcttctctgtgggtgagggacatttctactctcttgatcaggactgggatgatcctgaagagtttaatgaggtcagtttctttttgggggaagtggaggcctcaagtattccactgctcgactatgtttttttgatgaagattgcagccgatgtttattctgatttcttccccgaggagagggatagtgttctaagttcggctaaaaaattggaggagcgttactcaaagagattcccggtctag

SEQ ID NO: 340667 - DNA, 438 bp, Pseudomonas aeruginosa
atgcacaccatagattcaattacctctgaggttgttaatagcctccctgaaagtctaaaggagctggctgtaagtttcggagccgacaaggtagttgagctaataagcaaagttggcgggagaacttactatgtcgccgaaggcaagacggcaaagggacgggaaaagagaaaccaacttgccgagatagtaggggtggatatcgaggcgtttattaatgaacgctaccaggggaaagagatttacttcccaaggatgaagaagatagaaacgctcgcccgaaataatcgaatcaaggcgaaagccgaagagatgttgggcaaaggcatgtcaatgagagccatcgttgcccagttggcgcatgactttagcctgagcgagcgaagcctctggactgtcctaaagcagccacttgccccagccggcgaggacgcttga

SEQ ID NO: 340668 - DNA, 399 bp, Pseudomonas aeruginosa; identical to SEQ ID NO: 340666

SEQ ID NO: 340669 - DNA, 1167 bp, Pseudomonas aeruginosa
gtggaaaaataccgagaaaccttagatcctcaatttcttgagctaatcatcaatcagcagataagtctaattgcacgatatggcgtatctgacaactgtaagaaatattttaataagctaccgattacaattaggcgctccgatggctctccgcaaacgggtaagacagtctggcatgaggcctatttatgcgttgccgaagttgaagacatggtgagggaaaccatgccaaccaaggtttcgcacacagctcctttcaaattgcaggccggcaggtctcttccttcgtcggaactgatgtatctcatgcccatccgccccttaattgaagagcggaatggtggggttctggatgtcgcgcgatactttgccgtaagtcgcgcctcgccccttgatctccatcttcatcttggcggtcagccgaataatatttttgctcgctatggcctgacggaagaggatcgatcactgagcctgaatacacactccctgcgccatctgcaaaatggtgaactatttaggctaggagttgcggacaccattatcactaagcgcttcaatcgccgcagtgtcgctcagagccatgtgtatgatcatcgtagcctaacagaagcgctttcagatattgatctacccgccggggctgacactatttctccgcgcgctcaagaaacactacgtatgatattggccaataagatacgaggaccgatagtagacgagtttttagagattcagaaagagatgggggatgatgtggcattccagtttttgtccgcagaggcggatggtctgcatgcaacgccatatggcttttgcgttaatagcttcacggtggacccctgccccaaacaccttcaatgttataatggctgccggcatttaactcgttcaggaattgaagaggagaaccaaagcttaaaaaaactaagagggcgacttcaggaagctgtagagttaattaataagaccccaatagagtctcgaaacattggatggcagaatcagttgcgccatgccgaaaacagcctggctaacttagacaagtccatttcaactgctccaggtaataatccatttcctgatgggccagacctctaccgatccgtagatgcggcacgaggaacgaccttgatggactccgcaataataaggagtaaagaatga

SEQ ID NO: 340670 - DNA, 1398 bp, Pseudomonas aeruginosa
atgccgcctgctgcatttgagcatatgtggagtacattaaaatctggccgctcatggatggggctagtaaaaaatcgctgtaaaaatggcgaccactattgggtaagtgcttatgtaacgccaatagctaagaatggttcgattgttgaataccagtctgtaaggaccaagcctgaacctgagcaggttttggctgcggaaaaattatatgctcaactgagaagcgggaaggccgcgaggccgaaatgggctgctagcttttccgtgaaaatactcttgctcatatggggtagtattatatcaagcgcaatggctgccggcatgcttactgatacatcaataagcagcttattgttagctactttaatgtcaggaagcttaagctctgttagtgttttggctattctctctcctcttggaagactggttgaaagagccaggaatatttccaataacccattaagtcaatccctctacactgggcgcaccgatgagtttggccaaatagagtttgctttacgaatgatgcaagctgaaacaggcgccgtagtaggtcgcataggtgatgcatcaaatcggcttagcgaacacacccgaggcctactaaaggatattgagtcaagcaatgtacttacagttgagcagcaggcagagacagatcaaatagcaacggcagtaaagcaaatggcggcaagcattcaagaggttgcgagcaatgcacagcatgctgcagatgcggccggaagagcagacactgagacggcatctggccagcgtctggtagcccacacaagccagtcaatcactgcccttgaaggtgaaattaggcaagccgctcaggttattcatgagcttgaaggtcaaagtaacgagatatcaaaagttcttgacgttatacgagggatcgccgagcaaacgaatttgttggcactcaacgcagcaattgaggccgcgcgtgctggtgagcaggggcgtggttttgctgttgtcgccgatgaggttcgcagtcttgctgctcgcacacagcaatcgacaacggatattcaaagcatgatcagcgctctacaagagcgagcgcaatccgctgttacagtcatggagcaaagtagtcggcaagcgcacacgagtgtagctcacgcagaggaagcagctacagctcttgatggaattggccaacgcgttaacgaaattaccgacatgaacgcgcaaatagcgactgcggtcgagcagcagggagcagtaagtgaagacatcaaccgcagtattaacaatatacgcgatgctgctgataccaatgtacagaccgggcagaataatttgcaaagtgcgaaatctgtcgctcagttaactagcgctctgagcgaactggcaaaacagttttgggaaaaacgaggataa

SEQ ID NO: 340671 - DNA, 1146 bp, Pseudomonas aeruginosa; identical to SEQ ID NO: 331510

SEQ ID NO: 340672 - DNA, 186 bp, Pseudomonas aeruginosa
atgagatatagcatttttgattttaactacaacaaagagagattagagataaagaaagaattcaaacttgatttgaccattgcaaatggtagaatagcgaaaattatttcgcataccaaagcgataataaaaagaaaaatttcgttatcactgatggtcttgattttttcaaagataataaaatga

SEQ ID NO: 340673 - DNA, 594 bp, Pseudomonas aeruginosa
atgacagatataaaaaacattctcattgcctacccgcctgaatttctttgctatgagaaattgaagcggaaaatcgacacgtacaccagtcaatcaggtgagattgaactggtgtgctttgatgatgttaatgagtatgtgaaaaggtgtgctaaagaaaaagattgcgggatgacgtttttttcagatcctattgaggcggtggagaattccactcacgcaatcatttttgaagatagagaatgcttcgctaagctgcgtgaaaatcttaaagagaagaatattcgctttaaggtcgtgcctcttgaattaaccctagtcgtcaataaagatcgagtcgatacatacgatgtttatattggccgggggactgtgtggggtaatccttaccagatcggccaggatggtgatagggacgaggtaatacgaaaatttgcgtatgattttgaacggggctttttaaaggtgcatcaagattttgaaatgcacctgagcaaaatcaaagggaaggtaatcgcctgccattgcaagccagcagcttgtcacggtgatgtgattgcagcttatgtaaattcactcgatgacggaaaatag

SEQ ID NO: 340674 - DNA, 681 bp, Pseudomonas aeruginosa
atgccatacgtttatcaaatgatctgcttagcaaactcaaagaagccgggggggcgctgcgttgccggaaagattccagaggggcagtatcgaaactactggattcgaccagtagcccccagacagaaccgcacgataacgctggacgatcaggcgttttataccggagaacatccggatcttcttgacctgataaatgtcacctatacgggtgtccagctggggacttttcagcaggaaaatcacgtcatcgacgaccggacgtgttgggaatatgtaggccagtttaaccgagatgacttgcacacattagtcgataacccagcacagctatgggagacgtcacacgatgatagctactcgggggttaatgaccgtattgcaggaactgtattaacccaaccaagacaaagcctatatttgattgagcctgaaaatgttcgtattcacgtttcggcagaaggtgctcaatggaatgaccacagattaagggttagagcattctttgattacaatggaatccactatggtttgatggttactgatcttgaattcgagactgaatacataaggctgggggctggctggtatgacgctgatgacatttcatatttcactgtgagcctaggtgaaatcgactcgcatggctatgcttacaagcttgttgctgcagtattctaa

SEQ ID NO: 340675 - DNA, 1557 bp, Pseudomonas aeruginosa
ttgaacaatgagacaccagagctgaagcccaaattctcagttccgcttcggcgccaagaggcagaatttgctggataccggtgcagtcttcgcgggtgtaacgaacccgctcacggccccgccctaggtagcagtaaggacgtcacagacgacgaagaagcaaaagcgatcccgcgaggccaaggcgcacatatttactcatctagcccagatggacctcggggccaaggcggtttaaacaaagataagctcgcaggagcaaacaactgccttcatgtatgtccaacatgtcataccttgattgactcggccaccagcacctatacagtcgacgttttggtggagatgaagtggctgcacaggattatcacacgagtaataaactcgcaccgaaacttggaggccaagcttatcgaaagcttcggaagcgtaggttctgcgcggtatagcttcgaagaatttctactagccaaaaaccctgcattgattaaagttaatggcgcagtccccaccaagccgaaaatcgatgaaaaaactctaaactcctatgttaatgaatttttcgccgagcaaaaaactgtaccacttgagttttcgtcggaagaaaggcggcatgcagtcaagaaactaaaagaaaccatgttcgaccactacgaacgcgccaaaagcacaccccccaaaaatacatatataaaatttctctatacactcaccgctataaaaatatcgggagagcacatccatgcaggagaggaataccatttcaggattaatctctttcgtgggtatagcttattccagagccatgttgaaaattcacagcttgcgcataaaattgggttcgatgtatcaggatcaaccagcttgggagtcatcgagttcgacccactagatgttcgactaagcaccagcctcaatacagccgagttcttacatgctgcgattaatggagcaaaaatctactataacctcgaagcaattgaggtagtagaaggcgtagaaagcgcgcgctggaagctgaatagaggagaagccgaacttcaatggaactcaagacatcgtcatttttcctcactcaaaagcatctatgtacgatgcttgaaggctcgtgttattgccaatgagcttggcatagactttctacccgactttaatagtgttgcttccaaaggtggtgttcggcccagcgatgtgtctggacttattgcatatggtctaaccgacgaaatactaggcgatgcattcaagagactcaaagctggcagtcttagcgagcgaattaaactcaagtctgcctggagtttagatagcgatggcgcaagagcgcatctagagtgccacttaatattttcccatcaccatgggaagtacaatatgtacacgcagctattttttgtaatcgccgttgaagagagccgagaaggaagcactctagtttctttgccagataacgaatgcatgcgcatcgattacatacttgagatgcctaaaatctcacctgaaggcgaagtcctacgagagctaaaatattttctcaaaatgggagtgagtaattag

SEQ ID NO: 340676 - DNA, 1191 bp, Pseudomonas aeruginosa
atgtctctcacagacaccgcactcaaggcgctcaagccgaaggatgcctcgtacatcgtcagtgacgatcgcgggctgtacgtagaagtgctgccgagtggcagcatcgtctggcgttaccgctatcggctggatggcaaacgggaaaagctcacactcggcaagtaccccgcccttaccctgaagaacgcccgcctgaagcgggatgaggcggcacatctggtggcgctgggccagtctccagcacagaaaaagcaacaggagaaagtggccggcgcagaagatgccaccgtggccgacttcgccgaacgcttcttcaaggacatccagtcgcgcgaccgcaaggatgtgaccatgcctcgccgctacctggagaaggacatcctgccgcacatcggcagcaagccggtccgggacattaccgccgaggatgtgcgcagcgccatctggcgcaagaaggaacaaggcttcgatgccgccgccggccaggtgcgcggcctgctcaagcgcatgttcgattacgcgctgacctgcggcctgatccaggccaacccggtcatggccctgccgatgcggcacgtctaccgcgccgccgcccgcgaacgggcgctgacgccggacgaaatccggcagttcctgcgcgccatgcaggcttccaacatccgtcgccagttcaagatcgccttccagttgatcctgatgaccctggtgcgcaagtccgaactgatgctggcgcagtggaaggacgtgcatctggacgaaggcgaatggcacattccggttgagaactccaagaccggcaagccgcacatcgtctacctgtccacccaggcgcagacactgttcaaggaactcaagccgctggccagcagtagtgactgggtattgccgggacgtggcaccctggccaagcccttcgccaacaatgcgctgaaccaggcgctgaaggtgtcattgcaggggcaggagatccccgccttcacgatccatgacctgcgacgtaccgcatcgacgctgctgcacgaacagggctgggtttcggatgtggtggaaaaagcgctgaaccacaccatcggcggcgtgcgtggcgtctacaaccgggcggagtatgccgagcagcggcgggagatgttgcaggcatgggcggactatatcgacgggctggcaccgtcggccaatttggtggtgtga

SEQ ID NO: 340677 - DNA, 1557 bp, Pseudomonas aeruginosa
atgaccagcacccaacaacgcgccgccttgcaacgacagatttggcagatagccaatgacgtacgcggcgcggtcgacggctgggatttcaagcaatacgtgctcggcaccttgttctaccgcttcattagcgagaacttcgccagctacattgagggcggtgatgacagcattgactatgcccgactgcctgacggcgtcatcactgcggacatcaaagatgatgccatcaagaccaaaggctacttcatctatcccagccagctgttcgccaacgtagccgccggtgccaacgccaacgaaactctgaataccgatctagctcgcatcttcgccgccatcgaaagctcggccagcggctacccgtccgagctcgacatcaagggtctgttcgctgatttcgacaccaccagcaaccgcctcggcaacaccgtcaaggaaaagaacgcccgtcttgccgccgtgctcaggcgtgtggccgaactcgacttcggcggcttcgacgccagccacatagacctgttcggcgacgcctacgagttccttatctccaactatgcggccaacgccggcaagtccggcggcgagttcttcacccctcagaacgtctccaagctgattgcgcagctggccatgcacaagcaggccagcgtcaacaagatctacgaccctgcctgcggttccggctcactgctgctgcaggccaaaaagcacttcgatgcccatatcatcgaagacgggttctacggccaggaactcaaccacaccacgtacaacctggcgcggatgaacatgttcctgcacaacatcaactacgacaaattcaacatccagttgggcgacacgctgcggaacccgcatttcggcgacgagaaaccctttgatgccatcgtatccaacccgccgtactcggtgaagtggatcggcggcgacgacccaaccctcatcaacgacgatcgctttgccccagccggcgtgctggcacccaagtccaaagccgacttcgccttcgtgctgcacgcgctgcactacctttcggccaaaggtcgcgccgccatcgtctgcttccccggtatcttctaccgtggcggagcggagcaaaaaatccgccaatacctggtggacaacaactatgtggaaacggtgatttcgcttgcgcccaacctgttcttcggcaccactattgcggtaaacatcctagtgctgtcgaaacacaagaccgacaccaaaatccagttcatcaatgccagtggcctgttcgacaagaaaaccaacaacaacgaactgtccgataaacacatcgaacagatcatgcaggtattcgacagcaaggccgacattgagcactttgccaaagcggtggattacgacgcgatcgctgccaacgactacaacctgtcggtgagcagctatgttgaagccaaggacaaccgcgaggtggtggacattgctcaggtcaatgccgctctgaaaaccactgtagcccggatcgacaagctgcgggcggagattgatgcgatcgtggccgagattgaagatggggaagttaaagcatga

SEQ ID NO: 340678 - DNA, 723 bp, Pseudomonas aeruginosa
atgagtcgaattgcacaattaatttcggaactctgcccagatggggtggagttcaaagcacttggggatatctccgaactcgtgcgaggcaatggcctgcccaaatccgtatttgcggaatctggtattggctgcatccactacggtcaaatttacacgtactacggaatttgggcgacaaaaaccatttccttcgtcgctccggaaacagccatgccgctcgccaaggttgacactggcgacataataataaccaacacgagcgaaaatattgaggacgtgtgcaaagcggtcgcatggcttggtgattcgcaaatcgtgacgggtggtcacgcgactgttatcaaacatcaacaagacccaaagtacctgtcatattacttctgcaccccggagtttttcgatcagaagagaaagtacgcgactggaacgaaggttattgatgtatcagcgaagagccttgcgaagattcgcattcctgttccaccgctcgaagtacagtacgaaatcgtgaaaattcttgacactttcacggagctggaagcggagctggaagcggagctggaagcggagctggaagcgcgtcggcggcaatataagtattaccgcgacgcgcttctcgcgttcaatgaacgcacagatagcgcaagcaagcaagcaagcaagcaagcaagcaagcaagcaagcaagcaagcaagcaagcaagcaagcaagcaattataa

SEQ ID NO: 340679 - DNA, 594 bp, Pseudomonas aeruginosa
atgctgaatgaaataggaaaattcatccgcggccgtcgatttaccaaagctgactatgtggaaaatggcatcaatgtcatccactacggcgaaatctatacgcagtacggtgtatggacggacaaggctatttcgcaagtcaggtcggacatggcaagcaccctgcgctatgcccaacctggcgatgtcgtcattaccggtatcggagaaaccgtcgacgatgtcggaaaggcgacggcatggattggcgataaagaagtagccatccacgacgactgttatgcctttcgccatgatatgaatccgaagttcgtttcctactgcatgcagacaacttccttcatttcggaaaaagcgaagtatgtggcacgcaccaaggtcaaaagactgttgcttgatggtttctcaaaaatccgtattccagtgccgccacgggaagagcaggaccgcatcgtcgccatcctcgataaattcaataccttgacgaactccatcagcgaaggcttgccgcatgaaatcgaactgcgacgcaagcagtacacgcattaccgcgacaagctattgaatttcgtggagttggaggaagccgcataa

SEQ ID NO: 340680 - DNA, 1143 bp, Pseudomonas aeruginosa
atgggcaagacgctcggggaagtcgccaaacaactcggagagaccgaaaaaaaggtgctgctgatctacgccttcaacggttcgggcaagacgcgtctttcccgtgagttcaagcagctagtcgcccctaagaatggagacactgaaggattggctgctgatcaatccgagtcgccgcgcaataaaatcctgtattacagcgccttcaccgaggacctgttttattgggataacgatctgactcaagatgttgagtacaagttgcgaattcaacctaattcattcacggactggttgctcacgctgctcagggatctggggcaggatggaaatatcgtcagatacttccagcactatgccaacgacaaattgaccccccatttcagcgaagacttctccgaagtcaccttctcgctggagcgtggcgacgatgaaagctccggcagcctcaaaatctcgaaaggcgaagagagcaacttcatttggagtgttttctacacactgctggaccaagccatcagcacgctcaatgtcgccgaaccggaaaatcgcgaaacccggcaattcgaccaactagaatatgtattcatcgacgacccggtgagctcactggatgaaaaccacctgatcgagttggccgtcaatctggcggggttgatcaagaccagtccgcccggcctgaaattcgtcatcaccacccacagcccgttgttctacaacgtgctctacaacgaactcaacgccaagacctgctatttactggagcggctcgaggatggcaccttcgccctcttggaaaagaagggagattccaacaagagtttttcctatcacctgcatctaagaaaaacccttgagcaagcgattgccgccaatcaggtcgagcgttatcacttcacactgctgcgcaacctctacgagaaaaccgccagctttctgggctacccgcaatggtcggaactcctgcccgacgacaagcaggcctatttgaatcgcatcatccaattcaccagccatagcaccctgtccaatgaagcggtagccgagccaacgccgcaagaaaagcaaacggtcaaattcctgctggacaatctgatcaacaactatggctattggcagcaacaggaaatgcagaatggttga

SEQ ID NO: 340681 - DNA, 3102 bp, Pseudomonas aeruginosa
atggttgagtacatcaagcccatcgccgagtcgaacaacttcatcgtgctcgacaggtacgtcaaggattggaaggttgccgaaagctaccaaagcgaaggcgacctggaacgcgagttcatccaagatctggtaaatcagggttatgaatatctgcccgacctgaaaacacagcaaggcttgctggccaacgtccgtgaacaattgcaaaccctgaacggcgtccgattctcggacggtgaatgggcgcgcttcgtggaaacctggctggacaagctaagcgatggcatcgtcgaaagaacccgcaagattcatgacgattacatccatgacttcgtgttcgacgatggccgtatccagaacatctacctgctcgacaagaagaacattgcccgcaacaaggtgcaggtgatcaagcagttcgagcaaaccggcagccatgccaaccgctatgacgtgaccttgctggtcaacggcctgccgctggtgcaggtagagctgaaaaagcgcggtgtggctatccgtgaagccttcaaccaggtgcatcgctacagcaaggagagcttcaacagcgagcattccctgttcaggtatttgcagctgttcgtcatctccaacggcaccgacacgcgctacttcgccaacaccacgcagcgcaacaagaacagcttcgacttcaccatgaattgggcgcaggccgacaacagcccgatcaaggacttgaaggacttcaccgcgaccttctttcagaggcataccttgctcaatgtgctgctgacctattcggtgttcgacgtcggcaatactctgttggtgatgcggccctaccagattgctgcgaccgagcgcatcttgtggaagatcaagagcgcctatcaggccaagcactggaacagcaccgaaggcggcggctatgtctggcacacgacgggttcgggcaagaccctgaccagcttcaaggctgcgcgcctagcgacggaactggagttcatagacaaagtattcttcgtggtagaccgcaaggatctggactaccagaccatgaaggaatatcagcgcttttcgccagacagcgtgaacggctcggacagcactgcgggcttaaagcgtaatctggacaaagacgacaacaagatcattgtcaccactatccagaagctcaataacctgatgaagagcgaaaacgacttgccgatctacggtaagcaggtggtcttcatcttcgacgagtgccaccgcagccaatttggagaggcacagaagaacctgaagaagaagttcaagaggttctaccagttcggttttaccggtacgccgatcttcccgcaaaacgcgctgggcgcggacaccaccgccagcgtgttcggccgggaactgcactcctacgtcatcaccgatgccatccgcgacgaaaaggtgctcaagttcaaagtggactacaacgacgttcgcccgcagttcaaggccatcgaaagcgagcaggacgagaagaagctcagcgcggcggaaaaccggcaggccttgctgcacccggatcgcatccgcgaaatcacccagtacatcctgaacaacttccggcagaagacccaccgcctgcaagcgggtgccaagggcttcaatgccatgtttgccgtgagcagcgtggatgcggccaagctctactaccaagccttcaagaccctgcagaaggacagcgacaagcctttgagggtcgccaccattttctcctacgccgccaacgaggaacaggacgcagtaggcgacatcgcggacgaaggctttgaagtttcggccatggacagcagtgccaaggagttcctggaagcggccgttgccgattacaacgcactgttcaagaccagcttcagcgtggacagcaagggcttccagaattactaccgcgacttggccaagagagtcaaagagcaggatgtcgatttgctgatcgtggtcgggatgtttctgaccggcttcgatgcgcccacgctgaacaccttgttcgtggacaagaacctgcgctaccacggcctgatccaggcctattcgcgcaccaaccgtatttttgacgccaccaagaccttcggtaacgtcgtcaccttccgcgatctggaacaggcgaccgttgctgccatcaccttgtttggtgacaagaacacccggaacgtggtgctggagaaaagctacgccgagtacatggagggcttcaccgatgtcgtcacgggcgaggcgcgacgtggcttcaaggatgtggtgggtgagttggagcagcgctttcccgaccccaccaacatcgtcaaggaatccgacaagaaagcctttgccaaactgttcggcgaatacctgcgcgtggaaaacgtgctgcagaactacgatgaattcgccagcctgaaagccttgcaggacattgacacgagcgacccgcaggcggtggaggacttcaagacgaaacactacctaagcgacgaagatttggccgtattgcaggcgatacacatgcccgccgatcggaaaatccaggattaccgctccacctacaacgacatccgcgactggctgcgccgggagaaagcctcggcggaaaaagaaaaatccagcatcgactgggatgatgtggtgttcgaggtagatctgctcaagtcgcaggaaatcaacctggactacatcctggaattgatcttcgagaagaacaagaagaccaaggacaaggtggctctgatcgaggacgtgcgtcgggtgatccgcgccagcctgggtaatcgcgccaaggaaagcctggtggtggacttcatcaaccagaccgacctggatgggctgggcgacaaggccagcgtgatcgaggcattctttagctttgcccaggccgagcagcagcgcgaggctcaggagttgatcaacgacgagacgctgaatgcagaggcggccagacggtacatcagcacctcactgagacgcgagttcgccagcgagaacggcaccgaactcaatgccctgctgcccaagatgagcccgctcaatccggagtacctgacaaaaaagcaaagcgtcttccagaagatcgccgcgttcgtcgaaaaattcaaaggggtaggtgggcaggtgtaa

SEQ ID NO: 340682 - DNA, 1044 bp, Pseudomonas aeruginosa
atgaatggcaaaaaattgatccgcaacagcacagccgagtttctgatcttcactggccaggccggcgaacagagcatcgaggcccgctacgaggacgaaaccctgtggctgtcgcagaagctgatggccgagttgttcggggtggacgtgcgcaccgtcagcgagcacctgaagaacatctttgccagtcatgagctcgcgcctgaggcaactatccggaaattccggatagttcagcaggagggccagcgggaggtgtcccgcgcggtggacttctacaacctcgatgccatcatttccgtcggctatcgggtcaactccctacgcgcaacgcagttccgccagtgggcgaccggcgtcctgcgtgagttcgccatcaaggggtatgtgctggatcgtcagcgcatggaaaacggcagcttcctgggcgaggactacttcgagcggctgctggcggaaatccgcgagatccgcctcagcgagcgacgcttctaccagaagatcaccgacatctacgccaccagcgtggattacaacaaggacgcaccaactaccaaggcattcttcgccaaagtacagaacaaattgcattacgccatccacggccataccgcggcagagttgatccgcaaacgggccgatagcagcaagccacatatggggctgacttcctgggcgagcgcgcccgaaggcaagatcctgaaaaccgacgtagccgtggccaagaactacttgaccaaggacgagttggattcattgggtcgtatcgtcaacgcctatctggagttggccgaggatcgtgctcgccgcaagattcccatgagtatggaagactggtccaagcggctggacgccttcctagaatttgatgaacgggaagtgctacagagcagcggcaagatttctgcgaaacttgcccagacacatgcggaaagcgaatttgagaagtacagaattgtgcaggatcgcctgtttgaaagcgatttcgacaaagcagtgaaaaaactgacggccggtgagtcaaacaccagagatggcggataa

SEQ ID NO: 340683 - DNA, 864 bp, Pseudomonas aeruginosa
atggacgacctgacctataccctgcgccagctctgcctacgcaaccgcgacggcagccacgccacccaggcggatcggcaacggtcgctgaccctggccgcccgtcaactgcgcgaagcaggcttccgccagatgcaagccacctcgctcaagggcaagcatgtcgaagccttgttgcagcgctggcaagccgaaggtctgtcggccggcacgctgaagaatcgtatggcgcacctgcgctggtgggccgaaaaggtcggcaaggcaggcatcctgccagcggacaacaccaagctgggtatccctgaacgacgctatgtgaccggcgaaagcaaggccaaggaactcgatgacaggctggaccggatcaccgatccgcacgtccgcatgagcctgcgcctgcaagcggccttcggcctgcgccgcgaagagtccatcaagttccaaccccgctatgccgaccgtagcgaccacatcgccatcaaggggtcatgggccaagggtggacgcgaccggacggtgccgatcacgacaccggagcagcgtgccgtgctggatgaggcccatcgcttggcaggcctgggatcattgattccatcacacaagacctacatccaacagcgccatgcctacgacggtcagtgcaaggcagcagggctgagcaacatgcacgggctgcggcatcggtatgcgcagatgcggtatgaggtgctgacgggatggaaggcgccggcggcgggtggccctgataaagctcagctcagtagcagtcagagaatgagtgaccaacacgcccgacagcagatcagccatgaactcgggcatgaaaggctgaaagtgacgtctatctatctgggaacctga

SEQ ID NO: 340684 - DNA, 1167 bp, Pseudomonas aeruginosa
atgtcacaccaaacctcggacatcatcaccccgaaagccctgttgctcgatgagcggctgacaccactggagcgcaacgcctggctgactttccgtgcgctggccggcagcgacagcaccgtggttctcagttacgacgcgctgcgcgggtacctgccgagcgcgccgggcagcaagcgggctgcccttgaaaccgtctccagggccgtgctgtgcctgcggctgtccacgtggattgcgctggtcgagtaccgccgcaacccgatgaccggcttctcgatggccagccgctacgcggtgcggaatcagcccctcgcgttcgacgacgcctgcatggaggacgaggactacctgcccttgctggaacgggcgctcggccatgccagtgcgacgattcgccaactggcacagtccattctcgacgaggctatgcgccatccagacaggttgggaaagctgcccgcaacaatgcaagtgcggatcaggcgcttgcaacaccggggcgatgaccatgatccgggcagtcctggtggtcctacttcgcctgatgctcgcgtgcccgaagccagcagcgacattccgaaacccgtaccggcgtctgcgacagcagtacgtactgtaaaagaagtattaaaagaagtacgtacgtaccgctcaccaaccgaagagcaggtatccaggtcagatgtgccagcccgcttccggcaactgccgcaggatcagcaacgggttctcaccgcgcgtctcaggggcttgcctccggagcaacgcctggcagtgctggccgagtggaacgtgcgctgcgaatcaggtagcgtgcacaacgccatcgcctacctctacgggttgatcaagaaggccgtggaaggcgtgttcaagctctgggcggcgcgcaaatccactccacagcagacacccatgcaggccatcagcaacagccagcatggctcgccgccggccccttctccagcgtccagcaaccaagccgcaaaacctgcgtcgcgcgaagtggcgcaacggcatctggagcagatccggcgcatgctgaagacgccatcgctgcccatcgggcagatcatcggatgcatggctgacagcggaacgctgccaacaggcccagggaacacgcatgctgctgcaaggctcgatccgctgggtgcgacgtaa

SEQ ID NO: 340685 - DNA, 543 bp, Pseudomonas aeruginosa
atgctgaacatcaacgaagaatccctgaaaaccgcaatcgtggcccaggtcgcggaccaactcctccgcgaggatggagacctctctggcttggtggcgaaagaggtgaagaagcgcatcgacaagatcttcgacgagcgcgtaactgagcagatccaaaaggcgatcgatgagaccgtgagcggctcgttcgagcgtgagtatcgccgcgtgaaccagtggggcgagcaagaagggccgagcacgacgattcgaaaagaactcgagaagaccgttaccgcctattggaacgccaaggtcaatcccggcgacggcaagcccagcaccagcgattacaactcggtgacccgtgctcagtggctgatgaccaagatctgcgccgaggacttctccaagaacatgcagacaagcgtcaacgcagtgactggggctctcaaggacggcctgcgcaaccacctcgccaggcatatggaccagatgctggatgggctcttccacatcaagagcctgcaagaccaggggaaagtcgcgaaaccgtactga

SEQ ID NO: 340686 - DNA, 516 bp, Pseudomonas aeruginosa
atgactgaatggcgcgaagtggttggttatgaaggactataccgagtatcagagcatggcgaagtcatcggggttatacgcaaaaagatcaaaaagcaattccccaatactagcggatacatgtcagtaggtctgtgcgccaatggcaggcagaagaacaccacggtccacaaaattgtggccttggcgttcctagataaggccttcgagtcgctagaagtaaatcacatagacggagataagctaaataatcatcactcaaatctagaatgggttacgcgcttggaaaatctaaatcatgcaaaaaagatggggcttcttagagagtccaccaaggtagtcgcaatgcccatagacggctcggttggatatttcttcgtatccatcaatcaagccgttaagagtggatttaataacggaaacatttacaactccataaacgggaaatccccaaatcacaaaggcttcaattgggcgaaagtgcctagtgaaatgcagataggtgaacagccatga

SEQ ID NO: 340687 - DNA, 276 bp, Pseudomonas aeruginosa
atggccacgatcgttaaaatccgctcctgcacccgaaacgcctttctcctcgaagaaggctatccgactacctcccaagccttccggaccaagagcactacccgggtacgccacgtcgacgtcgacgtgatgcgtaaccagtacggcagcaccaattcgcctcggttcggcgcagagacaaggaattcattcccgcaccgcgaattagcatcgcagagtcggcaagacctcttgaggggcactcgctttccactgttaggacatgcgcagcactga

SEQ ID NO: 340688 - DNA, 420 bp, Pseudomonas aeruginosa
gtgcacagcgtggtggtcactgcggccaacgtcgcggacgtaacccaagtcgacaaactgctgcacggtggtgagaacgtggtctgcgctgatgcgggctataccggtgtagagaagcgtgaagagcatgaggggcgccaagtcatctggcagattgcagcccggcgcagcacttacaaaaagcacggtaaccgcagcgcgttatacaaagcgatacgtaagatcgaaagagccaaggcccaggttcgctccaaggttgagcatccatttcgggtgatcaagcgccagtttggttatacgaaagtgcgcttccgaggcttggtgaaaaacactgctcagatggtgacgctgttcgccctgtcgaacatttggatggcgcgtcgacatttgctctccaatgcaggagaggtgcgtccgtga

SEQ ID NO: 340689 - DNA, 780 bp, Pseudomonas aeruginosa
atggcaaccaatgaacctctgcaactgaatctcggctccctgcgcagcgcgatgtcgctgaccctgcacacccatcacgcttcccgcatctggcacggccgcgccgccgccgaggggcgaccgggcatcgtcggcctgaacggctacatcgcccagatgaacaagatgcggcggggctcggagcaggacgacccgtactcggactggtggatgctgcgcatcgaggacaagctcgaccaaaccaaggtcacgctgcaatcgctgcgcgagcaggtggaccaggcgctggcgagcgtgccaccggcgctcagcctgggcgaaaacctcaacgtgcagccggtcaagctcccgctcttcgtcaacgcgcagctcggctttgccgcggtctatctcctggccgactacgacgacatcgcccgcaagctgatcctcgcccaccacaccgcgctcatcgaccgcagcaccttggaacgctggctcaacgagggcgcgcacgcgctgcgcagcctgttctcgctggcccagcagtatcgctactcgggctgcacccgcgacgatttcgcggcgaagaacgccgctgcgcgagtcgcgctggagaagtacggcgaactgccgcaggaggtgctggaggggacacgccgctcgaagtttgcgccacccgtcgtgcgccgtggcctgcaacagcgcggcgacggtcctgccacagcgcctccgcccagcgacgaagccgccaccgcagagccgcccgaagcgtcagccggcgaggacgagcccgcatga

SEQ ID NO: 340690 - DNA, 876 bp, Pseudomonas aeruginosa; identical to SEQ ID NO: 339017

SEQ ID NO: 340691 - DNA, 1245 bp, Pseudomonas aeruginosa
atggaacagtcatcccacttctcctggcgctaccccctcgcactcgcggccgtactggtcctgagcgcctgcggcaaggccccggaaaccacccaaggcatggcggcgcccaaggtcagcgtcgccgaagtcatcgaacaaccgctgaacgagtgggacgaattcaccggccgcctggaggccccggagtcggtggagctgcgcccgcgggtatcgggctacatcgaccgcgtggccttccatgaaggcgccctggtgaagaaaggcgacctgctgttccagatcgacccgcgcccgttcgaggccgaggtcaagcgcctcgaagcccagctgcaacaggcccgcgcggcccaggcgcggagcgtcaacgaagcccagcgcggcgaacgcctgcgcgccagcaacgcgatctccgcggaactcgccgacgcccgcaccaccgccgcccaggaagccaaggcggcggtcgccgcgacccaggcgcaactggacgcggcacgcctgaacctgagcttcacccggatcaccgcgccgatcgacggtcgcgtcagccgcgccgaggtcaccgccggcaacctggtcaactccggggagaccctgctcaccaccctggtcagcaccgacaaggtctacgcctacttcgacgccgacgagcgcgtgttcctcaagtacgtcgagctggcccgccaggccggtcgcgacacgcgcagcgagagcccggtgtacctcggcctgagcagcgaggacggcaacccgcacctgggccggctggacttcctcgacaaccaggtcaacccgcgtaccggcaccatccgcggccgcgccgtgttcgacaacgccaagggcgagttcaccccgggcctctacgtgcgcctgaagctggtcggcagcaagacctacgccgccaccctgatcaaggacgaagcggtcggcaccgacctgggcaagaagttcgtgctggtcctggatggcgacaacaagaccgtctaccgcaccgtcgagatgggaccgaagctggagggcctgcgcatcgtccgcagcggcctgagcaagggcgaccggatcgtcgtgaatggcctgcagcgggtccgcccgggcatgcaggtggatccgcagaaggtcgagatggccagcgccgacaccctggccaccctcgcgcgcctgcggcagtcggtcggcgacagcgaaccaccgaaggtggcggcgtccaaggacaacgccactcgcaacgagccgcgcggctga

SEQ ID NO: 340692 - DNA, 339 bp, Pseudomonas aeruginosa
gtgccgttggtggtgttcccggtcggcgcgctgtatcgccaggagatgatccatgccctggagagcatcgggcgtcgctggcgcatcggctattccagcgccagcctggccagcctggtggccgcggtcggcgccggactgggggtcagcctgctgccgctgggctgcgtcgggcccgagcatcgcctgcttggcgcgcaggccggcttcccgcccatcgctggcctggagctggtgctctacgcgcggcccgagctggacagcgccgggcgcaccctccgcgaccgcctgcgcgacctctgcgatgcacgcctggaagggttgcagggcgagcgctga

SEQ ID NO: 340693 - DNA, 957 bp, Pseudomonas aeruginosa
atgaatgcctccttgctcagcgagcgcagccgggtgttcgaacgtgccgacccctatgcggtgtccggctacgtcaaccggcacgtcggtacgcactgcatacgcctgccggccgccggcaggccgcaagccagcctcgaccaccgcaccttcgccagcctcgacctgtgccggatcagctacggcgcggcggtacgggtcacctcgccggcgctggaaagcatcttccacctgcagatcctcctgcgcggccactgcctgtggcgcggcggcgggcaggaacacgccctggcgccgggcgagctgttgctgatcaacccggacgatccggtcgacctgacctattcggcggactgcgagaaattcatcgtcaagctgccctgcgcgctgctcgaagcgatctgcgccgagcagcgctggagccatccggcgcgcggcgtgcgcttcctcgaacatcgctatcgcctggaccagttggaaggcttcgtcggcctgctcgccctggtctgccgcgaggcggagtccggcgagcggctggcgcgggtcgacagccacttcgagcagatcctcggcagcaagctgctgaccctgctgaagaccaacgtcagccgcgaggaccccggcgatgcgcaggtcgtcttcgcccgcctcgatgcctacatccgccgccatctgcagagcgagatcgaggtcgcggcgctggccgagcaggcgcacatgagcactcgctcgctgtacgcgctgttcgagcgccagcttggcgagagccctcggcaatacattcgccggctgcgcctggagcgcatccgcgcctgcctggaagaccccggctgccgggtacgcaacctcaccgaactggccctggacttcggtttcgcccacctcggccgcttcgccgagcaatatcgccggcagttcggcgagctgccttcggaaaccctgcgccggcgcgcctag

SEQ ID NO: 340694 - DNA, 1644 bp, Pseudomonas aeruginosa
atgaaccaagtgatgccgtgggacggcgaaatcatgcagatgggatggccctggcatgggaaaatctaccaactgcccaatactgagcagggggcggtacatctgccaaacggagaaacgaaaccggctcgcgcatggtcaatcaattacacgctcaatcatactcatctcgtcgatatggggcttccatctcaaccggatgagttcattgagtctcaaggcgggagttggtggggaagagccattctccgcggtggaggatactggccgcagctatactatggcggtggtatttcggctagcagcggcgcggaatatagcgaggttccctttatcgggactcctatctggtggctttcggacgaggctccgcgccggccaagctacgctatctatgatctaagggaagaggcgggtacaccgcagtttcgcctatgggttggaaatgacctcaacaccatggccacgctcgacttgggtgcagatttaattggtcagggagaagaacaaccagaatgcgctgtcagggcaaaagatgtttcatttgacggttggcagttgacgaacaaggtggtgttgagtgagctttcaatgcttggggtctatcaaaaccgtctccttttcggtgtttacgttcgaactaccgatttgtcaccaattgagcaaccgcctggaacatcgtggattagtggctcatcaaattccggcgctcccgcgggcttctatggattgattgaaatcactgtctctccgtcgatacgagatcctgatgcagatcgatccaaggtgctgacaatgaccgtcattgagacgcgcggtcaagcgatgggaagccccgctcatgtgcatatcgatgagtccagccttcctgaggaccctgttgtgacggcgagttatcgtgacgagtggactcagacctcggcattgatcacagcgtggtatgacgcacagggaaatgttcggtcggctagatataaccgccagcattatggtacgaggacttaccgatatgagcaggatgttgaacacagcaggatggagcgtgccagcgttcttgaacttataacggactctggacaagttgcagatcatattgagctgaaggaaatattggaggcgcaggcctcgcccgatactgggttctctgtgactcgaacgatccaatgcactggcgagtcagatgatgtgacgagcttcttgcaggccgatcgatatcgcggtgtaaagcttgatgcgccggcaacattccctccaggcctgcatgtctgcaacaccgtggtgagttacgagtggtttgacgacaacggggagaacctgcttgattaccaagatcaacatcaggtttggattgtggcgcttagcaacaatagcgccgcgctgtgccacgttcgcgaaccctacgactaccctgaaggacaatccacgacgaccgtgacggtacggcagggtgcggtagtgcgtattggcggtattacgtctggggcgatcactggcatcatcatcaaggagagggaggtgcaccggtaccttcgcggtttcttctggtctcctgccgatcgatggatacgtggtagctgcaaccctattacaggtgagctctcacggggggaggaatgcctgcaatactggacaagctgggtatag

SEQ ID NO: 340695 - DNA, 849 bp, Pseudomonas aeruginosa
atggcaatccttcgaaacgacaagctcgcgaatacacttccagggataattacaaacagccgattcactaattggctatgggtcttcttgaagcaccgctacccaataacgtatttaggcgagttcagaagcccgggcatgagagacagaatggcagacttaattataaatacgccaaacctaagccatgaaattgagcaaaaccaatcaagcatgctcctaccagaaaacaccctgaagtggattacagacagcaaaagacaacacacctggataaataacaatataaccggaagagccggatacttcttatcggacacaccacccaacctaccagatcgcgaaacaattattactaaaattgacgcatgggtaaccacaccaacaacaaaacaaatacagatttcacaaatagcatcagcctgggaactgcaaaaaaatgtagaccaggcattccaatggtttcatgaggaagacgaaaataaaaaatgcgaactagcatggaaaatattcatcaaagacaacccactattagctctcggcaatgacccattcaccaaccacgaagagctactaatttttttcgacaacacacttaaactccctgctgaaagaaagcttttcatccagacagttaaaagcagatggagccaaaacaagtatcgaaccaaagaaaccgacaaaaaacaatacaacttcatcctatccaaaaagaccatccagcgtcttgataagctagctgaaaaatatgacctaaagcgaactcaaatactggacatcctgctgcagatggaagaggacaaaggaatctatatcccagaaaaactaaagccactgaaaaacatataa

SEQ ID NO: 340696 - DNA, 669 bp, Pseudomonas aeruginosa
atgcttcgtttatcaatgaatcgtaatcttcacctgcatacagcagctacgtttcaagacctgccggtcatggttgataaaggcccttttatacttgagtacctggaggcactgagtcgcaccattaaccttgcccttgttcagtatcccagggtgtttgcattcagggtggacctgcgtctaccgcgttttgtgggtattccggatgacgctttgtcaaatcgtgtgattagtcgattcattgagtcgttcaaggcaaaaattgagcatgaccgtgagaaagcacgtgagcagcacaagtacgcccatgcctgcagggtgcgttacgtctgggcgagagaagtgggctggggagggcgaccgcattaccacctgctgatcctgcttaacagagacgcctactacacagtcgggcggttgcaatcacagaggcctaatatgatcagccgcatgcaagaggcttgggccagtgcgttggagtgcgaggttggtcaagtacggggcttggtggagatcccgaagaacgctgaataccgagtcgaccgggaggtccggccaggtaacgtggattacctacctgagctgtttcatcgagccagctacctctgcaaagctgccacaaagcgctatggagacggatctcatggcttcggatgcagcagggggtag

SEQ ID NO: 340697 - DNA, 1647 bp, Pseudomonas aeruginosa
gtgagcgcaggtaaaaaaggtcagatcgacagcgccaagattgtgattggcgatgtgttctcccgcttctggttccgcattccggactatcagcgagcttacgtctggggcaaggatgagatttccgaactgattgacgatgtgcgctacgccagcgagcacaacccggacggtcagtatttcctcggatcgatggtacttcgtaaggctacgcgcagcactgacggggtggactttgaggaatacgagttgctcgatggtcagcagcgcctgactacgctgatgttgatcctggcctgcatccgcgacagggtgacggacgaccaactcaaaggcgcctgtcgcgggatgctgtttcaagaggaaaacaagtggaagaggattccgggccgcaatcgcattgtctacgacatccgcgataacgtgggtgatttcattgagcgttatatcaaggccgacaacggctctcgcagcgcggatttgccgggcattgccgctcgcaaaaatctgtccctggctaatatggcagcgggcatgcagaccattcaagcatgttttactgacagcagtcgtttccccacggaggtagacttcgaccgtttcgttggctatctgctgaacaacgctctgtttatctacgtggccactgaagatctggatgatgccttccgactgttcaccatcctcaacgaccgtggcattccgctttccaatagcgacattctcaaggctaaaaacctgggtgccgttgccaaggaaactgagcgcagcaagtgggctgaatactgggaggaagtcgaaggcgagatgggccgcgacgagttcgaccgctttttgtctttagtacgtaccatctatgtgaaggacaaggcccgtgagggcttgctcaaggagtttgacgatcgtatctacggagccaagccgccactgctggcactgggcagcaagagctttgaagccgtgaaagcctacaaggatgccttcgatgaggcaatccaactagatggtctgccgacgagtctgggcaatgcctatcgcaaccgcatcaatgtgatgcgtcgtggcttgccaggcaccgactggatcccgccagtattggcttggtatcacaagttcaaggcagagaagttgctcgatctgatcgaacgcatcgacaacaagttttcggctgactggattgtgcagcttacgccgacccagcgcatcagcaacatgaatgaagtgctcagggtgatagaggcggccgagaccccggttgaagtgcttgccagcaaagccttcgacttcgaccgcaagccgttgcaggaattacttgacggtgccatttacggccggcgctttgcccgatatgtactgctgcgtcttgagtaccttttggccagccatgccgcgccgctaaacctgccggatgatattagtgtggagcatatcctcccgcagaatccgggtgggacgagccagtgggtcctagatttcagtgaggaggagcgggaaacgtggttgcatcgcttgggtaatttgatgctgctctcacggcgcaagaacacttccttgggcaatctggatttcgcgaataaacgagttcgctactttgaggatcgggtggaaagcctcccaaactcgcagcggttgttggcgatgaggtga

SEQ ID NO: 340698 - DNA, 1056 bp, Pseudomonas aeruginosa
atgaagcagcacgacatattcgattcgcttgccagaaacgccttcgacttcctggaacgagggatagaagagttcgacaagtcccccaaatattctgtgatccacttctgcgctgctgtggaaatgctgctcaaagcgcgcctgatgagggagcactggtcactgattgttgccaaaccagagcaagccaatcttgctaaattcatggctggagattttgcatcagtcacgatggatgaggcgcgcgcacggattcgtgatgtcgcgggcgaagacatcggtagcgatgcgttcactagctttcgagcgctagccaatcaccgcaacaagatgatccacttcttccatgctgacatggaggaagatgctcaagccaaagaactcatcgtcgcagagcactgccggtcttggtttcatttgcatggcctgttgctacggtggggcaattatttcagcgacttttggccagaaatttcccgagctgatcgctcgatgaaaaagcaccgaaagtacctgagcaccaagttcaagacgctcaaacccgaactggatactgcgcgcaaggctggccgaaaacctacgaattgcagtgcctgcggcttcaaggccgccatccctgaggatgaaattcacgatcagatcaaaacggtgtcttgtcgcgtatgtgattacgccggaacgcaagttgagatcgactgcccgcactgcgataaacctatcgttgttgccaatgaagggtatgcgagatgcgatcactgtcatggctcaattgagcctgagcatctggtagatgcactggccgatcatggcgcgatgcacagtgccatcaaggatggcgacgatagctgggagctggccaactgcggaagctgcgagggatatcagacagttgtacggctagacgaaatgtatttttgcgccaattgcttcgaactctcggaccacctggagcaatgcgaatggtgcaataccccgaataccggggatatggatggcagttacttaacaggctgcagccattgcgatggcagagcaggctgggagaatgacgattaa

SEQ ID NO: 340699 - DNA, 1038 bp, Pseudomonas aeruginosa
atgctcaaaagcgcaacgatcaaaaactttggcccgctgcccagcggcgagtacaagttcgctccaggcttgaatgtggtggttggcgaaaatggcagtggcaagagccagttgctcaagctgctgtatgccttgctcaagttgcaggccgacagcaaggagctgaataagacgacgctgcagaaggaatgtgccgacaagctggtgggggtatttcgcgcggatgcccttggccggctggtcactcgccgccagggacatgatcgctgtgaggttgccctctccatgcaggagcaaaagcaggatctggccatcagcttgtccacccgctctagcagcagcgtacagattgacgtgctgccgacggggaggcttgagctgtcgccggtctatctaccgacccgcgagctgctcaccctgtgcccctggttcgtaccgctgtacgacaaccaccatgtacccttcgaggaaagctggcgcgacacggtttcgctgttgggcaagccggcgctgaaaggcaagcgcgaggcggtggccgccggcctgctgcaaccgctggaagaggcgatgggcggcaaggtcgtggtggatacgcccagcgggcgtttctacctgcaggtacccggcgggggcaagatggaaatgccgctggttgccgagggcttgcgtaaagtggccatgctggctcgcttgatcgctaccggaaccctgctggagcagggctatctgttctgggacgagccggaaaccaacttgaatccgaagctgattcgggtgattgcccgctgcatcatgctgctgtgtcaacaaggcattcaggtgtttgtcgccactcattcgctgtttctgctgcgtgagctggaaatgctcagtgagaacgctgagttccgcaaagtgaagcagcgtttctttgctttggctgccaatgccgagggtatccagttggagcaaggcgacgcagttgatgacctgcagactttagtgttgctggatgaggagttgcgtcagtccgaccgcttcatggggttggagggctga

SEQ ID NO: 340700 - DNA, 504 bp, Pseudomonas aeruginosa
atgcccggctgcgccaacgcttgcctcgaagacctcgactaccgcagcctacatgggctcgccaaggcgctgatcctgcaactgagcagcggccagtggctacgcgacggccttaacctgatcatcggaggccccaccggcgtcggcaaaacctggttggcctgcgccctggcgcacaaggcctgccgggacggctacagcgtgcgctacctgcgcctaccgcgcttgctggaagagctgggtctggcccacggcgacgggcgcttcgccaagctgatgagcagctacgccaagaccgacctgctgatcctcgatgactggggcctggctccgttcaccggcgaacagcgtcgcgacatgctggaactgctgaccggcttgttgatacgttcgatggacgctatgaaggcggttacgcagcgtggcaagtccagaaaggagaagtacgcgcaacgactcagcagccgacgtcagcccccagtcgctttcaatggccggaagtga

SEQ ID NO: 340701 - DNA, 735 bp, Pseudomonas aeruginosa
atgaccgccatcggcaccattttcagacgcgagctgggcagctacttcgccacgccgctcgcctatgtgttcaccctgatcttcctcgtcctctccggcgtggccaccttctacctgggcgacttcttcgagcgcggccaggccgacctggcgccgttcttttccagcctgccctggctctacctcctgctgatccccgcgctggccatgcgcctgtgggccgaggagcgcaagtccggctccatcgagatgctgatgaccctgcccgtctcgcgcgccaccctggtcaccggcaagttcctcgcggcctggttctgcgccgggctggcgttgctgctgaccttcccgatgccgctgacggtgaactacctcggctcgcccgacaacggcgcgatcatcgccggctacctggccggctggctgctgtccggcggctacctggccatcggatcctgcatgtcggcgctggcgaagaaccagatcatcgcctttgccctgaccgttctcgtctgcctgctgttcgtcggcgccggcactccccacgtgcaacaggcgctctccggctggcttccgcaatggttgctggacggcattgcctcgctgagcgtgctggtccgtttcgaggcgctcggccggggcgtgctcgacgtccgcgacctggcctacttctgcagcctgatcgtcgcctggctggtcgccaccaccatcatcatcgacctgaaaaaggcggcgtag

SEQ ID NO: 340702 - DNA, 2499 bp, Pseudomonas aeruginosa
atgacagaaccaaaggcaggacagcgaccacactttcacttccagggaacgggccagccagaaaggttccgctcaacagcatccgcaaccagagacccacggttcccaagacaagaccgagtccaacacggcggagccttgcttggccaactacaccaagttggcgaacagatggccgcagccatcaatctccagcgccaatccggccaagatggcgggtttggcctgcagatcgagttcaagagcttccccggattcgaattagcctttgaggggcttgcgcgtggcgcccagcgcattgagttgctcaacttacgccgtgacccccaaactcaaaccgacatggcgacggttttcatccccgacgggcagctaaaagccttcgaaagtctggttcgccagtacctggaggcgaacacatccaaggggcagccacgcaacgccccactgctcaatccaattcaggaaattcggtttgcagcgttcagtgcactctggaccgatgatcccgcagtgctccctgagaacgataccgacacgatctggtgggagttctggttgccggtccgtcaagaccgcgaggctgtactcaaccgcttccgctccatcgcagaagcctctggcttcatcacctctgacaagactctacacttccctgagcgcacggtgctgaacgtcttcgcctcgaaagcggcgattactcaatcgattctgctcctcaacgaagtcgcagaaatccgaagagcgaaggaaactgcggagttcttcgacgtactgcccccaatagagcagcgccaatgggtcgatgagctgctcgcgcgaaccaccacaggtcgcgatgacagtgtccgcatctgcctcctcgacaccggtgtgaacccagggcacccacttctggccccacacattggcctcaacgatctgcacagcgttgatccagcgtggggagtccaagacaacgtaggccacggtaccggtctggccggtcttgccctttacggtgatctcgttgatccgctgtcgtcgcaaagccccatcacgatccagcaccgggttgagtcggtgaagcttctgccggccgctgcgggcaaccagaaagagccctatggcgccctcactatgtctgcagttgccttgccggaaatcgcacggccagacgtggatcgggtattcagcatggccattacgagtacggatgctcgtgaccgaggacgcccctccgcgtggtctgctgcactcgatggcttggcctccgatgttcttggcgagcaggaaaatccgcgcttgatcgtggtgtcggccggcaacgcagatcagaatcaggcgttgctctaccccaatagcaataccaatgacggcatccatgacccaggccaatcctggaacgcgctctgcgtgggtgcgtacacacaaaaggtcaccattgatcctcctaatgcgacgcttcaacctgtggctccagcaggaagcttgagcccatacagcaccacgtcgttgacctggcagcgtacggcctggccactcaaacctgacgtggtgttcgagggcgggaatctggtgaaggaccagttggccgcctacaactacccgtccgtctctctactgactacttcccatactccagctatccggctgttcgacctcaccagagctaccagcgcggcttccgcactggcagctcgcatggccgcacagatttcagctaggtacccggtattctggccggagactgttcgagcactgatggtccactctgctgagtggaccgaccgcatgaaacacgacttcctgggcgctggatctaaaggcgactacgagcgactggtaaaaacctgtggcttcggagtacccgatctggggcgagcactgtggagtgccggagattcgctaaccttgatcgttgaggacgagctgcagccgttcatgaaacctattaagggcaatcctacggctcgcgacatgcaccttcatgatctgccctggccgaagcaagaactctttgatctgggcaataccaacgtagagatgcgagtgacgctttcctacttcgttgagcctaatccaggggttgttgaacgtggcatcaaaggtcgctatcggtatgagtctcatggccttcggttcgatgtcagccggccgacggaagagaaggcccaattccggcaacgcatcaacaaacgcgcacgcgacgaggaagacggtacctaccaaggaggtggatcagatccgaattggctgctgggtacccagacgcggcataggggctcattgcactcggacatctggcgcggcaccgccgccgagttggcagaccgcagcatgatcggcatctacccggccctcggctggtggaagacgctgttgaaacagcaacgctacaatgatcgtgtccggtacagcctcgtgatctcaatcaagacggagcaggccgacgtcgatctgtatgcagcgatccagaacgtgatcgctactagaacggcgattttgaatactgtatag

SEQ ID NO: 340703 - DNA, 1332 bp, Pseudomonas aeruginosa
atggcctcatcttctcaagagttgaggcctccacgaaacccggggcgattcatcaccgaccgcgagcgcctgctgcggcttaacgaacgcaaactgcggttcgtcacggaacgccagatctgtccctgcgcgcccatcaaccagattggccacatgaccaaactcgccacctcggatgatgaactgccctacaccccgaacaatgacaccgtctacagcggcgtcatgctggagctcaaggatgatccggtgatcctcagcctgccggaagtccacgaccgctactggagcgtgcaggtcgtcgatgcctatcttgaaaatctgccctatatcggcacccgtgcgaccctgggcaagggcggccactatctgttcaccggcccggattggcagggcgaggtaccgcccggcgtcgaactgcgtcgcttgccgaccaactccggcgccctcgccctgcgctacggggtgagcaaggaagaccctcaggatctgccgcgcgtgctggagctgcagaaacaggtgcataccacgtcgctgagcaactggagcagacccgatggcttcggcaaggtggtcgcggtgaagatgaaccgcaaggaatacagtggcgacctagccgtcttcgaacgcatggtcgacctgcttaatgagaaccctccacgccctgggcaacaggccgccgtagctatgttccagagcatcggcatcgagctcggcaagcccttcgatgccagcaagctgcaccctgccacggtggctggccttaaacgcgccctgcaggacagccaggacctgatgacctggaaggtgaagtaccgcggtacgccctatccgactcgctggaacaacctgcacgagggcacctacggcttccacttcatcaaccgggcagaaggcgcgctcgaagggctgatggtgcatgatcgcgaggaaggggtgtatttcagcacctacgaggacggcaccggccagttgctcgacggccagagccgctatgtcctgcacttcgagcgcgacgcactgcctcaactgcagaacaagggcttctggtccatcaccctgtacggcacgaatttccagttggtggacaatgccatcgaccgctactcgatcggcgaccgcaccccgggcctgaaatacaacccggatggttccctgaccctctacatccagcaccagccgccggcagggcaggagagcaactggctaccgactccacaaacgggtctattccgcttgaactaccgcatctatctgcccaatgagcaaacacgcaatccgcaaacactgcagcaatttattcccgccattcagcctcaggaccagagctga

SEQ ID NO: 340704 - DNA, 1038 bp, Pseudomonas aeruginosa
atgagcagcgccccccacgaactggtccacaccaccatcgctacatggactctggctattcagcgtgccctgcagggctatggcatagaggctgagcctctaatgttggaggcgggcatcgatccggcgtcggtactcgatccggagtttcgggtcgcggtggtcaatatgtggaaactctggcggctcagcgtggagcggactggcaacgatgccttcggactgcaggtggcggccaacctctaccccacacacctcaatgccatggtctttgccctgcaggccagcgccactttgcgcgaagctctgcagcgtcttcagcgttacgtccaggtggtgacgaccatcgccgagatcgaggtgaacgaggggccgcagggagtcgcgctgatcctcgggtccgacagttccacctctgcgcaacggccttattttccgatcgatgccttcatgggggtgttgttccgcaccttccgcgagttgctcggcgcctgtgcggcggatggcctgctggaggtgcatctgcgccgcccggttccgcagcagcgggatgcgttcgagcagttcttcggggtgcccctgcacttcggcgcggaggcgaatgtactgctgatggcctccggcatgctggaccgtgagctgccggcggccaacgccatgattgctggcatgaatgagcagctgctacgcgattacctggggcgcatgcgccatgagcaggtcagcctgcaggtgcgcaaggaaatcattgccctgctgagcaccgaccagttcgggcttgagcagattgccgagcgcctgaacatgagtggacgcaatttgcaccgcaagctggccgaggaaggcacctcgttcaaggagctgcaggacgagatccgccatgacttggcgctgcgctatctgggcatgcccggcatgagtctgaatgagatcgcattcagccttggtttcattgatcagagcagctttaaccgggccttcaaacgctggacaggtggcagtcctgggcagtaccggcgtgaacggaaggcgcgctag

SEQ ID NO: 340705 - DNA, 1887 bp, Pseudomonas aeruginosa
atgcacaaatttcgcagaggccgcggtgcaatcctgtacccgctgctagccctcaatggtgcgctctgccaggccgctaccttcgagctggacaacggcatcagcggccgttgggacaccagcctgtcagccggcctcagcatcagcaccagcaatccggacaagccgctactgcccattgcctacggcgggtctgcagccggcatcaacggcaacgatgggcgccagaacttcaaggctggcgacaccttctcccgacgggtcaaagccatctccgagctggctctgagccgagacaacctcggcctgcagatcagtggcaagttctggtatgacgacctgctgaaaaacggggacgcccgcttcaaagacttcgacgattcgggttttgattcactggccacgttttccggggccgagttgatggatgcctacgtctggggtgagttccagctgaatgaccgagcgctggatatccgccttggtcagcaggtcctgagctggggggaaagcaccttcatccagggcggtatcaatgtgatcaatcccatcgacgcaaatgccctcaccagcccaggggtcgagatcaaggaagccttgattccagtcaacctgttcaatctgtcgttgggactcagcgacaacctctcggccagcgccttctatcagctggaatggcgtgccacggtacaaccgggctgcggcaccttcttcgctcagtcggatgccagccaaccgggctgcggcccgctgcacgcagtggccgcgctcaccgaagcgcagcaggacaacctgcagttggtctacccgcggctgccagttggggccaacatgcgaattcctcgtctcagtgacgataagccttcagatagcgggcagtggggcctaaggctggactacttcgccgaagcgctgaacagcaccgaattcgccttctacgtgatgaactatcacagccgtctgccctataccaacgccgccactgccgactattcgaaacggcccggaagcggattcttcctgcccggggtcaccaacaacccggcttatggaggcagcatcgccaatcccttggcccaggcaccgctctatcagatggccttcccagaagatatccgcctgtacgggctgagcttcaacacctcgggtccctggggaatttccttagccggtgagataagccacaggcccaaccagccgattgccatcaacggccaggactttctctatgccagcggttttctcgataccgagtcgcccatcgtcgatgaactattcggcctggacatcgtgaccccgggcaccggtcccatccttgctaaagccgcaggtctctatggaaagcaagtacagggttaccagcgcaaacctgtgagccagctgcaattgaccgccatgcaaaccttcagcgacatctggggcgcggagaacctgctgctgatggccgaggtcggggccgtgcatgtggctgacctggaaccggtgcaaaccattgcctacgggcgcgatgcggtctacggctctggcgtggaaggcaccgccatcgcctgcaagaacccggcgctgaacaaagactattgccggcttgatggctacaccacgccgtggtcctggggctatgccgctcgggccaacctgacctacagcaacctgctaccaggcaccgtggtcaccccgtcgctggcctggcgccatgatgtcaaaggctacgcgccctctccggcaccacagttcatcgagggtcgccaggccgtcacgctagccgtgaacttcgattatcaaaatcggtacaacgcggcgctcagttacaccgacttctttgggggcgacttcaacccacagactgaccgggacttcatctcattcacccttggcgccaagttctga

SEQ ID NO: 340706 - DNA, 1356 bp, Pseudomonas aeruginosa
atgttcaatcactctgccacccgccacgtcctctttgcattggggctggcgctcagtcaacccgtactctgtgcagtttcacccgagctggctgcacagcttgatctacagctgacccccatgggggccgaacgcgccgggaatgccgacggaagcattccctcctgggacggaggtttcaagacatcgagcatggaccgaacgctggctgacccctatagcaccgaacagatgctgcaacgcatcgactccagcaatatggcgccgttcgccaaatggctgagccccggcacccaagcgatgctccaccagtatccgcagagcttttacctgcagctgtatcccacacaccgtagcgcggcctaccccgagtccatcctgcagcagagccgtcagaatgctacccagatcagcctcaatgccagtggtagtggcctggagggcggctacgccagtggcgtgccatttccgattccgcagcgggccgaagaggtcatctggaaccatgtcacccgctaccgcggcggcgctgtcatgcgcgagacgcatcgtatgccagtgcaaactgacggcagttatcaggccagtctcatccgccagacccaggtctttgccacccatgtcaaagacaacaccccggacagcaatatcctcttctacttcatcggccagaccctggctcctgcccgcctggccggcaatatcgccctgattcacgagccccttgatcagttacgtacgccccgtcaggcctggtcctacaacgccggacagcggcgtgtgcgccgcgctccgacactggcctacgactccccacagaacagcgcggaaggcctggcaacttcagacaacatggatatgtacaacggtgcgttcgaccgctacaactggaccctcaaaggcaaacgggagctgttgattccctacaacaattaccacctgcacgacaaaggcctgaaatacgctcagatcatccagcccgcccacatcaacagcggctatatacgttacgagcggcatcgggtctgggagattgaaggtgagctcaaacctggccagcgccacatctatcagaagcgcaccttcttcatcgatgaagacacctggcaaattgccctggcggatcactatgatgctcgcggagagctctggagagtatcgaccgcctaccagatgaacttctacaacgacctggtgccatggatgaccgctgaggccacacatgacctgcagtcgcgccgctacctgctgagcggtctgagcaacgaagtcaagcgcgaagccagcttcggccatgaggctctgcgccaagacttcaagccagatgccttgcgccgcttgggtgggaagaactga

SEQ ID NO: 340707 - DNA, 948 bp, Pseudomonas aeruginosa
atgaatatagagctccgtcacctgcgtcatgccttggccctggccgaacatggcaactttgcccgcgccgcagaggcgctgcacctctcccaaccggcgctgacccgcagcctgcaagcgctggaagcgcaggttggcgagcagttgtttgatcgcagccaccgcgaagtgacccccactacgatgggcgagctgctattgcagcatgcccggcaactgctgctgcacgcccaggacttgcagcgtgacctgcaattggcgcgcggcctggagcaaggtgagttgcgtgtgggagtaggtccgtttgccggcgccgcgcttgtcgccccggtgctggccatcttgaaccgcgcgcaccccggcgtgcatttggaggtggtgctggcaccctggcaagaactgcccgcgcgtttgcaacgccgggaaatagatctgctggtggccgacttgcacgagatcgaagacgaccccagctatacgatacaagcccttggtgagcaccacacgctgccaatgtgccgcgccggtcatcccttgcttgagcaccccgagcctagtctggagatgctgttgaagtatccactggccggacccaaccttcccgaggatattcgcgagcagctgctcaagcgcctacctagagccttgcagaacacctggcgtgagcagtggaagctggccatcacctgcgatagctcggccattctcaagcagctcctgcagggctgtgaggcgctggcgatattgccttggtttatggtggaagacgaactgcggcgcggcgacttgcaggctttacgcagccttgaccctggcctgcgtgggcgtttcgggattgctcgtctgcgcggcaggcgcctatcactggctgcgcaatgcttcatcgaggtgcttctggcccatgatgccaccgtgcgccagcgccaagatgcttggttggcccgttag

SEQ ID NO: 340708 - DNA, 1965 bp, Pseudomonas aeruginosa
atgaatctgccctttcgctggatgctaaccagcaccttgttgctactcagtgcatgcagcgacagccctgcgcccagccacagcgccgccacgccacgcacgcaagctgcccaggccgaggtggcgcagagctatgacctgagccatgtcgagggcctggcccaggcacgccgcggcctgattgccacgcctcagggccaggtgcgcgatgccgaaggcgaagtgatctgggacttcgatagctttgcgtttatccaaggcgaggcccccactaccgtcaaccccagcctgtggcggcaagcgctgctgaataaccaggttgggctgttcaaagtcagcgacaaaatctatcagctacgcggcttcgacctagccaacatgacgctgatcgaaggcgacagcggctggattgtcatcgacccgctaaccagccgggaaaccgccgccttcgccatggacttcgttgcgcaacatctgggcccgcgcccggtaagcgcgatgatcttcagccacagccatgtcgatcactttggcggcgccctcggcgtgatcagcgccgaagacgccaaggttcgtcagctgccggtgattgccccggctgggtttatggaagaggccaccagcgaaaacctgatgatgggcatcgccatgtcccgccgtgccaccttcatgtatggcaagcgtctgccgcgcagcgccgagggcctggtggacaacggcctgggcaaggcggtggccttcgggcacatgggcattctgccgcccacccaactgatcgacggccgcgaacagacgctggacgtggatggggtgcgcttcgtcttctacaacgtacccgggagtgaagccccggcggaaatgaccttcagcctgccggagctgaacgcctttggcggcgccgagctactctcgcaaaccctgcacaacctgtacaccctacgcggcgccaaggtgcgcgatgccttgcagtgggccaactacatcgacgccagccgcgcgcaagccgctggcgccgaggtactgttcaaccagcaccactggccagtgtgggggcaggacaacatccagaccttcctcaccacccagcgtgatgtctaccgctacctgcacgatcaaactgttcgcctgatgaatgccggcctcaccgcgccggagatcgccgagcaactgcacctgccgcccagcctcgaccgccatctgaacgtgcacggctactacggaaccctcaagcacaacgtgcgcggcatctatcagttctacctgggctggttcgacgccaacccggccaacctcgacccactgccgccggtggccgccgccgccaagtacgtggccctggccggcggccgtgagccgctgctggcagccgccgagcaggcctatgccgagggcgattaccgctgggccgcggagctgggcaaacatctgctctatgccgatccggacgaccagggcgcccgcgatctgcaggcacgcagcttcgagcaactgggctatcaggccgagtcggggccctggcgcaacttctacctgagtggcgcctatgagctgcgccacggcctgccggaagagggtttcaccccggtgatgatgctcgacatgctcaaacacaccgcgcccgagcggttcctggacgtgatggccaccaagctcgatggcacggcggcagccgacagcgcgctgcgtatcaacctcaacttcaccgacagcggcgcgcgctatcacctgtggatcgagaacgccgtgctgcatcaccgccgcatgaatgaagacgaagtcgccgaggccgacgccagcctcaacctgagtaaggacttcttcttgcagatgatcagtgggcaagccggcgccgctgccctgctcagctccgatcaggtgtcgatcgacggcaaccccctggcccttgggcgcttcttcagcctactggatcagccagacggacgcttccccattgtcacgcggtag

SEQ ID NO: 340709 - DNA, 471 bp, Pseudomonas aeruginosa
atggatcagtcttccgccgctagctcgcgcagcagcaacgtagccgcgaatcccatgcaggtactcctcaatgagcgagtcgaccctgacgatccgcttgcagtctatcgcctgattgaggtcggccttgcgccggaagacgtcctacgcttggtggatgcggtggagctgctgaaagacaaagctgttcttgccaaggtcatcggcatgaccgaacgcacactgcggcaccgggctaaggcacagcgcatggccctaacttctgaccagagcagcaaggttatgcgctttgcagagatcctatcgaaggctgaggaagtgctgggtagcagagaagctgcagaacgctggctggttaagccgctgtttggattcgaaggcaggacgccgcttgatctgctgtgcaactcgtttggggagcgaatgctggaggatctgttgacgcgcatcgaattcggtgtttaccagtga

SEQ ID NO: 340710 - DNA, 360 bp, Pseudomonas aeruginosa
atggtgttctcgcacaccagcgtgcacatgatcaggcacagcctgaactacgtgtcctggaagcgccgggccgaggcggcggccgacctgaagtggatttatcagtccagcacggcagacgaggccgaactgtgcctcggtgagttcgaagccaaatgggacgacgaccacatgccgatcggacaatcctggcgacgcaactgggcgcggatcacaccgctcttcgatttcccgccggagatccgcaaggtgatctacaccaccaacgccatcgagtcggtgaacactactcaatttccttggcggcatggctcaataccgatcgcatccattctggcatcttacaggcccggagcttaa

SEQ ID NO: 340711 - DNA, 561 bp, Pseudomonas aeruginosa
atgccaaaggggaggccctttgccggtgcggtgttcgcgtatgtcggttcccgtgcgtcgatcaataaggcgctctctaggctggtgcaatcaggcacgctggagcgattggctcgcggtgtctacatgcgccctaaaatgagcaagtacaccggcagggtggtgcgcccgagtccgctggctgtaatggaggtcatcacgaaggcgagcggcgagacgatccagatacacggcgcggaggctgttcggaggttgggcctcagcacacagatgcaggtgttgccgaccttttacaccagcggatctactcgcgagatcaaggttggtaatgcggtggttcgtctccagcacgtctccaaggatcgcttgcagcacgcaggcacgaaggtaggggtggcgcttacagctctccattacatcgggaaggagggagtgtccgcgaaggtggtttccaagatagtcaacgcgctgagcagcgaagagctgattaagctccgggcctgtaagatgccagaatggatgcgatcggtattgagccatgccgccaaggaaattgagtag

SEQ ID NO: 340712 - DNA, 291 bp, Pseudomonas aeruginosa
atggaagtccgggattcgttcgggaaagcgttgaggttcgtgcggcagcgtagggggctcgcccaggaagatttctcgctcgttagcagtcgtaccttcgtcagcatgctggagcgcggggcgacgagcccaactcttgaaaagctcgatagcctctgcacagtgctcgacacccatccagtcaccctcttggccctgacctacctgcttggatccgaagctcctgaaagttttgagcagctcctggagaaggttggtgaggagttgagagctctagtcgaacctgactga

SEQ ID NO: 340713 - DNA, 306 bp, Pseudomonas aeruginosa
atgaatggggccactttactagccaaggaggtacggatgttcaaggccaaggaggcacgcaaaaacaggcaaagtgatgctccaattatattgggccgcgcgattcaacaagccgtttcgacgcagccacatctgaatgatgccgaattggcgacgctgaaagcagtcattgatcctgcagcgcttggccttgtggggctgtcgattggcaacaggggagaagtggtagataggaaaggcaggaagatccacaaaccgggcttccgtgacgccgtcgagaaagttctttttgtgcaagtgaaatga

SEQ ID NO: 340714 - DNA, 138 bp, Pseudomonas aeruginosa
atgatgtttgccaggagttacttgatcgaggagagtgtaacttttcatatgaaaatgtcgctcgcgcgggggacggtcgtggggttcctagggcacagagtctgcgaaataaaactggtgagatttatcggattttaa

SEQ ID NO: 340715 - DNA, 1134 bp, Pseudomonas aeruginosa
atgaagattgccggccactcctctattgttatgtcaatttactatgtaaagattgctccggctgggcttcgtcatcgcttttcggagggggagaaaattgctttaaaagataaagcctatgcagctcaatggatgattgagcaagggaggattgatgcagtaaagagtgagttaatttcgaattcagtgcaggcgcttaatcaattggatggtgggctgcctgcaggaagttttttatttcgtgattatggcttctgcccgttcgcgggaactcgatgtgatgatggaggatgcgctatagattcgaagaaatatcttcccacacccagcggttatatggggtcgcagaattgtattcgttgtcggcattttgtgactggcccggcgtttatgggggggctgctttccttgggaaatgagatttcattaagcgcaaatcaccaatttcgccattacgatgagattgagagtggtgttcgtggtgttctggagaaaattaatatcatggatgaagaggaatacttggcactgaaggagggaagaagatttgatgagggcgctagaaaccaacttgaagcaaaattgaggaagttgaggtcggaatcagaggcggcagccaagaagttggatgttttgatgtgtgatatccagtcctgtgcgaaattaattaagcagtgtcatgctttggctaatgaaaagtgcgagggggaagatggggagcagagagctcagcttatagttcaatctggtcatgagttggtttttgatgtcgctgagacttcgtattttcaccagctgagtgaggtttgtgagaacgcggaaatttacgagtcggcctctgctgatgcagcagtaatgccgaggactcaaattatagatagaatggttgctttgaatgatttgaagcacaggcttttctatcttgataggcgtcagcaacttgttgtgggtaatcagtttacaaggcttttacttgatcgcttgaaaagctgggacagggtcgatgcattgatgtctggacgtatccttattaaggatttgcttggtgcggaaaagatcacgcgccgggatttagattctatttttaattcacgggttaaatctattggactggaggtggttgatggatcctaa

SEQ ID NO: 340716 - DNA, 2349 bp, Pseudomonas aeruginosa
gtgaatagctttttcaataaatacattgaggctggaaagtcacttgctgagtctcgcggactagattgggatctggcggcagacctcgaaggcaacattatcaagacagcgcgctgggatctcgcaaagctatgcggacttccctcccccccatatttctggcactcatacctggggcctgactcaaatgcactggatttattcaacggctaccgtgcacgccaaggtctcgaaccagttgccactgaaatcctttccaaaccgtggcgcgatttctaccaagcagtgctgcttaacgaactcttggttaagcgcaacaaaccggggcatgcacttaacaatattgggcgtgcgctacgtattcttgcaacctgtgctgcggccgaaactccatggcagctttctcccgatacaattcagttatcgtacaacgtggcactcagcctgggcagttcagggaagttggcttccaatgtctgtatggttatacgtaatctaatagacgccctgcatatttcggatcgatcacctctggcaagattttgcgaaccatatccagagcaagtagatctagataagaatgtttcaaagttgcgtaaaggtaacaatacgtaccgagcaacggagaaggtacggacagagctgtctgaaagaaagtctgcggctcgcctacctgatgaaaaggcgttctgggaacttgtccggatagtgtttacggaaaaaccccgaactttctcagatgcaatgcgcttcaatcagatcaagatccaaattgcttgtggattccggattggtgaaaacactttactgcctctggattggaagcggtcgcatgactacatcgccgctgatggtagacctgctggcgagttaggtggtatttctcgagcactatcaattcggcattttgctgaaaaacagggtgacgatatagactttgaaggagtggtgctttatgagaatacgcaaaatattccaaatattttcgagaatctagttgaagaggcgcttgcggaagcagagcggctaagcaccccactccgtgaccgccttcgtcaacagatcgaaacaggcaggcttattcctgagtattcgcccgagtcaatagtccccgcgtgggatatctataatcgtctaactggatctattgggcttgcttccctgcctccatcggaggagttagtggaaaaataccgagaaaccttagatcctcaatttcttgagctaatcatcaatcagcagataagtctaattgcacgatatggcgtatctgacaactgtaagaaatattttaataagctaccgattacaattaggcgctccgatggctctccgcaaacgggtaagacagtctggcatgaggcctatttatgcgttgccgaagttgaagacatggtgagggaaaccatgccaaccaaggtttcgcacacagctcctttcaaattgcaggccggcaggtctcttccttcgtcggaactgatgtatctcatgcccatccgccccttaattgaagagcggaatggtggggttctggatgtcgcgcgatactttgccgtaagtcgcgcctcgccccttgatctccatcttcatcttggcggtcagccgaataatatttttgctcgctatggcctgacggaagaggatcgatcactgagcctgaatacacactccctgcgccatctgcaaaatggtgaactatttaggctaggagttgcggacaccattatcactaagcgcttcaatcgccgcagtgtcgctcagagccatgtgtatgatcatcgtagcctaacagaagcgctttcagatattgatctacccgccggggctgacactatttctccgcgcgctcaagaaacactacgtatgatattggccaataagatacgaggaccgatagtagacgagtttttagagattcagaaagagatgggggatgatgtggcattccagtttttgtccgcagaggcggatggtctgcatgcaacgccatatggcttttgcgttaatagcttcacggtggacccctgccccaaacaccttcaatgttataatggctgccggcatttaactcgttcaggaattgaagaggagaaccaaagcttaaaaaaactaagagggcgacttcaggaagctgtagagttaattaataagaccccaatagagtctcgaaacattggatggcagaatcagttgcgccatgccgaaaacagcctggctaacttagacaagtccatttcaactgctccaggtaataatccatttcctgatgggccagacctctaccgatccgtagatgcggcacgaggaacgaccttgatggactccgcaataataaggagtaaagaatga

SEQ ID NO: 340717 - DNA, 1527 bp, Pseudomonas aeruginosa
atgaaactggatgaccagttagatctattttctgcgcagcaggaaaagcaaaaagaaattcatctgcccgtgctgcacaaatccattcgatactacgatggattttcagaagagtttcgaattatcaaggatacgtctgcagatacgtggactcttgaggtagaaggaagaaatcaccgccttctatttgataggattccaatccgcgagcgcgagttatttaaacatttagccagggaaatgctctctcgccaaagcgctgtttcagttggcatgtttataggttctttgcttggcgagccaaaacatgtcatagcagcatttgatatgtcgccaccagagttccgcgactattgggttgctaactttcggaactggacgtacataaatgcgctttcaacaagaactgcggtgcattcgctgtgtaatctatcgtttggcctttggaatccgaattacagagattatgtgagtctcctcccctcgcctcaccttgatcaatatagaacagtcagaactcaagagtgctttctgcctcttgaagatcagtcgcttctcatatcatatatagataatgttgcagaaagactggaagcctctggggcgactcgcacaccgcataaattaaatattataaagctaagagatacctgtctgctgatattgagtcatcaatatgcatttaggcctggtcaaattgcaaagatcaaagcgagtgacgttaggtcactcaacaagaactcattacatatctcggtgcctgtcggaaagcaaagagtatccaaacgaggcgggttagtaacgcgaaaaataaaaagtgaatggatagttatatttagatcatatggtgagatggctgacgaggtacggctgcatgaaaatagtactttagggcagctttatttttgcatgacaccgacgcaggtctctgtcgcaatcggaaatcttacgaagcttcttactggtgagcgctgggtcgcgacagacctacggcatacggctgcgcaacgattggcagatgccggtgtaagccacatctccctttcagatttcatgacacacgcgacaactttaacagctaatgtctacttcaacgcctcgcctacacaagccgagcgtgtgaatcaggcgctggcgctttcgcctatttactcaaatgttgcggaagtcgcacgaactagagttattgacaaaacaaccctcatgcggcttccacccgaccagcaaatagcgggcgttccacatggaattccgattgctggcattggtggttgctcagctggacaatcgctctgcacgatgaacccgattttgagttgttatacgtgcagaaagtttttgccgctattggattcttcgattcacctagaagtagtagaaaaactgcgctctgtcgtgacagattttgcaggtgcatcgcgaaacaacgaggagagcccggcgtatacacaactaaagcgaatgcttcaggctgccttacgtgttgccgaagaagtacgagttataaattcagaggttgttgggtga

SEQ ID NO: 340718 - DNA, 1959 bp, Pseudomonas aeruginosa
atgatcaagtcagaaagtcttgtagcctataaagatagagtagtaggcgatgatcgcggagtggtaaaaccagtcttaattgcaaacgaagacggaagctacaaaacactagacagaaccagatttccgtccgggatatatatatcaaaaggctactcctctatagacacctcccatgaagaaggtgagttattccttattaaggagtatcataaagacgagcagaaaactgaagatcatggaatcgaccgctattgggccatgggaaaagacattgttcctctgccagcaaatagcttcctgcccgttatacaatgccaactgcctcctattgaaacaggtgttcttcccgattcagttaaagcaccttcgggcctcttcttcattctagacgagtcagaacataaagtttacggtccagtacaagcttcaacggtccctggcgattccgtacaagtagttgaggcagcagcaacaccaaagctatcttttggggccgactacttaggtgtgtttgatactagagaactatcagaaagcttaattcacctaaacattaataaccaaagctgcgcattcataagttcagctaacgaactagcaaatcaccgtcactccacgcacgatttcatgagtgatcgaaagctaattcgacactttaataagctgcaatttggcaagaacgccaagactctttcaaggaaagaagcggaaaagctgtctacatcgatatcagactttgagcgtctacgacgagctgctcatgttaaagacgagcgcctcgaacgactaaaaggaatacttgatcgataccttaacgagtctgacattggataccaaatagtaaaagactactttgactcaacaactggctctcgttttctgacccaatacgttgaggaaaaccaaaaaagtctactcggtactcagatccaaaaaataactgctgacgttgaccgaatggaaacggaattgaagcagaagttaaacaccattgagaaccagataaaaactaaacaggatgaattaaccaacgttcacgggcgagttgaaaaagccaaaattgagtccgaaaagaaaattgctgaagtaaacgccgaagcagatgaacaaatccaacaactaatgcgggctcgagaggaatcgcttcaggatgagattagcgctaaagagaagtcattagagcaaaaaaacactgagcttgaggaaatctgcagccgactaggaattgcaaataatatcgctgagatggaacgtcgagatattttccttcaagagaacaacaagcgcctagaagctgcggcaaaatcttaccaagatcaattgcaaaatacggatgagctttccaagagaattagtgaataccatgtaattggtcgagtattaaagggcggaaacatcactcaagggccaaacatcgaatttgctcctgtcgactttgcctctagcatacccgccaatgcagcagacttggtggacaaaatcagaagtcatttggactgggacaacggaaagactttttcaagcgccgaactcagtaacctcctgattagtactactcaatccttccttactgtactcgccggacctcctggggttggaaaaacctctacagttgtccgtcttgcaaaagccttacagttaggttccccagaggaccataaaaacttcctgtatatgccggtctctcgaggatgggtatccggccgtgatattttgggcttctataacagcctaaacagtacatatcagcgagcacgaaccggattatatgactttctcaaccggaatgacggaggagcacgtaccctccagatggtccttcttgatgaagcaaacctctcaccaatggaacactattggtctgacttcctcggcatgtgcgatgctgaagggcgcaatcgcccaatcgataccggcatgccagaccctgataaacgctacctgcaagtcccctaa

SEQ ID NO: 340719 - DNA, 414 bp, Pseudomonas aeruginosa
atgctcgacggagcaatcgattactcactatttgagaaattcttcaaatatcagggagacgaagcggagctatccacgatccataaagacatgcttgacacgcttgtgacaatactaagccagcgagatgctgagctaggccagtcgataagcatctctcatcgcaagcgatcggccatcactaactattgtgctgccgctgtgaccaacgagctaatggatccagacaccgcattcgatttctccgtatcacaacacattctccctcacatcgaaggatacggctcaaagttcagaaacagaataataaagatccaagaggtacttggtaagaaccatcctcgctctaacaagcatctcgagcgaatcctgacaagtggaaacgatttcagcggcacctattcattcttctag

SEQ ID NO: 340720 - DNA, 1878 bp, Pseudomonas aeruginosa
atggagcttatactaaccatcatgactggcgcccgaaaggggcaggtcataacgcttcaaaaaagatctgaggcgaaaaatgctgatatcccttgggttctcgaagatgaagaaatcaagtttgacataacagttccgcgcctatatcgctcctccattctagagctatatcagcacagcattccaacatcgcacgcatcttaccctccggagcatccagattctgttaaattttcctggatacccgacaccaactccaacataaccgccagcaaactattttggaattactttggcgtagccgaacttaaccttctgcttaatgatgaaaatggtgagatatctgaactattaaactttcagccaattcaagttgtagccacaaaaagctctgccgacaaagtcgaaagaatgtttgagtatttggcgagcatttctagtgaagctttacactccgtattcagtgccacacgacacacagtgggatttgaagagggagcagtttcaccgagctacacattcgaacgattggagcatgcaatcgcagcgctgaaggagctccttcctcatgtattgagatcgcctctcacacggctagttccggagcaaaaattagttcctttaacaggccgagaggaactagatgactcatccatcggctggctggttgaaaatctttcagtactacaaccgactgaccatccagaggacgcccacgtatactacgatggcgatcacttcaaagcatcaggcctactgctcccggtgcttgaagagcaaaccgatatatatgaaaatcgcgtcattcatggctttatagatttactaatccgaacagctcagaatctaggaaacagaatggagtccgagctaaccagacacggatctaattccaccatccccaacggatacgtttctttctttgaaaaggtaactcgcttcaaagcacaactaatgggaacccagataaacaaaatcgacgcaatcttgtcgaccctaaatcagtacaaaatcgttgtagacaggcagctcttcgtcaaacatccaatacatgagcggccgatcattacgccaaagacacaatgcaaaccggcctaccgcgatcttttcgtagaaattatcaagtggcatgaaaaaggaaagatagactggacggcttatgaaaacctgtttgcaattgagagcatccccatgctctttgaggcctactgctacttccgagtattagaagtaacaaataaattcttacacacccccacccacgagagcgtaaaaaccaaagagcgcacactaaaaacctcctttacggacaaaggaaacaacgagattgaggtgatcaaagagcctgaatactggactctaaatcacaataaccgtcatccagagcacatcgtaaacggtgaggccttcacggtaaataaggacaaccgctccattaggcaaagaagccaaagcggggcaaacagcaagcgagtcccagatattgtaatacaaataaaaaacccacaagggaaagtcaggctaataatacttgacgcaaaatacagctacgccaacaaggcttttatcgattatctgccagacttaaccatgaagtatgtccatggcatacataggtttggccagaatgaaccactagtctcgtcgatgtctattctgtaccctgatgacaaagccggtttcagaggctttcactatggcccgctaggtgtttttggggaggcacctgtcagcccctcccttcaagcgtgcggtatagtactgggaaatgataggcagctagatcaactcgaccgattaatccgtcggactttagagcttgaaggagtttcacctcaaggcctccaattaatagaaaccgagagagatgtagcgtaa

SEQ ID NO: 340721 - DNA, 948 bp, Pseudomonas aeruginosa
atggacaaattggaatgggattgggtccaggcccagaaacataatcgtgatggttcgtactctacccaggcagcacggaacgcgacgctgagtctttcagccaggcaactacgagagctcgggtatcgcaacctacgcgcagatcgcgtcgctcaaaggcatctgcgggccctggtggccaagtggcagagcaacggcataaaagcaggcacgatcaaaaatcggatgtcgcatctgcgctgggcgtgtgagaaggccggacgccctggggtagcgggcataaaaaacgatgacctcggaattgaacgccgccaatacgtttcacgtgagtcccgggcgacagcgctgacgatgggcgctctggagcaaatacatgacaggaacattcagttcagcctccgcctgcaggctgaattcggcttacgacgtgaggagtcgattaaattccgagttgcagacgctgatagaggtaacgggcgcatagtgctgacggcatcctggtgcaaaggaggacgcgctagggaaatcgtaattcgcacacctgagcaacgagcattgctcagggaactgcacgagttctgcggtgcttcgagccttatccccgcccatctctcatacgctcagcaggtcaggaaatacgaaaatcaaaccaatgcggccggactccataaaaaccatggattgaggcacctctatgcacagactcgatacctccatctgacagggaagcagtgtccagctgtccagcgaactcagtccgctcaggcccatcttgtcggcggtgaaaacggctggttcggccaggtcatacgcccgatacctcaccttccagagggagctaatccagcaggcatggatgatcgaggtgcgcgccagatcatcacggaggagcttggtcatggccgcattgccatcacgaactcgtatctaggatctgcccgcggatag

SEQ ID NO: 340722 - DNA, 261 bp, Pseudomonas aeruginosa
atgaacgagctgaaaataatggtctgtatgctcatcgccgcctttgggctgcatcgaaccatcactaaaccaggcatccgtgccgaccaactcttatctctgcgttggcgccagaggctcgcccatctggtcgcctttgccctcatcccgattacttttttcggataccagtccctaagcacacctggtgtcgtagtgcccatgactctgggttttgttctggtggtgtggctcctgcctgaaccatggagcacctgctga

SEQ ID NO: 340723 - DNA, 543 bp, Pseudomonas aeruginosa
atgatgaaacaaatgaccttcgccgatgccgagtacgccggtaagcgcaagcagacccgcaaggagctgttcctgatagagatggatcgggtcgtaccctgggagggtttgattgctctgatcaaacctcattacccaaagggcgaagggggccgtccagcctatccgctgatggcgatgctgcggattcatctaatgcagaactggttcggttacagcgatccggcgatggaagaggcgctgtacgagacgacgatcctgcgccagttttccggtctgagcctggagcgaatcccggatgaaaccaccatcctcaacttccgtcgcctgctggaaaagcatgagttggccaccggtattctcggcgtgatcaatggctatttgggcgaccgtggcttgtcactgcgacaaggcaccatcgtcgatgccactctgattcatgcgcccagttcgaccaagaacaaggacggcaaacgcgacccggaaatgcatcagaccaagaagggcaaccagtattgtgtgtcacgaacacaggtcagatga

SEQ ID NO: 340724 - DNA, 795 bp, Pseudomonas aeruginosa
gtgaatcacatgatgaaatttggagccgcaatcgtagccgctggaagtttggcaggatgcgggggagaagacttcagcggcgcgtacagttcagacggcccctatggcaagcatctggtactgaacatatcaggcgacaatgccaaaattttccttgttaataaatccacggcagaaatcagcggattaaccgacttcacagtggattacaagaatgagaagctcctactggactcttccaaagagaatgtccacctgacctttaaacgtgccgaagatgaacgtggactggactgcctgaattgcgaagaacgctcaattcggctgccaaccaagtgggcacaggtcagtactaagccttatgacgtagactcgatgctgaaggagcaggaagagaagcgccaagcggcagcacaggaggaagagaagcgtagagcggaggccgcaaagctggtcaagttcgatggtgactgggtagccaaacgtcactataaagatgactcgctcttcatcatgtcgataagccctgagaagggcgtaaagcactgggcattcaactatagcagtgccgccaagctgatttcgatggatcgcagatttgaagtcgaaggtgatgaactggttttggtctcggatgactcttcgacaaagtacgcactcaccgaagacggcaccaaattaatgtgcaccaactgcaactcagagaacaattggattaaggcagaccctatcaaagttaacgacctgacttatacccgaagccttgccggaaacccacaagaagtccgcaaatag

SEQ ID NO: 340725 - DNA, 207 bp, Pseudomonas aeruginosa
atgacagacgcggaacgctacccactacgtgcaattgcattgatgagtacagacgaactcgctcaaggcgccctgctggccatccttaatgagagcctcgatcaagcacgacggcatctcgcagagtcatgctggaaggagctcctgcacgaagatcagctcatccaacgccagcaattggcgacggagtttggcttgaaaacgtag

SEQ ID NO: 340726 - DNA, 429 bp, Pseudomonas aeruginosa
atgagaggcttctggcacacccccatgtgggagatggtcaggctccccaatcattggagcctgatcatgaccgtcacctacaccgagttcctggaaataggccgagacctggacgatggcccaccaattgatttgcgctggctactcgatgcaatgctcgcgctcggccaccgctattggacactggacaacgacccgcgatacctgcttccgcaactagtcagctatccgatgtacctccagcacgggctattcggggccagaccaccagcaccgaatctcgacgacttggcgcttgaactcctgctcagcgaggttcacacccgcctaggtatcgggatcgaagttcaaaagctccatgagcgtgagctggagcggcgcctaacctcgctgcctgccccaactgttacctacatggggagggcctag

SEQ ID NO: 340727 - DNA, 1191 bp, Pseudomonas aeruginosa
atgctccagagtgttatcggcggtttcctggtcgccctcgtgattatctggggcctacagccagccaagctcacgcttccctcagggacgacggtggattcagtgaacttaaccgcccatagcgcgacagtcgccctttcgatacagcaaatacttgctagtgcactgcagggctcgttgagtgaacgcttcaacaaagccggagaatttctgccggcgcaaagcgtcaccgctgctgcagtagagcgagcggcctcccagttcggcaacaccgatctggctcgactcatccgcgactacaacgcccaatgcaaccctgacgctggtgtgttcaaagagacacaaaattcgacccccattgaggcataccacgcaattggattgatgggcggcggcggactggggataccggaggctgaggtttcgcgaatggctcagctgtccaaggcttgggacattttttccaccccagcaaagtggatggagggacctggagcggtccttgatctacaggctgtccgttctcgacgctcagccggcattgaagcactgaaagagaaaaaacaaccatttgttagcgccagtccctacaagctcccaacgaagggctattggctcggtatctatcgcggagaagaaggctccacccccgagtatctgaaggtgggtgatgctcccaacggcttggccgcgacattagagaaaaacgtccaagcctggagagaaggtgaggacaaatctgcaacacaggggtattcgcccagcagttgcctggaggcctaccaaaccgctcaatttgctgcagagcaggcatacggagcgctcatcgaaacaggaaaaaaggcaaccggcggtcaacgagcagacgctgacagtggtgcaataggggcagcattagcttggcaacgtacagtcaatcgcgccctgaacgatggagagtcggcaacgagccccggaacgactctcgcgtcgggctctgtagcaacgctacagctcctcaagtcgctaggggaccagatagatctgtataccctcgttccgatgtacgtcgctggctgcgccgcactgctttggctcgtgctcacctgcatgccgctctttctgataatggccctgattcgagggccggttagcctgaccaactggttatcgttggtcatgctcccagtgctcttagtcgtagtggcttaa

SEQ ID NO: 340728 - DNA, 324 bp, Pseudomonas aeruginosa
atgagaaagactacgacctactcccccgaagtccgtgaacgtgctgtgcgcatggttctggaacacctgaacgactacccctccgagtgggcggccattgaggccattgcgccgaaaatcggctgcgcagcgcaaaccctgcatggctggattcgccgccagcagaccgatgccggtcagcgccctggtcagaccagcgaagagcgcgagcgcataaaggccctagagcgcgagaaccgcgagctgcgcaaagccaacgagattctgcgcctagccagtgcgtattttgcccaggcggagctcgaccgccgcaccaagtcctga

SEQ ID NO: 340729 - DNA, 1248 bp, Pseudomonas aeruginosa
atggctgatctctatcgtcaggtacgtttgatgaaaaccctttcatctgcgtggagggttgtccgagccagttgcatgcaatcatcgtcaagcgagattcgcaatgaagcaattgagtttgaggccgattcgtttcgacaactaaagtcaattcagagcaaacttcagaaaaagaagtttgaatttctgccgcagcacggaattgccaaaaagcgtcctggtaaatcttcacggcctttggtcattgccccaattcccaatagaatcgtgcagcgtgcaattttggatgtgcttcaggataatgttgcgtatgtccaagaaattctgaaagtcgagaccagttttggcggcataaagggcaagaatgttgcgctggcgattgcagcaatcaataaagctttctcgaacggcgtgacgcactacgttcgttcagatatcccaagtttcttcaccaaggttcagcgtgccaaggtagtagatgcgcttgccaagaatatcgatgatgttgatatggtgaatcttttctccgctgccatcgaaacaactttggggaatctaacggatttgcagagacgtggactggagtccatttttccgctgtcacatgatggcgttgcgcaagggtccccattatcgcctttgattgccaatatttacttggcagaatttgatcgtgagatgaatcgcgagggcttggcttgcattcgttacattgatgattttgtgatcatggctgcaagtgaaaagcaggttatgaaagggtttcgagccgccaaggcagttttacgtcggcaagggcttcaggtttattcgccagatgacgatccgctgaaggccagtaaaggtgatgtccgcgatggcttcgattttcttggctgctatgtgaagccaggtttggtccaaccttcaaaattcgctaggaataggctactggaaaagattgatacggaggtttccttagcatgcaatcttgcaaccatggcctgtaagggtgggaatggggtgggcgtcggatgttatgcgcaggcgatcgttaacattaataatattgtttgggggtgggggaaagcgtttcggttttgtactgggtctcaggtgatccaagagctggacagaaaaatttcaaagaagatgcaagaatttgaagttttaatatccagaaagctacggaatgcagatgctgatgttcgccggaaagtcttaggcgtgcgaatgcttgtcgatgcggtaaaggttgatatttgctga

SEQ ID NO: 340730 - DNA, 1809 bp, Pseudomonas aeruginosa
atgaaaccatccccttcctacctcacgctcaatcgccacggaaccttttacttccgtatcgtgattccgtgcccgcttcgctccctgttcaagggacagcgggaactccgacgcaccctgaaaaccgatagccatcgcttggcccgtaaacgagcccggcagtatgctgcccggtatgaagcagcgtttgacaaggtaatgagcgtggtacagcgcgacgagcttggccttaccgaggccgactacctggagatgatggagttgtttcctgacttctccagtcccaaagacggaagccagcctgctgagccgatcctttcaaacgaagagatcgaggctcgccaacgccgaagagaagtggagcgacttctgaccggagcctatggccgtccgattccgaacgaacaggaagccttggccaagcagttgctggagctctcccaaccctacctagcaactgaactacgcgcggtccttcccaagcttcgggatgagctggtgctccgcagactcgccccagttggtagcggtactcgtatagcagaagagcgccagctgctaccaagctatgaccctgcaatggctaactggacgctctatcaggtatgggagcaccaactggagcgcgacagggctgacacctcgtcgaaaggtgggcaggcaaaccacggtggcactcttgaggaacgggagcgccgcgcccgggttatgaccgtcctgacgcaacacaaacccgtttgccagttgaccaagaaagactggcaggccgcgtacgacaatgcccgcaagacgaaggctaacgccgacgcatcaattgacccgccgacgcaattgattgaaatcctcactgatgactctgagcaacagaccggccatgagcgtgttcgcgccctcatcgcttccatgaagcaaatccaagcgcatgctcgctaccttgatttgactgtaatcagagcggacgacctgatcataaagcctgtcgaggagagggagtccgcgcggagccgtgatggaacgcccttctcaaagggcgatatcgaggcaattttctctggctatatctatcaagggccagtccccatcggacggaccaaggcgtatccattttggttctggctacccttggtcggctatttcactggcgctcgcacgaacgagattgcgcaactcgacacagccgacatcaagaaagttgatgggcatccgtgcttcgacttctgcgctgatgatccgaaggcacctgaagcaaagcggatcaagaccggcgaagcccggcttgtgccgattcatccgcgcttgattgagttgggtttccttgagtatgtgaacatccagcggcgagccaatcagaagaagctgttcggcgacggcctcacctacctgccaccgagagacgatgacacggcccacaacaaggaaggctgggcgaagagtgccggtaagttcttcaatgagaagcccaggggatatctggtcgccattggcgttcataaaccaaacgacggaaagagcatctactcgttccgacataccctgatcactaacttgagtcacacgaagcgcaacagcgtgccgctggataaaaccattatccaagcaattgtgggccacgccccagaggatatggcaggaaggtactatgacgaaggcgccacgattgagcaaatgctggccgcccttatgcttctaccgatcccggcagccgtacaacgacttaccagctatcaagtggacttcgttgatcggtttggaactgtgctagccaagagcattacgggccatcgacgcaaacacccccgactaacataa

SEQ ID NO: 340731 - DNA, 1836 bp, Pseudomonas aeruginosa
atggcgcaggatagcgatgctgaagaaaatgagagccaaccgctgaccatcgctgaagaatcagctctacggcaaatagactcacttctctccttactccagagtggcgcctcaattcttgaaagcagaaagatcaagaagaaagtaggccaactaagacagcagctcactgaaccagcaaaacaaaaagagccagaagcaaatgaacttcttgccttcaaaattgaaatagacgccgttctacaacacctaaaccaagacatgcgcgacgactggttcaccgatgccatacagcatcgagacctgttttcgaacaaaaatgacttgaaagagactttgcaatgcttgctgctcgaaggaaatggaaactacgctgggagcaataggacaatctataacatccccaaaaagggcattggggtcagatactcattagaaacagacttttatgaccgcttcatttaccaatctatctgctcttttctgattccattctatgatccactcctctcccatcgagcactaggtcatcgctacaacaaaaacagaacctcagaaaaatatatattcaagaatcgaattgatttatggcatacatttgaaggagtcaccagaacggcgctccccaacaatcaggcattgttagtcacagacctgattaactattttgaaaacattacgatagacgcgatcagatcagctttcgaaggaatgctaaatcaggtatctgcaagcggaccagaaaagctacttattcgcaacgctatacaaaccctttgcgatctattaactcgctggggctacaacgagaagcatggtctcccgcaaaaccgggacgcctcatcttttattgccaatgtcgtactaagctccgttgaccacacaatggtaaagctcggctatgactactatcgatatgtagatgacatcagaataatatgtgacaacccgcgcacagcaaaaaaaacattgacagaactgattaaccaacttcgaacagttggaatgaacataaattctggaaaaaccaaaatccttacaaaagaaagtacagaagaagagataaacgacagctttcctacaactgacgaccgtacgctcacaattgaaagcatgtggcgctcaaggagcaggagggtaatagcccgatcagcaaagtacatccatcaattattgagggaatgcattgagcgaaaggaaacccaatccaggcagtttcgctttgctgtaaaccgactcattcaactagcagaagccaacttattcgacatacacacggatctagcagccgacctcagaagcctactaattgaaaccttggaggagcatgcagcatccacagaccagtactgccgaattctgggcacccttaatctcaaccaactagacctagaaaaaattaccagctacctccaagacggcgaaagatcaatccattcatggcaaaattttcatctctggcttctgcttgcgaagcaaaagcacaaaaatgaagaactcatcaacctagcccttataaagattgaaacagacctcctccagccagaagtctctgcaatcttcatatacctacgctgcatagatgagtccgaaagattaaaacctttcgttcagcatttttgccagacttggccttattaccaccagagaaacttcctactagcaacaagcgaattcgaagcagaagaaataaagccgctgatacctaaactccatacaaaactcaagagaactgccagtcgggcaataccttactttgtggatggtgtccccctgcttgagagagagcctaggagcgtactagacctctacgaagagatcagcccttatgactag

SEQ ID NO: 340732 - DNA, 627 bp, Pseudomonas aeruginosa
atgtttgtccgtgcctatctgcgagcctctactaccgaacaagacgctaatcgtgctcgtgctgcactggtggagttcatcgagagcaaaggacagcggattgccagctactatcttgagaacgaatctggcgcctctctccagcgccctgagctgttccgcctgctgaatgacgcccagcccggagacgtactactgctggagcaggtagaccgtctgagccgcttgaaggaagaggactggaaccaactccgcgccacgatcaaggccaagggagtgctggtagtcgccctggacctgcctacctcccaccagtacctcgtcactgctggtacagcagatgagttcacaggccggatgctgagtgcagtcaatgagatgcttctagatatgctggctgctgtcgctcgcaaggactatgaagatcgccgccgtcgtcaggctgagggaatcgccaagggcaaggctcaaggtgtttacaagggccgcccggctgatgcggaattgcacgccaagattaccgagctgctgaatgatggtaagagcatccgcaaggtggctgatttgctggactgctccactactactgttcagaaggtgaaaagagccctggaatccgctgcgtaa

SEQ ID NO: 340733 - DNA, 435 bp, Pseudomonas aeruginosa
atgagctccctggaaaaacacgcccgcgaatttctcagtaatccaatcaactcgtaccggctcctcgctgagttcctgaacaactctcatcctcgtgcagacggaaccctctggacgaaggactctgcctatcacttctgccgcacccacggtatagcctcccagcgtcgctgccgctgtcagcctgctgccagcatttcgaaacgcaagcgcagccgcaaagtcatcgtaaaagccctgactgaagcgcttctgcgcaccggcacaagccttgactccctggccccgtttcaaatcagcaccatcgcgcggctgtccggctttcaattagccactgttgcgagcaactggcatcgcctggaatctgagttacttgaactcgccaagctgccacccaagccggtcgtgctccacatcatcgacgacgaggtgtga

SEQ ID NO: 340734 - DNA, 627 bp, Pseudomonas aeruginosa
atggcgggcaagcatgcaacaccagatcagggcgctcaggcagtgattctgagagaggccggctacaccttgccggcgattgcccaacgcctagaaatcagccttagcacggtccagcgcttgctgaagaagcacaaggcagttgctggcgctacgacacacgcactgattgagaaggctcgggacgagatgctggcctctgccttctctctggaaagcattcagcagaccgctgcttcgctggtgctggatgacctagcaattggacagcagatcaggcggaagctctccagcgcattggaagagctcgatccgagcaacccaatcgccttccgagcccttgctgcctgtgcaaccaccctcaagctaactcaagacgttggccggcgtgcgctccctctggacaagctggagcaggcacaggccgttgaagagcttccggagcttcagattcacgtaatgacgccttgggatgtcgaagagatgcgggctcagcagcggctcgacgaggcggaactgagaggcgacgcagaagggatcaatgaagagctcgaaaaccttcaatggatcgcgcagaagaagacacctcgttatgagagtgacgacatcgtggtcatcgagaactga

SEQ ID NO: 340735 - DNA, 909 bp, Pseudomonas aeruginosa
atgacgcaaaagaagcttgaagaaaaacttgaagatctgacaccgaaacttctactgaaatggctggcgtggatattcgcaatcgccgccggagcagtcggaatcgtttttctcttttacttcatgaattttaacaatggattcagcaccgcaaatgcagactggggcacgttcggagacttcattggcggcacactaaaccccatactcagcttcctcggactaatagcacttctactaaccatcgtcctacaaagcaaagagcttgaggctacaaggactgaattagcaagggcggcatccgcgcaggaaaaaacagaaaacgcactaaaagagcaaacaaagacgcagcttagacaacaatttgaaagcactttcttctcactactagaccaacacaataaggctctagaaaaactatccaccatctctaataaatggacgaacagccgatcagaccttgatatagtaaaagaaaatgtattcaaagaatcagtaaaaaatctagcacaagcaaaagactctttagaaacacagaacaacttgtgcggccactattttcgcacgctctatcaaacactaaaacttatcgcaactagcgcaccaaacagcacgataggtgtaacttttgaaaccaactcaattgaaagcaccccaatcaatccagacgaaaagatgtacagcaatatcgttcgctcatttttgagctatgacgccacccaactgctcgcaatcaattgctattgttctggagagcatgacacctactggaagttcaagcttctaatcgagaggtactcatttcttgagcatatgccgttcgaaattaacaagagcaacaatgagctccttcagctaacaaaggacttttactcttccaaggcctttggtctcagccagttctcatag

SEQ ID NO: 340736 - DNA, 1176 bp, Pseudomonas aeruginosa
atgtttgaactggtcgataacatcgcacaaaccgccgtcataaaagtgatcggtgtaggtggtggtggcggcaacgccgtcaatcacatggccaagaacaacgtcgagggcgtcgagttcatctgcgccaacaccgacgcacaagcgctgaagaacatcgcggcgcgcaccgttctgcaactcggcccgggcgtcaccaaggggctgggtgccggcgccaatccggaagtcggtcgtcaggcggctctggaagatcgcgagcgcatttccgaagtgctggaaggcgccgacatggtcttcatcaccaccggcatgggtggcggcaccggtaccggcgccgcgccgatcatcgccgaagtggcgaaggaaatgggcatcctcaccgtcgcggtggtgacccgcccgttcccgttcgaaggtcgcaagcgcatgcagatcgccgacgagggcatccgcgcgctggccgagagcgtcgattcgctgatcaccatcccgaacgagaagctgctgaccatcctcggcaaggacgccagcctgctggccgccttcgccaaggccgatgacgtgctggccggtgccgtgcgcggtatctccgacatcatcaagcgtccgggcatgatcaacgtcgacttcgccgacgtgaagaccgtcatgagcgaaatgggcatggcgatgatgggtaccggctgcgccagcggtccgaaccgtgcccgcgaggccaccgaggcggcaatccgcaacccgctgctggaagacgtcaacctgcagggcgcgcgcggcatcctggtgaacatcaccgcgggtccggacctgtccctgggcgagtactccgatgtcggcaacatcatcgaacagttcgcttccgagcacgccactgtgaaggtgggcaccgtgatcgacgcggacatgcgcgatgagctgcacgtcaccgtagtcgccaccggcctgggcgcgcgcctggagaaaccggtgaaggtcgtcgacaacaccgtgcagggcagtgcagcccaggcagccgctccggcccagcgcgagcagcagtcggtgaactaccgcgacctcgaccgtcctaccgtgatgcgcaaccagtctcacggcagcgcggcgaccgcggccaagctgaacccgcaggattacctggatatcccggcgttcctgcgtcgtcaggccgattga

SEQ ID NO: 340737 - DNA, 408 bp, Pseudomonas aeruginosa
atgggaagtttaagaattcagaaggtagtttatgagggcgcaaattaccatttcgaatcccccctatttgatgaaaacctcattcttatagaaggtgacaacggaacgggcaagagcaccttctgcaatttgatctattatgggcttggcgggcgagttagcgaattcagccgtaaagagaagaaagagcagcacaaacaaattacagaagacaaagacaatcgcgtagagctttacataaaaataaacaatgaaagctacaaattaactcgccatatagacgacaacgatatagctgtatcatctaccctagaagcctgcgacatcggaaccaaatcaccagtattaatatacaacaacgatgagcccacctccatatttcaggtatttcgttctcctgaagtttag

SEQ ID NO: 340738 - DNA, 1062 bp, Pseudomonas aeruginosa
atgtctcacctgctacgaacagcactttttatcgctatctacatagccataccagcatctgcatcaactcagtccagccacgtctccgagagcgttccgactcagaatatttcacctccagctccagctccagctccagctccagctccagctccagctccagctccagctccagctccagctccagctccagctccaggaagtttcacatccaagattgaaatcaccagcccaataagaatactagaagaaaaccacaataacgaccttgcagctgcacaattattaattctacctaaaatagatgaggcgttagaaaaaattgacactctcaaaccatcatggcttgaaaaagttaccccgggagctctagcactttttggggtattgctcggcggactcataaatagaaccctgcaaaagaaattactagagcacaacaaagaagaaagcgataaaaaattatcattcgatataaaaatcaaaactttcgaatatagaaacaaacaaataaatgatttctacggaccactattaatattattaaaccaaagcaaagagcaaagcaaccagctacatgaaaacttgataaaactcgacagggaaagatatagatacgccacggaaaccataaaaaccactggagaaaagagaaagtccctatacatcaccacccataccctccctccaaaagcgtttagacttattgaggagcttccaaatttaggaataaattttaagatctgcctccctcaagttaaagtaataatagaaacaggcgagcgagttgccaagctaatagaggagaaatcaggactctgcaaccccaccaacattgagctcaatagttgcctcgggcgctatttagcacatctctcagcgcttaaggacgcctataaacaggcgaagcatggagcccccccaacagaaaacagaacttatagcgcagccttccccagagaaattgaaaaacttacacgaagcgactacgatgaaataatcaaacaaataaagaaatgggaatataaagacccacaaccacaaaacacagaaccggcctag

SEQ ID NO: 340739 - DNA, 624 bp, Pseudomonas aeruginosa
atgacagacaaaaaaccagacacagaaactatcgattactacaatagaaacatacttgagtatgacaatacgacatacaacctaaagcttgctgagcaatggagtgaatttctatctcaggtcaaacctcaaggggcaatccttgacgtagggtgcggaacaggccgggatattgttcattttaaaaatctaggcttttatgtagagggtatcgagccttcaactctgttggcaaaacttgcgagagcgcgcaccggatcaattattagagaagcatcagtcgaaaacatagagcataaggatagatacgacggtatctgggcgtgtgcatcattgctgcacctccctaaggcttcgctacccgaaacattaaaaaaacttacaagagccttaagggaagacggatgcctatatatttccctgaagcaaggtactgaagaatccagaaagccagacggtaggtattttagcagctatctaccgaacgagattaccatgatcctagataaaatccccaacatcagccagcccaaaatctggatcacggaggatgcagcattaagaagcaatacaaaatggataaatatcctcataaaacataaaaactcaaccacacaatcataa

SEQ ID NO: 340740 - DNA, 5202 bp, Pseudomonas aeruginosa
atgaacgcgcctgagaatggagtgcggcccgccccgtcacaagagttatttgacatcctcgatgcagagctcgataccgccgccaccgctgaacgccgagatcaaaaggtctatcacagccttcagcgacttagccagcttatcggcggggaatacggtgaccgcgtcgtctatgagcttttgcagaacgctcatgatgctcagaaggacactcctggtcagatcgcaattcacctagtggtgagtgcaccggattatgggcagttgtatgtagccaacggtggcgcgggattcgatcttgagaatctacaggcaatccggaacatcgcaaatagtaccaaagacatcggcgagggtattggtaacaagggtgtggggtttagaagtgtcgaggcgcttacggacgacccccatgttttttcctgtcgcggcaaggcagagccgcgggagcgctttgacggttactgttttcggctagcctcgcaggatgaggtggagcatcgcctcgtccgacttggccattcggatgtcgcagcgtccgtagctgcgacgatgccacgatatttggcggcgatccccgtagaagatcatcctgatgagatagacgaatttgctcgtgagggctacgccacggtcgttgccctaccattaagatctccagaaactgttgcacttgcaatccgccaaatcgaggagctagtggactccgaggcgcccgtgctcttatttcttgatcgcatcgcgagccttgaggtccgggtcaaaggcgtcggacacttgaagccttgcatacgcctgactcggcaggttgctgaattgccaggaggcgttgtgtcagcgttacccgtgcgatttgagctcgtcacgcttgggccgagtcgccagcgatggttgctggtacgccacacggtttcgaaggcgaatgtggtcgatgcagtagagcgaagcatagttctagagccgggattgaagcgttggatcaactggcgcggcgacgcaatcgttagtgtcgcagtaccgattgaggggcctggcctgcaaaaggggcggcttttcaactttcttcccatgggagcggatgcccaagcccccttcttcggtcatctcgatgccccctttttcacatccatcaaccgggagcgcgctcgtcttgacctccccctgaacgcctacttcctatccgccgcggccgaaatctgtgcgacagctgcgcaggtgctatccggcatgctgaaggatgtgccatctcgctgtgctgtcgacttagtagcatggcgaagcaacgacgctgcgaagctcattgccggctttcaggcgtcgggagtaaacatttccaaggccgaggtatggccaaccacagctggcggttggaagactattcgctcagtccaatcctggcccaccggcgacttcaaagtcttcacatggagtcgagcaacgaaagccggagcgcaagatattcttagcaccaagcttggcgctgaccgactcactgccattgaaaatctagcgagagctctggggcatacatgcaccccctcaaaacacatcatggctggttgggcggaggcaatcgcacgatcgttaccacactcgtcgaaggaggataaatggggcgatttctatgcggagttggcgtacacatttcgccaggaagggctcttgctactccgaggcaaagatattcttctggatagagatctagttctcgtggccgccagcgaggatgtctatgtacgacaggacggtgcacgccgtcggcgtaccgagggggctccacttccaccagcgacccttgctcgaaagctcacgattctcgctgacactattaagttgaagccagaaactgtctctcacttcgagcgagcaggtctttggcgtcgctacgatgcaacagaaatcttagaacgcctccccacactgttcgggaacaagcctgcgggcgcgcgacgagaagctgctctgctatgggcgtttgaagtctggcgacatgatggtcctgcggcccgtcgcgcactggagaaagccgatctgcatgtccccacccggtcaggctggatgcctgcgagaaaagcgtcgttctctcaggcatggactgaagctggtcacgatcttgactcctacttagctgaggcgcgcagccattgtgaagactgcgaatcagcggcgctggcccttctggtcgatgttgccgcttggcccaaaacgattggagatcgacaggagtggcttcgcttcctcaaggacgccggggtagttgatggattgatcgcgattccggtggccatgtctgagaaacccatttggggcagccatgtgcagttcgccctttgcggaacgaaagatcctgcaatggacttagtgtggtggagcaattgcggcttcagctccgtggcccatccgtatacgaattactggagacagggagaagctttcaagctgccgggccaatcagttgtccatgccctttcggatgaaaccaggcgtcgctttgctgcactagtggtgcgccacctacagcagttcgggcacgcgcatctcacctttgaattgctgcgaaaggaccgtgatccgaaacaccaagataaacacaccttacggaccccaatttccacgttcctatcgacagcggcctggttcccgatggagtccgctggcgggtatacgtttgtgccgctggccgaaggctggttgatcacggatcgccggatgcagttaaaattcgtcccgagggcgacggaagaaatccaagcccttcttcgcgagggggcggccgctgacctgctttccaccgcccccttccggttacggttttggcgtgacaaaacgacggccgcagatcgccttgacgtgcttgccagcgtctgcaatgaggtaagccagcatgagcgcccccatctgcgacgccattacgacgaggcgtggcaggacctgcttgagcttggccaactgcctcatggagagcacctcattgttgagcgttcaacaggtttcgaatgcctagctggcgcaaatccggccgttcccatttatctaagaactgaacgaacaacagacctagcaaagctgctcatcgacacgggagcggcagtgcttgtatccagcggcgagcgtccaatcgagccgcttatccaggccatcaattctattggcggcttttatgcgcgctcagtagacgaggcagacatccgcctactaaccgacggcgaaccgttcaggagcagtcttgccgacccccttttggtggatatcgtcccttggcttgcagaagccctcgtacttggccatgaactcggcgcacgtagtatcgaaaaaagtgccaatgttggctccgttttggagcgattacgtcgcctgcgcctgagacagttgtcatctattgagcttgcttccggcactggcacagcaaagaggttgaatcgatatcttcacagagatgaagaatgtcccacgctcctcgttgtagggcggttaaatgtcgcaatgctgggcgattcggccagtatcatcgcgccatttgtgcacccgaatctccgaacatttgagctgttgcttgtgcgactcgctttcagacttcctgaaaatattgcgttgacctccttcaaaccgacggaagccgattatgcccacgcggtgcaggcggatgtcgacgccgtacgtgaacacttggcagcctaccgccacgacgacggccgaaaggtcgagttgttgacgccccttgttgcctactatgccggggtcgagatcgcgcgggcacttacccaaaaactctcgaatgctggtttcactcaatgggcctcgatactcggaaattatctttccaaagaggttgttcagaacctgttgactgcaatcgagaagactgaagatctggccgtattgcgccggaatttagatcttgaatacgcacgctttaaccacatcttagtcgagctcggccgaggttcgctcgcgagtgagtcggaactcaggcgtctgttcgatctatggagaaacgagttacggccggagctacgtgatcgtctgcgccgacatttcgctcccctcttcaacgaccccgcggccttcatgctttacaccgagtggcgcagtttagagctgctcatctttgacgaatcctggatagcgacgcacgagacactgacccgcgaagatgtccagctttatgcaaaacggattttcggtgatgcatttggggaggaccctggcggagaactgtcagagttggaaacgttgcggagcaataaccgaaaaacggtgatatcggctgctcagcgcgctaaagcggtactccaggcggccgctcctggccagcttgcacctgagtggagcgagggtcctgccgaaatcgcggcagccctggaccgcaagggcttcctcgactttcatgccgtggatgaggctgaaatcctcgtgctgctgatacgtgccggactttggccagaaggggttgctcaaagcttagacttgggtacgcacggtttgagtgtggacgacctcgaccgagtgaagtcacgggccgcagcgcagcaggcagaagagaaggtgcgtcgcaaccgcattgaatttgctggtcacaaatttgatgccagcgacgacgacttcgcgagccaatttgcgagcaccgcgcacgcgacctttgctgagagtagctggcgggagcgtagcagccttcgcttgactgacctcgcaatccaaccagagttttcgagcgggggcttccgcggggcaggtggaaaagggacgtccagacttcctcctaggccgcctgaagcggtccgcgctgccattgggctagcaggagaattgcttgcctttcggtaccttgagcgcaagcatcgggaccacttttcagaacaatgctgggtgtcggagaatcgtaagagtctattcccagaagacggtgatctaacgctcggatatgatttcagagtgaataccagggagcgagaatggctctacgaagttaaggcaaccccaaacgaggcctgcgaatttgaactaaccgacaacgaatatagagttgcgatatctgccgcagccgatcgcagtcggcgatatcgaatcctattcatccagcatgtatttgacccggaacgctgtcaaatccttgaactgccgaatcctgcggccgaagacggcaagttccgctttcggatcgttgggcgaagttcagtgcgtatgaggtttgacttaggctag

SEQ ID NO: 340741 - DNA, 870 bp, Pseudomonas aeruginosa
atgacgattactgaagcaatcaagcaagtcatgaagtcccgtaattctgcaatgaccgtgggggaggcctatcgagctattgtagatgcagggttatacgagttccatgctgataatccagaacatattgttcggagtcaaattcgtcgtcattgcgaagggcttgattttccgagttctgctcctactaaatattttaggcttgtgggcgagaaccgatatgagcccattgagatggtagtaaagcagccaagcaagcgatctccaattgctgctttgggcgatgagtcgaagagaaattcacatacttccagtctttttgagctacaaagtcttcatgttaaatacataaatgaacttaagcggaaaattcttggtgatctaaaacgcatgtcaccagctggttttgagatgttctcaaagcgacttttggatgtttatgggtttcatggtaccaaggtgacgcaagtttctggagatggtgggattgacggctatggagagttgaaagtagggcttgcgagtttgaatgtcgcttttcaatgtaagcgatgggtaaaggggaatattcaaaggccagagattgataagtttcgtggtgctgctcagggagattttgagcagggaatattctttactacatcttcgttttctgagggcgccgttgcggcgtctattaagcgaggggctgttcctattattttgatcgatggagcagcaattgttgatctcatgatagagaaggggtttggggtgcaaatcgagacgctattgattccttcttatgcacttgacctagcactagggagtgacgatttggtgagaaatactgattctgagcacgttcgtagaggacggcgtgataactga

SEQ ID NO: 340742 - DNA, 1998 bp, Pseudomonas aeruginosa
atgagcagacgacaaactgcagcgcccttccgatatgaatttgaaaaagacggcgcctttggagtattcaaaaccaacggctccgtccccatagaatactttatgacatcattcaagatcgatgaactgtcgtatctatcctacgctaaagacgtcaacaccgacctcaactttgattacttaatccagcgagacattgacgaagagcgagccattgctgaaatcagccagtacttagcaaaggaagaaggaattcaaaaggatgtcgtttttttacctccattattagttggcgttgtctttgttgaccaagataaacgcatcgaagattactacccaagctcaacattcaactctgataccgattccgttggtacgttgcatatcagagagtggccaggtgttctgaaagtcaccaactatcaagtcgaccaggaagagcctagaacattctcctgtggcgacggggagcaccctgtagccattacagtagacaatgcaaaaattcaagtaaatatcacacccaatggagtgaaaggcgctaggctggtggtcattgacgggcagcatcgactatttgcgttaaacgcgttacgcgccaatcatagggacttggtaaaagacctgacattacctatctgcctggtctacccacccaattccattgaaagtaaccgcgacatgcagcctaaagtaccagaggtacttcggcatctcttcgtcgacgtgaactcgactgtagaacgtgtcagcgggcattttctcaccttgctttcggaacagaccttgggctccattatttgtcgggagttctgcaaagcggtgctggaacagaaggatggtgagggcctcggtttaattgaatggaacacgaaaaaccacaaacaatcactggagatttctcgcgaacacaccttgaccagcattggggtgattaacagtgccttcgaggagctctttaaaaccaaaaatggcgtcaagctgctggccgccattctcggcatcgataggcaatccagcgaattcgattttggctccgacgaatacgatgaggaaaaaagcgcgccggagtatttcccgtggcgcgacttcctgtctcgccatcgcgctcgtctcgtttccctcgtgaacgaaaccatcacaccagcactggttgatatgttcttcaacacccccttctatgctgagtactgcgctcaattcaaaaactactttgtcaccaccgaagaggaactcaaacgcgagcgccgtaacgaccaaaacgtgttttccatcgttaagggtcatgtactgtttaacgacatcctctccaaaccggcgctcgccatgcatgcgatggtacgtgaagagctgagatcattaatcgaccaaacaatacccgatttttcgcgcaaagccattttccaaaaggccatgattgaagcgtggtcgctactctgtgcaaaattcattgccaatggtattccgctagcgcgagcttctcattacataacggtattcgtggcgaattcattcgcccccaaatctgacctgtttgatgaacgacacctgtatctccaggacacaatttttagtggctcgcgcatcaaagtaaccaagtcggcgaaacgccagattgttcgactgctgttatctaacgcggacaaggctgactccgtcgactcgaaagagcagcaagtcatctcagacttagccaaagaagaagtcggtagctttatcaaccaaatgcgcgaagacaagcgtaaggttttcgagaaatcctaccgcaccaatttcaatctgccagcatttgaacgcgagcgcctgtacacggctgagctggacaaaccccgcgagatgaaggagtttggaggcgactcttcaaaaacccagttcgatacgctggtcgacacactcatctctgagaacttgaccgactcctttaatgacttggttcgcaccctgaaagccaaagactttatctactccaagagtgaggagtttgatgaggagctataa

SEQ ID NO: 340743 - DNA, 1266 bp, Pseudomonas aeruginosa
atgaggagctataaggatgtattcttctccaccttggacggagatagccttgacccaactcgtaaagagctgctctgcgccgcagctctagaatattctgagtttctcattgtctcaggctctcgcagcttgctggccgacgttgcacaacatatttatgctgcggtgcaaatccaccctcggtgtctgctggtaccaaccagtactgtattagccacggtggagcacttcttgacgcacgcctatctaccgattgatgtagatcgacgctttataaaatttgatcttaacacggggctctcggcggaggtcccccagctgcgcagtacggatttcgccacagatcacgagaatacgacccgctatcttcacgagacgcagtatctgcacccggttgtcaaatatacagtggaagcggcctgcgcgcagcacagtgagctaagccgtcatatcagccgactattgattggctacagcttcctgcccgacacgttactgaggagtaaaagtctgggcaccgactttgacggattgcaattgcacgaactcaaagcatttgtcgaccatattgacaacctaaaaccaaccttcagcatattcaagagtgatatcgacagtctcaccagctattgcaacggcctactgatggtatgcccaaccaatgccaccgacctgtccaatgcataccccaccgccgcccttcaaaacggctttccttgtgtgtacaaggtgatgtcagtaatgcattatttgggttacgagctatccatgcgccgccagctatacaacaaggcgttcatgcacatttttcgagcctatgagtgctacacggcgggcgccttattcctgcacaatgctactatcgccaactacacagacaaaagaggcacattcccagacgtgtacattctcgacgcgaagatggttctaggctttagcccaatttataaaagtatcggaaaccacttcaatctacagcaaactactgactacggatcctgcaagttttacatcgacctacgcaataaattccattacactcacggcgatattaaacccagcaaagtgctcgtcctagagtttgcccgtgcggtattgcggcagatcctaaaaattgaaaggatcggcaaccaacaaaccttccgatggaaggatgtctacaagcagaccaaggataaacttctcagggatggcagcgcagaggtcgcagcggccatcacccgccacctaggaattcacccattggtcaccctcatggagacatga

SEQ ID NO: 340744 - DNA, 1083 bp, Pseudomonas aeruginosa
atgaatagctacgtgcactcttttccgtgcgtccgcggcatccaggccggcagaccttgctatatagcgatgtgcccgatgcggctgatacctaagatcttcattttcaatgaggatagtgtgccggcagatctccgcgcgcagcgcactctgaacatcgctcgggtgcccgaaatagcggcctacctgctggataaccgcagtgattacaccttgtcagcgatcaccgcgtcgattgacggcgcagttcaattcaatcctgcgtcggacacaggcttggaacaaagtgtcggtaccttgtccattccgatggatgcctcgattcttatcaatgatgggcaacatcgacgtgcggccatcgagcaagccattctcgagaatcctgaattgggttatgacaacattccggttctgttcttcattgacgaaggactcaatcgcagccagcaaatgtttgctgacctgaataagcatgctgtgaggcccagcgactctattagtacgttatatgatcaccgagatcatatttctgagctggcccgctatttagctaagcacgttgatgttttctccagaatgaccgagctggaaaaatccagtctgtcccaccgtagctccaaactgtttaccctgagcgccataaaaaacgcatcgcgaactttgctaaaaaaaggtaagggcgaccttatagcgcaaaacgagcgcgaattggcaaaatctttctgggaacaggtttcgttacaaatgcctgattggctcagggcgaaaaataaagagttatccactgcggagttgcgggataactatatccatgcccacggtgttctgcttcaagccatgggcctggtgggatcagagctgatcattcgcaaagagtctgaatggaagagcaccctcagtaagcttcgacacatcgactggtcccgagccaatccggaatgggaaggccgcgccatgatgcatgggcgaatttccaaggccacctacaatgtcactttaaccgccagtttcatcaagacaaaacttggcgtaccgctttcaacaggtgaaaaagagcttgaagataggttgtctaaacaatga

SEQ ID NO: 340745 - DNA, 1527 bp, Pseudomonas aeruginosa
atgagcgctgagcagtttctctacccatcgcacgatgaattcgtcaacgaagcgatcattgctggccggcctttgctagatctgatttacgaaattcagagcatttacaaagcggacaaacgtccctgggtcgttggatttagcggcggcaaagactctaccgtagtgctttcgcttacgtactacgccttgaagagactagcgccggaagaacgtcacaaacacgtgtatatcgtttcctcagacacccgagtagaaacccccgtggtggtggatatgatccgcgagactcttgagtcggttaatgctcaagcagcccaggaccagattccgatgagtgcacactcggtgatgccagaaaccagccagaccttctgggtcaacctgctgggtaaaggctatcctgcaccgaccaaagcctttcgctggtgtaccgagcggatgaagattgacccggtcagcgggtttatcaaggacaaggtggctcgttttggtgaggtagtggttgcacttgggtcacggcgggaggaaagctctacgcgcgcccaggtgattgcccgtcaccgtatcgacggctcggcactcgggcggcacacctcgctacccaatgcatatacgtacatgccgattgagctctggcactccgcggatgtctgggaatacctcatgagcgcggcacggccatggggaggctccaaccgcgtactctttgaattatacaaagactccaatgccggcgaatgcccattggtgattgataccaatacaccatcctgtggcaactcccgattcgggtgctggacctgcaccgtcgttacccaagacaaggcgattgaaggcctggtgaacagtggtgaggactggatgaggccattgctacagttccgcaatcaactgcacgccagctcgctccccgagaacaagaccgagtaccgcaactacaagcgtcgtaccggcaaagtgacatttgcccgtggggcaattgatgatgactcgacgtcctcgaccaagcacgtgcccggcccgtattggatgagataccggaaggagtggctgaaacttttactggagatcgaaaaaggcattcggcaaaccaatcgtgacctcgaactgatcggtcgtgacgagctgcaggtcatccgccagcaatggttgaaggatcccaacgagcccgactgggttgactcgctgcccaaaatttatcgtgaagtctaccccgacgacaccattgaatggatcaaaaacgacgcaggggccttcacggagccggatgcagcaattcttaatgcccttgaggcagagaaaggcgtgcccgcggtactgatcatgaaattgattgatgccgaattgtcattctcgggtctgactcgtcgaaaagggatccttggtgagttacagagaatcctcgagcaagactggggaagcctggatgaggctttggagcgacgctcgaccccttcgtcagatgatatgtacaaagccgcttttgaatctctaaaagctgaatatgatgacttgctccaatga

SEQ ID NO: 340746 - DNA, 2013 bp, Pseudomonas aeruginosa
atgattattgatgccctatcggtcctggattttcgcctgttcagcggagcccacaatttcgatctgatcccaaagatcaagcacggtaagcatgcgcctatcgttttatttggaggtttgaatggcggtggcaaaaccaccatcctcaacgcactgaagcttgcgctgtacggaaaaggtgtcttgggcgccagcgccacgatcagcgattaccatgcttacctgcacgactgcattcatcgggcgcacaatagtattgccaaacccacccgggcggcagtggagctgacgtttcgttatgctcaacacggtgttatctccagctaccatttgactcgcgactggtacgtggatcgtgcaggtaaaatcaaagagggcctgctcatcgctcgcgacggccaacccctatccgagttgtcctatgatcaggcgcaatcgtttctcaacgagttgatcccaatcggcgtttccgagctgttcttctttgatggtgaaaaaattgccagccttgctgaagaaaccagcggtgacgccttacgcgaatcgatcaacaagctcctagggctggatcttatcgaacgcctagactcagatctcgcggtcctccttaaaagccgttcgctcaaaaaagcctctgaagaacgtcaggtcaaaatagtcgagacggagcgcgaattcgacaccttgcatcgtcagcttgaaggcgtccgtgataagtatcttaatgtgcgcgtggatatcgccgagattagccacaacttatccaagaacagcgcaagcatcagtgcacgcggcggggcatggagtgcgtcgaaggaagaagagtctgccagactggactccctgatcacgcaaaaaagggccatcgaacatacgctgcacgacatgctaagcggcctgttgcccctggcaattcccaagagcctgaacgagaaactggttgcgcagctcgctgacgaacaacggctcaccaaagcgcaagtattgtctgagtatctagaacggcaacaacgccagttcttcgccaagttagaagaaacgctggagatcggcgaggacaaacagtccatcctgcgcgatatatttttgcagacatttggttcggaagtcaccgtccctcacccacatcagccaagtatccacgcgcttacggacagccattcggcaggcatcgcccatcgactgcagatcgaggtcagctcgctacaacagcgcgccagaggcctagttgaacaactccacgatcttgactcagcgatcgaaacagcgggtgagaatcttgcccgcgcgcccgacgagaaggtgctgattccgctgttccaagagcagggccagctacaagggcgactggctgttctcaatgagcagaaggcacttctacaagaggaagcaaaaggtctccttaaccagatgtccctgtgcgcccgacgcctggatgagctgcacgcggagattgcccaatcgcaagaagatgctcgtatgcacgcacttgcgcagaaggccagaggggtactcaaagagttctcatcgcgcgcgcgcgtggagaagcttaaggaactggaggcgcagttttactcatctttcaatggcctcgcgcgcaagaaagacagacaccttagtattcaaatcgatccagcgagctttgaggtaacactgatcgatgaccaagggatggcgatacgtaaagacgaactttccgcaggggaaaaacagatctttgccatctcgatcttggaggctttggcgcgtacatccgggcgaagcttaccggtggtaatcgacaccccgctcggccggctcgactccatccatcgcaaaaagctggtggaaaactatttccctaagaccagtcatcaagtgattattctttcgaccgatactgagattgacaatgccttctatgaggggctccagggcagcatctcgcactcctaccacctcgtatacagcccagaggatcgttcaacgcatgttgaagaaggatacttctggcggtgggcagacagcgtatga

SEQ ID NO: 340747 - DNA, 363 bp, Pseudomonas aeruginosa
atgaatacattcccacataaattcagggtttccgcctcttcgacagcaaaactgaaatttctaaaatcgaagaccggcctgacccctaacatcctgtgcagatttgccatcgccttagccttggccgacgaaaatggattgggtaatgccagcgtttccgatttggaggggcaggagttcaatgcgcccaccctctttggcgagcacctggacatttatgaagccttgctcaggcagtttacccacgagagtgatctgtcttgggatccgatcagacacgttgcctcgctggttgaagtcgggttgcataagatgggccatgtccgctcgatcaaagatgtcgcccaactgatcaaagcttag

SEQ ID NO: 340748 - DNA, 213 bp, Pseudomonas aeruginosa
atgaagttcaaagctctgttcgctgcattgctgctgaccagcctggcgggttgcgccaaccaggcggtgctcactttgcaagatggcagcgaggtcctggtcaaggatcagtcggattacgacaaatacaatgactactacgagttcgaacagctgaatggcgacaccatcctgatcaagaaggacaatgtgcgcaccattcgcccgcagtag

SEQ ID NO: 340749 - DNA, 684 bp, Pseudomonas aeruginosa; identical to SEQ ID NO: 323551

SEQ ID NO: 340750 - DNA, 1035 bp, Pseudomonas aeruginosa
gtgctggatgtacccgttttgctggctgccgtatccccggactcgccctgtggcgacgatctggagtacgacgccgcgttcctcgaactcgaacgcatcgcccagggccaacccgagcgccagatgggcgatgccgtgctgcccgccgaaccgccggagtggccgcgcgtacgcgcgctggccagcgaactgttcggccgtagcaaggacctgcgggtagccaacctgctgctgcagagcaacgtcgccctcgacggcctggacgggctcgccgacggcctgctgctggtccgcgagctgctcggccagtactgggacggcgtctatccgctgctcgacgccgatgacgacaacgaccccaccttccgtatcaacgccctcaccggcctggtcgccgaaccgctgctgcaactggtctgggcgatcccgctggtgcgctcgcgggcgttcggcccggtcaacctgcgcgccgcgctgaacgccgccgggctgcaacgcttcgccagcgagaccctgagtcccgagcagatcgccggcgccttcgccgatgccgacgccgatgcgctggccgccacccggcgcgccctggaaggcgcccaggaacatgccctggccatcgagagcggcgtcgccgaacgggtcggctcggcccagggactcgacctcggtccccttcgtcaactgctgcgccaggccctccaggtgttcgacctgtacggcccgcagggcgccggcgagcccttggcgccgggtgccgaggcggccgccgacgagcaggggggcgccgcgcctgtcgcagccgtcgccgcgccggcaccgcgagccagcggcgagatcgccaaccgcgaagacgtcctgcgccagctcgaccgcctgctcgagtattacgttcgccacgagccgtcgagcccggtgccggtgctgctcaagcgcgccaagacactggtgacggccgacttcgccgaaatcgtgaggaatctcatccccgatgggatttcccagttcgaaaccctgcgaggcccggaaagcgagtaa

SEQ ID NO: 340751 - DNA, 519 bp, Pseudomonas aeruginosa; identical to SEQ ID NO: 323553

SEQ ID NO: 340752 - DNA, 1497 bp, Pseudomonas aeruginosa
atggccgaattgagcaccgagaacctggcccagggccagaccaccaccgagcagaccagtgagttcgccagcctgctgctgcaggagttcaagcccaagaccgagcgcgcccgcgaagcggtggagaccgccgtgcggaccctcgccgagcatgccctggagcagaccagcctgatctccaacgacgcgatcaagtcgatcgagtcgatcatcgcggcgatcgacgccaagctcaccgcgcaggtcaacctgatcatgcactacgccgacttccagcaactggaaagcgcctggcgcggcctgcactacctggtcaacaacaccgagaccgacgagcaactgaagatccgcgtgctgaacatctccaagccggagctgcacaagaccctgaagaaattcaagggcaccacctgggaccagagcccgatcttcaagaagctctacgaagaggaatacggccagttcggcggcgagccctatggctgcctggtcggcgactactacttcgaccagtcgccgccggacgtcgagctgctcggcgagatggcgaagatctccgccgccatgcacgcgccgttcatttccgccgcctcgccgacggtgatgggcatgggttcctggcaggaactgtccaacccgcgcgacctgaccaagatcttcaccaccccggaatacgccggctggcgttcgctgcgcgagtccgaggactcccgctacatcggcctgaccatgccgcgcttcctggcgcgcctgccctacggggcgaagaccgatccggtggaagagttcgccttcgaggaagaaaccgacggcgccgacagcagcaagtacgcctgggccaactcggcctacgcgatggcggtcaacatcaaccgctccttcaagctctacggctggtgctcgcggatccgcggcgtcgagtccggcggcgaggtgcagggcctgccggcgcacaccttccccaccgacgacggcggcgtggacatgaagtgcccgaccgagatcgccatttccgaccgccgcgaggcggagctggcgaagaacggcttcatgccgctgctgcacaagaagaacaccgacttcgccgccttcatcggcgcgcagtcgctgcagaaacccgccgagtacgacgatccggacgccaccgccaacgccaacctggcggcgcgcctgccctacctgttcgccacctgccgcttcgcccattacctgaagtgcatcgttcgcgacaagatcggttccttcaaggagaaggacgagatgcagcgctggctgcaggactggatcctcaactacgtcgacggcgacccggcccactccaccgagaccaccaaggcccagcacccgctggcggcggccgaagtggtggtggaggaagtcgaaggcaatccgggttactacaactcgaagttcttccttcgcccgcactaccagctcgagggactgacggtatcgctacgcctggtatccaagctgccttcggccaaagaggcctga

SEQ ID NO: 340753 - DNA, 489 bp, Pseudomonas aeruginosa; identical to SEQ ID NO: 323555

SEQ ID NO: 340754 - DNA, 786 bp, Pseudomonas aeruginosa
atgatcgccgaagaactgttgcgcgccgggcgcctggacgatgccttgaaagccttgcaggaacaggtgcgcagccagccgtcgaacgctaccctgcggatcttcctgttccagctgctggccgtgatgggccagtgggcgcgggcgcagaaccagctcaaggtggtcggcgaactggatgcctcggcgctgccgatggtacagacctactccaccgccatcgactgcgaggcgctgcgccgcgaggtgttcgccgggcgcctgacgccggtgatcctcggccagccggcggaatggatcgcgccgctgttgcaggccctgagcctggacgccgaaggccatggcgaggccgcccaggccctgcgcgagcaggccttcgacgccgcgccggcggtgcccgggcggatcggcgaggcgccgttcgcctggctggcggatgccgacacgcgcctcggcccggtgctcgaggtaatcgtcaacggtcgctatgcctggttgccgatgagcaacctgcgcagcctcaaggtcgaggcgccgagcgacctgcgcgatctggtctggctgccggccgaactgaccctggccaacggtggcgccaccgtcgcgctgctgccggcgcgctacgcggaaaccgtcgagcacggcgacgacgccgcgcgcctggggcgcaagaccgaatggctggacagcggcctgccggtcggccagcggctgttcgtcaccgatgccggcgagaccgcgctgttcgacctgcgtgaactggacttcgagccgacggacgcctga

SEQ ID NO: 340755 - DNA, 1860 bp, Pseudomonas aeruginosa
atgaacccgcgcctgctcgagtactacaaccaggaattgcaacacatccgcgaaagcgccgcggagttcgccgaggaattcccgaagatcgccgggcgcctgtcgctgtccggcttcgagtgcgccgacccctacgtcgagcgccttctggaaggcttcgcctatctcaccgcgcgggtccagctgaagctcgacgcggagtacccgaccttcacccacaacctgttggaaatcgcctacccgcactacctggcgccgaccccgtcgatgaccgtggtgcagttgcgcccggaccccaacgaaggcgccctgagcagcggcttcagcgtcgagcgcggggcctccctgcgcggccagctcggccccgatgaccagaccgcctgcgaataccgcaccgcccacccggtgaccctgtggccgctggaagtggcccaggccgactacttcggcaatcccgccgcggtgctcggccgcctcgccgccagcgagccgcgggccaaggccggcctgcgcatccgcctgcgcagcggcgccggcatcccgttcgacagcctgtcgctggacgccctgccgctctacctgcacggcgccgacgaacaaccctaccgcctctacgaacaattgctcggcaacgcctgcgcggtgttcgtccgcgccccggacaatgcctgggtcgaacgcctgccgacgagcagcctgcgtgcgcgcggcttcgacgacgaggacgcgctgctgccggtggtgccgcgggcgttccagggctaccgcctgctgcaggaatacttcgccctgccggcgcgcttcctgttcgtcgagttctccggcctgaaccgcgccctgcgtcgatgccacggcgaggagctggaactggtcgtgctgttcggcaagcacgaccagcgcctggagggcacggtggacgcggagcaactggtgccgttctgcaccccggcgatcaacctgttcccgcgccgctgcgaccgcatccacctgtccgaccgggtcaacgagcatcacgtgatcgtcgaccgcacccgtccgctggatttcgaggtgcattcgctgcaacaggtgagcggccacggcagcggtccggagcaacccttccaaccgttctacgcggtgcgcgacccggcgcgctacggccgcgagcaggcctacttcagcgtgcgccgcgaaccgcgcgtgctgtccagcaagcagcggcgcaagggcccgcgctcgacctacgtcggcagcgagaccttcgtcgccctggtcgacgccaaccaggcgccctatcgccacgacctgcgccagctcggcatcgccgcgctgtgcaccaaccgcgacctgccgctgttcatgccgatcggcgcgcacaagagcgacttcaccctggaggacagcgcgccggtcatgcaggtgcgctgcctcgccggaccgagccggccgcgcgccagccgtgcccacgatgccagcgcctggcggctgatcagccagctgtcgctgaactacctgtcgctggccgagcgcggccagggcgccgccgccctgcgcgagctgctgcggctctacggcgacagcggcgatccggcgctgcaattgcagatcgagggcctgcgcgaggtcagcagcaagccttgcacgcggcgcctgccgatgcccgggccgatcgtcttcggccgtggcctggagatcaccctggacttcgacgagaacgcgttccgcggcaccggggtgttccttctcggcgctgtgttcgagcgcttcctggcacgctacgtgtcgatcaacagctttaccgagacggtgctgcgcaccggcgaacggggcgaggtgatgagatggcaggcgaagccgggcagccgtccgaacctctga

SEQ ID NO: 340756 - DNA, 138 bp, Pseudomonas aeruginosa
atgcgtacgctgatccgcctggttcgcacgcttatcctgctgctggtcctggcgctgctcgccggcgcctggtggtggttgcaggacgaggccctgcgccccccgcgctggccggccacagcgaggactcgagtctga

SEQ ID NO: 340757 - DNA, 1743 bp, Pseudomonas aeruginosa
atgagcaagaccctccactaccgtgcgtgccatctctgcgaggccatctgcgggctcgccatcgagaccgagagcgacgagggcggcgtgccgcggatccgctcgatcaagggcgacccgcaggacagcttcagccgcggccatgtctgtcccaaggcggtggccctgcaggacatccaggacgaccccgaccgcctgcgccagccgttgcgccgggtcggcagcgagtggcagccgatcggctgggacgaggccttcgcgctggtggccagccgcctcggcgagatccgcgagcgccatggcaacgatgcggtggcggtctaccagggcaatccgagcgtgcacaactacggcctgatgacccatagcaactacttcctcggcctgctgaaaacgcgcaaccgcttctccgcgacttccgtcgaccagttgccgcatcacctggtcagccagcagatgtacggccatggtttgttgatcccgatccccgacatcgaccacaccgacttcatgctggtgctcggcggcaacccgctggcgtccaacggcagcatcatgaccgtgccggacgtggagaagcgcctgaaggcgctgaaggcacgcggcggccggttggtggtggtcgatccccggcgcagcgagaccgcggctatctccgaccggcacctgttcattcgtcccggccaggatgcggcgctgttgctcgggatactcaacaccctgttcgaggagaacctcggtcgccccacgccgctgccggtcgacgggctggagcgggtgcgcgaggcggtcgcggccttcgacgccgagtccatgagcgcgcgctgtggcgtgccggccgaaagcattcgccaactggcgcgggatttcgccgccgccgaacgggcggtctgctatggccggatgggcgtttccacccaggccttcggcacgctctgccagtggctggtgcaactgatcaacctggtcaccggcaacctcgaccgggtcggtggcgcgctgtgcacctcgccggccctggacctggtggcgagtacctcgggtggccacttcggccgttggcgcagccgcgtctcggggctgccggaatatggcggcgaactgccggtggcggcattggcggaagaaatcctcggtgaaggcgaggggcaggtgcgcgcgctggtcacggtagccggcaacccggtgctgtccacgcccaacgggaggcggctcgaacaggccctggacggcctggagttcatgctcagcatcgacctctacatcaacgagacgacccgctacgccgatctcatcctgccgcccaccgcgccgctggagcacgatcactacgacatcaccttcaacgtcttcgccgtgcgtaacgtgacccgtttcaacgaggccgtgctgccgcgtcccgagggtgcgctgcacgactgggagatcttcgtcggcctggcgcgggccttcgccgcgcgcaacggcctggagctgaaaccgaccctggagccgcagcagatgatcgacctcggcctgcgcgctggcgcctacggcgaccgttccgagcacaggctgagcctggccactctgcgcgaacatccccacggcatcgacctcgggccgctgcggccgaacctggcgccgcgcctgaagaccgccgaccagcgcatccaggccgcgccgccgctgttcgtcgacgacctgcaacgcttcgccgcacagccgctgcctgcgtccgaccagttgttgctgatcggatga

SEQ ID NO: 340758 - DNA, 387 bp, Pseudomonas aeruginosa
atgagtcgtgaagccctgcaggaaactctgtccgctgtgatggataacgaagcggatgaactcgagttgcggcgggtgctcgcagcttgcggcgaggatgccgagctgcgttccacctggtcgcgttaccagttggcgcggtccgtcatgcaccgcgagcctaccctgccgaagctggatatcgctgcggcggtctctgctgccctggccgacgaggccgctccgccgaaagcggagaagggaccgtggcggatggtcggtcgcctggcggtcgctgcctcggtgaccctggcggtgctggccggcgtgcgtctgtacaaccagaacgacgccctgccgcagatggcgcaacaggggccaccccgcagatcgccctgcctcaggtga

SEQ ID NO: 340759 - DNA, 192 bp, Pseudomonas aeruginosa
atggccagctcatcggtcctccaggcgccaacccgcggcagtagcccgcagttcgccgtccagcgccaggtggcggagaaacaccgggtcgtgggacaccaccagcaaggccccacggtactgcccgagcatgctttccagggcctgccgcgcagccaggtcgaggtggttgtccggttcgtcgagcagtag

SEQ ID NO: 340760 - DNA, 1146 bp, Pseudomonas aeruginosa
ttgtcaactgttaaaaatgtgggtaagtgtcgaacactgcttgagattgaggagatcatctctcaaatcgagtcctccgacagcgatacgatctttcgcttttccatagagtcgctcgaggctcgtcatagcccaatgcatgatgcgtcacgcctgcagatggtcgctacgcttgctcgacagagactcgaaaatggttacctggacattcatccaaacactccggagctaaacgctcagcaggccgtctgtaattattcaccgggcatcgcaggtgtccggctgtccaagggtatacgccttggggacaaggaaatcgatcgacgagatgttctggccttcgctaccgaacggatgaaagcgatggacgcacaagactttgaccaggtcgtaaaagggcgctgtatcgatctcttgtgcgtcggaggctccaaaatccaatacttgcagccgctgttcgcttcacgaggcaaggccaaagagaaagacgacatggccccggtgatgcgtaagctggttgaccgtgcaacgaagcaaagcagggctggagtgcctgaatcgttagtcgacgctcttgccttattctctgcggagctgatccaaaatacccaagaccatgcggtcaaagaccacaccggcagaccatatctttcgcatgttgaggggatgatggtgggatggacacggttttatgactcgattcacttcaaagactttaccggccatcccgacctcaaaaactactgggatgatgaagccgctagaacggacacaggactcaaaagccttcgggcattcgaggtcagctattttgactcagggccgggcttggtcagccgctacaccggcaagctggtgcaggaaatgtcactcaaagatgagcggagggcccttctccaatgcctgcgacacaactcgacttcgaaacttcagacggcggcaggtgaaggtttaccctcagtcttacaagagctgaggcagataggcgggctaatgaggatccgtacgggaaggctgtcgatgttcaatgcgttcgcgcctggcgataaccgtgacctctttgctttcaatgactggactggaaccagcctttcgcctgttcaaggtgcggttatctctattctcgtaccgctgagggctcagtga

SEQ ID NO: 340761 - DNA, 432 bp, Pseudomonas aeruginosa
atgagcaagagttttcgcgaccgcattcagagaatgaatgagatgtacaagctgcccattcacgagaccccgcacctcttcccggatgcggaggatcgtcttctgaaattcaagcggacgctgctcgatgaagtcgccgagatcgatgacattgctgagcagattcgccggggggacgatgccatcgatgttcaagtcgcgattgcagatcttctcggcgacgtcatcgtgtattgtcgctccgaggccatgaagtacggtatccctcttgaggccgttctagatctgatcatggacagcaacgagagcaagcttggagccgatggcaagcctatctacgatgagaatggcaagtttctcaaagggcccaattattggaagcccgaaccccaaatcaaaaagctgttggcaagccgccctgcgcacaagtaa

SEQ ID NO: 340762 - DNA, 666 bp, Pseudomonas aeruginosa
atgtacaagatcctgatcgccgacgaccacccgctgttccgcgaggccatccacaatgtcatcgccgacggattccccggcagcgaagtgatggaaaccgccgacctcgacagcgccctgggcctgacccaggaacacgacgacctcgacctgatcctgctcgacctgaacatgcccggcatgcacggcctcaacggcctgatgaacctgcgcaacgaggccccgaccattcccgtggttatcgtctccgccgagcaggacaagcaggtggtgctacaggccatcacctacggcgcggtgggcttcatcaccaagtcctcgccacgcgcgcagatgaccgaagccatcgagcagatcctcaacggcaacgtctacctgccctcggacgtgatccgcacccagaagagttcgccgcgacgcagcggccacgaagaacacggcatctccccggaactgctccaggccctgacccgcaagcagctgctggtgctggagcggatgaccaagggcgagtcgaacaagcagatcgcctacaacctggagatcgccgagaccacggtgaaggcgcacgtctcggcgatcctgcgcaagctcaaggtacacaaccgggtccaggcgatcctcagcgccggcgacatcgacttcgccgcctacctgcgccgctga

SEQ ID NO: 340763 - DNA, 1872 bp, Pseudomonas aeruginosa
atgacaacaagaacctcacccgcccctgccggcctcctgcgcccgagcctgcactgcctcgccttcgccgtcgccctgggcagcgctggcgccgcgctggccaaggatgtgacctgggaggacatcgccaacgacgacaagaccaccggcgacgtgctgcagtacggcatgggcacccacgcccagcgctggagcccgctcaagcaggtcaacgccgacaacgtgttcaagctgaccccggcctggtcgtactccttcggcgacgagaaacagcgcggccaggagtcccaggccatcgtcagcgacggcgtgatctacgtgaccgcatcctactcgcggctgttcgccctcgacgcgaagaccggcaagcgcctgtggacctacaaccaccgcctgcccgacgacatccgcccgtgctgcgacgtggtcaaccgcggcgccgcgatctatggcgacaaggtgttcttcggcaccctcgacgcctcggtggtggcgctgaacaagaacaccggcaaggtggtgtggaagaagaagttcgccgatcacggcgccggctacaccatgactggcgcgccgaccatcgtgaaggacggcaagaccggcaaggtcctgctgatccacggcagttcgggcgacgagttcggcgtggtcggccgcctgttcgcccgcgatccggataccggcgaggaaatctggatgcgtcccttcgtcgaaggccacatgggccgcctgaacggcaaggacagcacggtgaccggcgacgtcaaggcaccctcctggccggacgatcgcaactcgccgaccggcaaggtcgagtcgtggagccacggcggcggcgctccctggcagagcgccagcttcgacgccgagaccaacaccatcatcgtcggcgccggcaaccccggcccgtggaacacctgggcgcgcaccgccaagggcggcaacccgcacgactacgacagcctctacacctccggccaggtcggggtggacccgagcagcggcgaggtgaagtggttctaccagcacacccccaacgacgcctgggacttctccggcaacaacgaactggtgctgttcgactacaaggccaaggacggcaagatcgtcaaggccaccgcccacgccgaccgcaacggcttcttctatgtggtcgaccgcagcaacggcaagttgcagaacgccttccccttcgtcgacaacatcacctgggccagccacatcgacctgaagaccggccgcccggtggagcgcgagggccagcgcccgccgctgccggaaccggggcagaagcatggcaaggcggtggaagtatcgccgccgttcctcggcggcaagaactggaacccgatggcctacagccaggacaccggcctgttctacgtgccggccaaccactggaaggaagactactggaccgaggaggtcagctatacgaagggcagcgcctaccttggcatgggcttccggatcaagcgcatgtacgacgaccacgtcggcagcctgcgcgccatggacccggtcagcggcaagctggtctgggaacacaaggaacacctgccgctctgggccggggtgctggccaccgccggcaacctggtgttcaccggcaccggcgacggctacttcaaggccttcgacgcgaagagcggcaaggagctgtggaaattccagaccggcagcggcatcgtctcgccaccgatcacctgggaacaggacggcgagcagtacctcggcgtgaccgtcggctacggcggcgccgtgccgctgtggggcggcgacatggccgacctgacccggccggtggcccagggcggttccttctgggtattcaagctgcccagctgggacaaccgcaccgccagccgctga

SEQ ID NO: 340764 - DNA, 810 bp, Pseudomonas aeruginosa
atggacggcgtcagccgtcccggcatgctcttcgaactgcccctgcaatacgttcgggcgaacaacgccagcgacgccggcgggcattcggttcccggtcggcaacgggttcgtggcaccacgctgttgccgcacttcgcctacctcagccagaacaccctgctcggcgcccactacggcgccgaagtgctgctgccgctggtacgcctggacctcgatatcgacggcggcccggacggccggcgcacccgccagggcgacctgatcgtcagtccgctgatgctgcaatgggggcccgctacgctgttcggccgcccctactggcagcgcctgaacttcgtcttctccctgcccaccggcgactacgacaaggacgccgcgatcaacaccggcagcaacacctggatcttcaacccgcactacgccttcacctgggaactgggcgagcgcctggaactcagcggccgcctgcactacgcctggatcagccgcaacgacgacccctcgccgcgcctgggcgcaaacgacgtacagccgggccaggcgctgcacgcgaacttctcgatctcctacgcgctggacccgcactggcggatcggcctggccggctaccagttgaaacagatcagcgccgaccgcatcgacgaccaccggcaggccgactcgcgcgagcaggtcttcggcataggcccgggggtgatgtacagccagggtaggcaaacgctgttcgccaacctctacgccgaaagcggcgcgcgcaaccgcagcgaaggcaaccaactgaccctgcgctacctgctggcgttctga

SEQ ID NO: 340765 - DNA, 1617 bp, Pseudomonas aeruginosa
atggggatctatgcctatgtaaagtgcgctctggctctgtgtggctccaaggcagaaatcgtcagcttccactcttatgatgagctggagaagattaatccaccatcgctgccttacttctgcattgtatccgcctccacgtccggcagcatggcagcaaagatggctagcaaagcgtgggatccacgacggatcgccaccatcgtcgatgtaacgtcccagggacgagccggcgacgtgatgatcgcgcttgacagcatgggagtagccttccctgatttaaaagtcagtgacggtaccctgatcgagatcatcggcgagaatttctcgtccaaggcgaaacctcctcgaccagtcgttatcggaaggccacaccagccgaaagcgctggctgagttccatgagtactttggtttctcgatccaccgcttcaacacccctgtcgagaacaagacgaagttgctgcagctcgacgtcaccaatgtgctgaagcacaaagaatttttgaaatggctctacgcagaaattgactggtctttccctctgaccgtcagtcacgtaatccatgccgatgataatgcctccaaggctctggcaaaaatcgtcgtgaagcgtctgcgcacccgattggccattaagtcatcggtgaaagtaattccttacaataaattggaagaaaagaactgcaaggatgccactggcgtagtgatcgtctccacggtcgcgagggacggcggcgttcttcgcgaaatcagtcgcgacctgcgctcatacatcaaggcggatatcccgaggcatttcctctctccgatcggcatccctcagacgaacgagtcatggagtcagttgcggatgttcctggttcgaaactccacgcccagggagtacggtttcgccaactggatccagcttcctctcggcgaagactccgatgacaactcatggcatcgcttgatcacggcctatgagaggcattcgaatcaaaacctccatgaacttgaacttggacacctgcaggacacctccaacatcctggcctctcttgagttggctggaaatgcagcctcagaggcgtttactggatttttgctttcgccgcgaggcagcgagctccgcctatcggaaggctttctctttttcggagacaaaaccgatatcgccaagcgctacgccaaggttgagcccagcatggtatacctcaccatgtccgccgtgctccaaaacgcccgagaacacagagaccacgagaggcggctctgcccaaacggctacgagtcggtcgtactggccccagagtgcttcctcaggttcaacgaagccatcttgcaagcgtgcatgctgagagcatgtcatccggctgaattggactactcatccagcccggagctcagcaaggtgatgaaagagctattggtgaaggtgttcgcacgctgggacaaggacttcggcgacgcagccctagagttcgccgccgccatcgccgtgggctcgcttcggcttgccaagcgggatatggagacgctgttggacgatgcgttagaacagcacgctggcaagcagtccgcattgcttgggatgctcgtattggctaagcaagccactaggatgacctgctga

SEQ ID NO: 340766 - DNA, 519 bp, Pseudomonas aeruginosa
atggcaacccccgcctacatgtccatcaccggcaccaagcagggcctgatcaccgccggcgccttcaccgaggattcggtcggcaacacctaccaggaaggccacgaggaccaggtgatggtccagggcttcaaccacgaagtgatcatcccgcgcgacccgcagtccggccagccgaccggccagcgcgtgcacaagccggtggtcatcaccaaggtcttcgacaaggcctcgccgctgctgctggccgccctgacctccggcgagcgcctgaccaaggtcgagatccagtggtaccgcacctccgccgccggcacccaggagcactactacaccaccgtcctggaagacgcgatcatcgtcgacatcaaggactacatgcacaactgccaggacccgggcaacgcccacttcacccacctggaagacgtgcacttcacctaccgcaagatcacctggacccacgaagtctccggcacctccggctccgacgactggcgctcgccggtcgcagggtga

SEQ ID NO: 340767 - DNA, 663 bp, Pseudomonas aeruginosa
atgagcctgacactctacggagccccgctgtctccgttcgtccgcaaggtccgcctgctcctggccgaaaagggcctcgactaccagttggaagcgatcgccccgttcggccagccggcctggtatcgcgagatcagtccgctgggccgcatcccggcgttacgcgacggcgacctggccctcgccgactccagcgtgatctgccagtacctggaagaacgctatcccgaaccgccgaatctccagggcgacgcccccgccagccgcgcagcggtgcgctggctggaaaaatacgccgactacgagatcgctcccctggccacgctgacgatcttccgcaaccggatactcaagccggcgatgggccaggcctgcgaggagaacgacgtgcgtcgcgcgctggaggaaaagctgccagcgcacttcgattacctggaaaaccatctcgacggccgggccttcttcgtcggcgagcgactgaccctcgccgacctggcgatcgccagccagttggtcaacctgcgtcacgccggcgaaaacctggacgagcaacgctggccggccctcgccgcgcatttcgcgcggatgctcgaacgcccggcgatgcaagcgctgctgccgggggaacgacggaccctcgacaagctcgcagcgaaagcctga

SEQ ID NO: 340768 - DNA, 1407 bp, Pseudomonas aeruginosa
gtggccccggcttccgccgtaccgctgatgacgactccattgctcggattgatcaccggcgccggcggggcgatggcatcgacggtgacgctggccggaccgctggtattgccggccgggtcctgggccacggcgttgatcacggtgccgttggccagcggggtgctcggggtgaacgtccagttgccgctgccgtcggcggtggcctggccgatcgggttgccgccgccatcggtgaggatcaccgtcgcgccggcctccgcggtaccgcttatctcggtgccgttgctcggatcgatcactggcgccgccggggccacgccatccacagtgatcaccgccggcgcactgtcgacattgcttgggctgcgcgccaccacgttgaccaccgtgccatccggcagcgggatgcctggagtgaaggaccagttgccgctgccgtcggcggtgacctggccaatcgggttgccgttgccatcggtgatgatgatggtgttgccggcgtccgcggtgccgctgatcaccgaaccgttgctcggatccacctgcgggatcgacggcagcgaggaatccaccgtcgtggtagcgggaaggctggtattgccggcggcgtcgctcgcggtcacgttgaccacggtgccgttgggcagttgcgagccgggcgtgaagctccagttgccgctgccatcggcggtggtctggccgatcgggttgccgttgccgtcggtcaaggtcacggtgctgcccggctcggcggtaccgttgagcaggttgccgttgctcggattgaccacaggcgtgttcggcgccaccgcgtccacggtagtgctgccctgcgggccggtattgcccgcagggtcctgggccacggcgttgaccaccgtgccgttggccagcggcgtgccgggcgtgaagctccagttgccgctgccgtcggcggtggtttcgccgatcgggttgccgttgccgtcggtgaggatcaccttggccccggcctccgcggtgccgctgatggtcgtgccgttgctcggatcgatcaccggcgccggcggcgccaccgcgtccaccgtggtggcggcctgcgggccggtattgccggtcgggtcggtggccgtggcgacgatcaccgtgccgttggccagcggggtgcccggcgtgaagctccagttgccgctgccgtcggcggtgacctgccctatcgggttgccgccggcatcggtgagggtcaccgtggcaccggcctcggcggtgccgctgatgacgacgccgttgctcgggttgatcaccggcgccggcggcgcgctggaatcgacggtcaccgtcgccggcgggctgctgttaccggcggcgtcctgggccaccacgttgaccacagtaccgttggcgatcggcgtggacggggtgtag

SEQ ID NO: 340769 - DNA, 1407 bp, Pseudomonas aeruginosa; identical to SEQ ID NO: 340768

SEQ ID NO: 340770 - DNA, 246 bp, Pseudomonas aeruginosa
atgagcctgctgtcaccctttgacgtggtgatatggatgacggatggctggccactgtatgaatcccgcctgaagggaaagctgcacgttatcagcaagcgttacactcagcgaattgagcgacataatctgaatctgagacaacatctggcaaggctgggacggaagtcactgtcgttctcaaaatcggtggagctgcatgacaaggtcatcgggcattatctgaacataaaacactatcagtaa

SEQ ID NO: 340771 - DNA, 234 bp, Pseudomonas aeruginosa; identical to SEQ ID NO: 334916

SEQ ID NO: 340772 - DNA, 777 bp, Pseudomonas aeruginosa
gtgagctgggtgattcggcccgaatcactctgccaaggatcgacctcgtcgccgacggcgaacggggtgttgcggcccgcatcacttcgccaggtcctggcctcggcgccgccagcaagctgggtgattcggcccgaatcactctgccaagaatcgacctcggcgccgacggtgagctgggtgattcggcccgaatcactctgccaaggatcgacctcgtcgccgacggcgaacggggtgttgcggcccgcatcacttcgccaggtcctggcctcggcgccgacggcaagctgggtggtgcggcccgcaccacttcgccaggaccaggactcggtgccgccagcaagctgggtggttccactggaatcactctgccagggatccacttcggtaccggcggcaagatgggtgtttcgggccgaaacacttcgccaggaaccaacctcggcgccgccagcaagctgggtgattcggcccgaatcactctgccaagaatcgacctcggcgccgacggtgagctgggtgattcggcccgaatcactctgccaagaatcgacctcggcgccgacggtgagctgggtgattcggcccgaatcactctgccaaggatcgacctcgtcgccgacggcgaacggggtgttgcggcccgcatcacttcgccaggtcctggcctcggcgccgagggctatcaacttctcccactcaagaggaaccgaaagatgtgtgactcgatcttgtatgcccccatggacgagctcgaattcgagcggctgctag

SEQ ID NO: 340773 - DNA, 198 bp, Pseudomonas aeruginosa
atgcatctggtcgagatcgccaggaatggagacgcgccgcctgctgctcgagttgctgcggtgaaagagatcctcgaccgtgggtatggcaaggccaagcagccgcttgagcacactggcgaagatggcgagccaatcaaagccatcaccgagatccgcattgttggtgtgagcccggatggaaatccgcttacctga

SEQ ID NO: 340774 - DNA, 1305 bp, Pseudomonas aeruginosa
atggaaatccgcttacctgagaagctggttgatgccttcttgggtcaagcggacgtgcggggtgcatggggcggtcgtgggtctggcaagaccgtaagcttcgccgagatgatcgctgttcacgccaggcgctttgctgaggctggcatcacaggcgtaatgctctgcgcccgtcagcatatgaactcgatcaaggaatcgtcgtttgctgagatcaaggcggcgatccttggcaatgacgatctgagcccatgcttcgaggtgggcgagaacttcattcgtacacgtggctttgctggtcgtgtcgacttcatcttccgcgggctgaatgagaacctggacagcatcaagtccaccgctcgcattctgatctgttggatcgacgaggccgagaacgtcagcgaggatgcgtatatcaagcttattccaactcttcgtgctgaggatgaaggctggaacgctgagctttgggtgacatggaaccctgagcgtcgcaatagcccaactgacaagcgcttcaggcagtcgaaagacccgcttatcaagatcgtcgaactcaactggcgagacaacccgtggttcccggagaagctgaaccgcgaacgactgcgcgacaaggccgagcgccctgacgagtacgactggatctgggaaggcgcatatcgaggcattgtccgtggcgccgtctatggcgatgagatcaaggcgcttgacgcatctgatcgtctgacgcatgtcccatacgacaggaccaagccagtccatatcttctgggacttggggcgcgctgataagacggcgatctggttcgcccaggtcatcccgttcgggtttgcgatcctcgattactacgagcagtccggcaaagcgctggaccacttcgtgcgtgaactccagtcgaggggatacgcatacggcgactgctggctgcctcatgacgcagagaacgaacttctcgcttcccggttgacggttgcccaacagcttcgagatgccggattcaaggtgcgtatcgtcaagaagatcagagtcagcgagggtatcaacgccgctcgcatgatctttgatcgatgctggtttgaccggaccaagacagagcatggtctagaggcgctcagaagctatcgctacgagtacaacgaagaccgccaggaattcactcgcgagccgattcacgattgggcatcgcatggcgccgacgcattccgctacctcgctattgcactcaagcatgacagcgagcccaagcagcaaaagactaaggccaagccgccccgggtgggcgctaactcttggatggcatga

SEQ ID NO: 340775 - DNA, 2067 bp, Pseudomonas aeruginosa
atgatggctgagaaagaagacgagatcgttcaagaggcgaaggagcggttcaagtacgctctggactttgaggacagcttccgcaagctgttcgtggatgatctgaagttctgcaacgccgacagcgacaacggctatcagtggccgaatgatctgcgtaagaaccgcgagatcgatgcgcgtccatgcctgacgatcaacaagactcggcagcatgtactgctgatcaccaacgatgcaaagcagaacaagccgagcgtcaaggtgcaggcaactggcggtgacgccacctacgaagccgcccaggtcttcgaaggcgttgtgcgtcacatcgagtacatcagcaatgcgcaggatgcgtacgacactgcgctcgagcaccaggtgcagggcggcgtcggctactggcgcgtcgtgactgattacgtcgacgatgagtcgttcgatcaagacatcttcatcaagcgcgtgcgcgatccgctgtgtgtgctgatcgatcccgacgcgaaagaggcagacgcatccgatgccaagtggggattcgtcttcgacaatctcaagaaggaagacttcaagcggaagtatcccaagatcgaggtgggcaatgatgcaccgctcggcgagggatctgattgggtgactgaagaccacgtgcgagtggctgaatactaccgttgcgagtacgtgaatgatgagttgattgcgctgccggttcctgatgagtttggcggcagcactatccagatgatgaaggccagcgaaatgccggctgacattctgaaggccatccgcggcgacgaatcaatccagcgtcggccgatccagcgcaagacctggaagtggtatctcattgccggcggcaagatcgtcgacaagaaagactggccgggcgacacgctgcccatcgtcaaggcagtcggcgaagagatgatcatcgagggtaagctggagcgaaagggccacgtccgcaacttgaaagaccctcagcggatgtacaactactggaccagctcggcagttgagcaggtagccctccagggcaagcagccctacatcgctgccgcagaagccatcgaaggcttcgagaactactacgaaactgcaaacgtccagaactacagctatctgccatacaacggtgtggacgagcagggcaatcagattcccccgcctgctcgagaacagccgcccgtaatggccgccgcgtacatcaacggcatgcagatcgctggcgaagaaatgaagatggtgtccggtcagtacgacccggcgcagggtgacaacccgcttgatcaatccggcgttgctatccggatgcagcagcgcaagagcgacggcgcgacgtatcaatacacagataacctcgcgaaggccgtgcggcgcactgggaagatactgatcgacctgatcccgaagatctatgacaccaagcgagtgatcaggatcctcgccgaggacggcactgagtctgaggtgactatcgatcctgagcttcaacagccaatggtcgaagagcaaggcccggacgaaacggtcaatcgcatcttcaacccaagtgtaggcaagtacgacgtaatcgcggacaccggaccgagctatgcaactcgtcgcgacgaggctttcgaggccatgtcgatgatgatgcagagcgatcctgagttcaaaacggttgctggcgatctgtacttccgcaccgcgaacttcccaatggcagaggaacttgctgagcggttctccaggctgatccccgacaacatcaagggagaaggtccgccgccagaactggtacaggctcagcagaccatcgagcagttgcagggacaactcagcgagtctctgcgcgccctggctgatctccagcgcgacatgaacgacaagtccgactcgaacaaaatcaacgagtacaaggcgatcacagagcgcatggacaagctgcttgcgcacatcgaggcaggcaacccggcactcaatatggacattctggcccagacagaagtcgcagccgcgcaagaccccatgcccgtccctgaaaccgcgcctgacattggcgcacagccattaatgtga

SEQ ID NO: 340776 - DNA, 747 bp, Pseudomonas aeruginosa
atgactgacgaagtgattgacgtagcagttgagccaactggacaggaagtcgaaccggcgcaagaggccgacatcagcagcaccgatcaggccgcggtgcaggaagcggagcagcaggaacagcaagaagaaccgaaggcgaagaagcctgatgcctgggttcagaaacgcatcgaccagttgacccgcgagaagtacgaagaacggcgcagaaccgaggcactacagcaagaaaacgagacctatcggcgcctgcttgaggcccagaaagacggcgaaaagatcgagttgccgacgcaacagaagtccgatcaagacccgtacgaactggcaaagcagatccgccgccaggaagagttcaatgaccgctgcaacaaggcctacgagcaaggcaagaccgagttcgccgactttgatgacagcatcaagaacctccaactccttgggcagatcccgcaagacttccttgaggccgtcactgagctcgagaagccgcatgcggtgctctatgccctcgcgcaggacctcgacaacgctgcacgcatcctctccctgccacccgttcagcagggccgcgagcttgagcgcattgcgctgaaggccgctgctccgaaagccaaacctgtatccaaagctcccgccccgattgcccctattgatggctctccgtccgtcgaagcagatccgacgaagatgtccatggaccagtgggtgaagtggcgcgagtcacaacttgcccagaggtaa

SEQ ID NO: 340777 - DNA, 1200 bp, Pseudomonas aeruginosa
atggccaactcccttctgacgatcgacatgatcactcgcgaggctcttcgcctcttcatcaactccaatgccttcctgaagaacgtagatcgtcagtacgacgaccagttcgcacggaccggcgccaagatcggtgacaccctgcgtatccgcctgccgaacgactacaccgttcgtaccggcaagacggcttcgattcaggacaccgtcgagcagaaccgctcgctcactgtctctacccaacagggtgtggacctgagcttcagttcggccgagcgcgctttgaagctggacgacttctccgaccgcgtactgcgtccggccatgaacaacctggctggtgctgtcgctctgtcgctgatgggtaatgccgaaagcgtgagcaacatgatcttcaaggacaacggatcgggcggcatcgctactcccgatgcatcgacctggctgctggccggcgccaagctggacaacaacagcgcgccgcgtgatcgccgcaagatcatgcttgacccgctgacccaggctcgcaccgtttcgtccctggcaggcctgttcaacccccagcagaagatctccggccagttctcgaccggcgagatgtcgcgcgacaccctcggcttcgactggtacatggatcagaccgtcctgaagcgcaccaacggcaccttcaccgcgggtaccgtcaatggcgctggccagactggcaccaccctgaccaccaacgccatcactggcaccctgaacaaaggcgacgtgatcaccatcgccggcgttctggccgtgaaccgcgtaaccaagcagtcgactggtgagcttcagcagttcgtcgtgactgccaacgttgcgtctggcgccacttcgatcccgatctacccggcgatcacccccggcaacgtggcgtatgccaccgttaccgcttcgccggcaaacggtgctgcgctgactctgatcggcggcgctggcgtgaccttccggaagaacctggcgtactacccggaagcgttcactctggccactgctgacctggaactgccgcgtggcgtgcatgaggcatcgcgtcaggtgtacgacggcatcagcatgcgtgctgtgactgcgtacaacgtgaccagcgatgacttcatcactcgtctggacatcctgtacgggcacaccacgctgcgccccgaatggggtgttgctgtggcagacgtcctctaa

SEQ ID NO: 340778 - DNA, 228 bp, Pseudomonas aeruginosa
atgttccaagaatttccgaaatggaagtacagcgtaaacggcagccagattgtccaggacgccgcagaggaactttcccttggatcgggttggttcgatacgcctgaggctgtgacccagcctgtgacgctcaccaaggatcaactgctggccctggcagaagagaagggtgtgaaagtcgataagcgctggagcgctgagaagatttccgcagcccttgaggcctga

SEQ ID NO: 340779 - DNA, 423 bp, Pseudomonas aeruginosa
atgccgttccgcgaggacgagaacgaccattggcaccgtgccatcgacctgcagctcgacggcaccgccgtactcagcttctccacccagcgcgtaccgccggcggtggaaaagctgctcgactatgccggtgcgagcaaggacgaagtggactacttcgttttccaccaggccaaccggatgatcaacgagaccatccgcaagaagctcggcctgccggtagagaaggtgccttcgaccctgcgcgatttcggcaacaccagcggcgcctcgctgccggtgaccatgaccgcgcggatcaaccgggaactcgaggccggccgcaatcgcgtgttgctctgcggcttcggtatcggcctgtcctggggtacctgcctggtggatatcgaaggggcgaagttccccgatctgatcgaatcctga

SEQ ID NO: 340780 - DNA, 621 bp, Pseudomonas aeruginosa
atgaagcagacgatcatcgtcggggaagggcgcgcgctcgaacgggcggacagtaccgcgcgggaacggggactggaacaccgggtcctggagctgaatgctgcggatcgacacaacttcgatattgcgcctctgctcgaacgctaccccgctgcggaaagcgaagtattcgtggcgctggacgagcgggcggtgaactacgcccgccacaagctcatcgcggacatccgcctggcgggctaccggctattcgatatcgtctcgcctcaggccatcgtcggcgaaggcgtgcgactgctgggcaacgtgttcgtcggcgccggttgcgtgctcgccggtcgtgcccgcatcggcactggcagttggctggagctgcaggtcctggtggaggaggactgccgggtcggaacctgtagcacgctgctcgctggcgtgcagttgggacggcgagtggagatcggccagggcagcacgctgggtgcgggcagcgtcgcgctcgccgacacccgggtggggcgacactgcgaatggttgttgccgggcaggattccccgggagctgcccaattactccttttacgatgaactcatgcccgatggggcgcgcatcctgaacaattga

SEQ ID NO: 340781 - DNA, 240 bp, Pseudomonas aeruginosa
atgatcgactggggccaggtaaagaccgctgaacagcaggcgcaagaacgctggcaggctgagtacgatgccgcaaccgcggcgcgggcgaatgcctaccgcctggagagtgacccgctcaagaccgaggccgagttcgatgcgatcaaagccggcaccgagccggactacagcgcctggatcgccaaggtcgaggagatcaaggcccgtatcccgttgcctagtccactagccgaatag

SEQ ID NO: 340782 - DNA, 1005 bp, Pseudomonas aeruginosa
atgtccgaagccaaggacacccttctcaggcaactgacccttttgcgcctgatccccgagtacccccgttacacctcatctcagacgctgcacgaaaagctgcacgaccgaggctacaaggtggagctccgtaccgtgcagcgggacctaaaccggctttccgcccccttctcactgaccaacagcaagaagggtgggcgcaatgaatggagctacacaaaaggcacgccgctggatctgagagatatggagccctcgacagcgctggccctctacctggccgaaagccacctgcgcaccctgctaccacaaagcgtgcttgatctgctgggaccgcagttcaacaaggctcgcaattacctcgacaacctcggccagaacgatctggcccactgggccaggcgtgtccgcacccaccccaacggcaaggccctgttgcctgcccaggtcgactccgacgtctggagagcggtgtccagcgcgctgctggcgtgccgacagctgcaggtcaactacctcagccgcagcaaggccgacgcgaagacgctgctcatccaccctgccggcctggtttcccgccagtccatcggctacctgatcggcaccgtcgatggctacgacgacctgcgccagttcgccctgcaccgcatccgtcaggccgagtgtctcgacaccccagcccgcgagcgccccgacttcgagatcgaccactacatccgccagcacctcaacaccgccacacccatcgagcaggtggaactggtcgccgacgtatcaccgcagatcgcctggctgctcggcgaaacccctctgagcacgcagcagagcctggaggctctggaaggcagcgactggaaacgcctgcgcgcctgggtgccggacgatcaggagactctgtggtgggtgttcgggctgggggagaacgtgcgggtgcatgagccgcagagctgggtgcgagaaatccaacacaaggcggatagattgcggtgcctgtatgaacagtga

SEQ ID NO: 340783 - DNA, 1674 bp, Pseudomonas aeruginosa
atgaagccccatgtcccccctaccgccacagacagcaaaagcacaactacccaagacgaagtcacccgggacatggcacgtaccgccacggcgctctccgccagtgaaaccgtcagtcgttttggtagtgccaatgccgaatacctcaagggttacaccggtatcgacaatgaaaccggacagcggtttgccaaagggctggtcgatatagctaagcacaaggtcaatgccgacccggagtttgccaaacagaacatcaaacagcaggccggctattccgccgaagttgcagccaccagccgcgacaatgccgaagccatcatcagcggctccaaggtgcgcacctctcgcagcgatgatctggcacaatacggtaagaatcacaatgtcgtcgatcgcgtgaagctgctcgatggacagatcatcgaaggctctgaagcccagatgaaatttgtcggcaaacgcaatcagttgttcgagcgcatcgcccgcgaggatggcaagttctcccgctacagaggcgtaaaactggagctaccctccgaacagttcgatggcgcggcggagttttgcaaacaccgggcgcaacgcttgcgtaaacaggccgacatcatcgaacacggccgcccagccaaagccgctgccttgcggctcaaagcgggccaaatggagtccagccatcccgagcaagccgctcggctgcgcaaccaagccgaacaaatagaacatggtaaacctgcagtagccgccaaactccgccgcgaagccgataactacgagcaactcgccaacgatgtgagcgacagcggactgaccactcaggatgcgatcttctaccgcgaacaccccaagatcgccacggctctagacatagcccgtaccagtcataaggcaggcgtggagggtgccaaatatggagccctgatcggtggcgtcatttccctgctcaccaatgccttcagcgtggctcaggagaaaaaacagctcggcgaggcggcacaggatgtcgcgaccgacacaaccaaggctgctgcgcttggctatggcaccgccttcgccggttcggcgctcaaaggcagcctacagcaatcaagcaaccgaaccctgcgcaccctgtctggcaccaatgccccggcgctggccgtcactatctgcctgtcgctgggcagctccgtcaagcgctacgtcactggcgaaatcagtgaagcgcaactgctgagcgaagtaggggaaaaaggcgcaggcatgctctccggcagcatgatggccgcactggggcaactcgccattcccgtaccattcgtcggcgccgccgtgggtggaatgatcggctacgccctttcctcattcttctatcagagcgcgctggaggcggcgcgtggcgtggagctttcgcgccagcagctggagcgcgtcagggccattgagtccgcggcccgcgaccgcattgccgatgagcaggcggccctggacacctttacccgccacgaaatcccccaattgcgccaggaaacccaacgcctgttcgacatcgtatcgaacagcaccagcaatgttgacggcctggcagctgccatcaatgagtacgccacgctgctggggaaacagctgcaattccaatccatgtcggagtttgaggacttcatgaactccgaccagccactgatcctgtaa

SEQ ID NO: 340784 - DNA, 213 bp, Pseudomonas aeruginosa
atgccaatgccgcctctgccccgcaccttcatctgcccgcaatgtggttggcagcgcaccaccactccagccagtgacgctctccgactgaatatcgactggttctaccgctgcccggtctgccagcacaccgagttggaaacccgcccggccagccgcacggaaatcatgcgggcacggctaacccagctccttcgtaacacacgcttctaa

SEQ ID NO: 340785 - DNA, 969 bp, Pseudomonas aeruginosa
atggcacatctcatcgaaaccatggcctacgctggcgccactccctggcatggcctgggcaaccaactcacacagaaacaacccatcgaagtctggcaacgcgaagccggcatggactggcagatccaggaaagccccgtgcacttcaaatcggatgccgttggccacctgggcgccattcattccttcccagaacagaaagtgctctaccgctccgataccaaggctccactgtcggtggtctcgcagcgctatcacaccgtgcagccgcgcgaggtgttggagttctaccgagacctgacggaagtctccggttacgagctggaaacggccggcgtgctcaagggcggccgtaagttttgggcgttggcacgcactggccatggcacagcgctcaagagcaacgaccaggttaacggctatctcctgctcgcgacatcctgcgacggcaccttggccaccacggctaccccgaccactgttcgggtagtgtgcaacaacaccctgaccatcgccctggacggtaccagtcgagccatcaaggtgccgcacaacacccgctttgatcccaatgcagtgaagaaacagctcggcatcgccgtctcgcaatgggacgagttcatgtaccgcatgcgcgcactggccgaacgcaaggtgaagaccaaagaggtgctgagcttcatcaccaccgtattgggtgaccactctcctcgcggtcagcaagccgaggtcgtaccgaacattcgcgccatgcaaaaggtggagagcctgtatcaggggcgcggtcgtggcagcagccttgagtcagccaatggcaccgcctggggtctgctcaacgccgtaaccgagtacgtcgaccacgaacgtcgtgcgcgcagcaatgagtaccgcatggactctgcctggttcggtcagggggcacagatcaagcaacgcgccctggatgctgcgctgcagctcgccgcctaa

SEQ ID NO: 340786 - DNA, 951 bp, Pseudomonas aeruginosa
atgctcaaaggtctggctatcactccgccggtgctcgggcggatttccatcggcaaggtcatcgagaagaacggcaagcgtctgccggagaaggatgaccagttcaccatcacttcccaggtgcagggcaaggacggctggctgctgcatccgctcaatgatgagctgcgcaaaggccaggacgacaagctgcgcaacatcccggtgcgcctgctgttcaacgaaccggagctgaacttccgcgccgactacacgctgttcgaccgccagtccggacggccgcggtgcatcggcaatggcgagacctgcaagcgcgtcactcagggcggcatgcagtcgctgccctgcccttcgccggatgcctgctcattggccaaaggcaatgcctgcaggccctacggccgactgaacgtggtcattggcgatgacgatccgctgggtagcttcgtgttccgtaccaccggtttcaacagcatccgcaccctggcggctcgcctgcattacttccaggccatttcgggcaaccgtctggcgtgcctgccgttggaactgcgcctgcgtggtaaatccacccggcaaagccatggcacgccgatcttctacgtcgacctgacgatacgtggcggtatggacatggccgaagcgctgcaggccgccaatgagctatatgcgcagcggcaagcagcaggcttcgatcaggccgcactggatgaagcggcgcagcgtggctttggcaatggcgccttcgaggacagcgaggaagatgctggcgccatcgccgaggagttctaccccaccgaggaaatcccatctcgaaccaccaacacttaccagcgttctgcgaaaaccagcctggccgagaagctggacgcgcaagcccagcgccataccccaccgacagaccaccatcaaggagcccagcatgcgcctgcacaagctgaaggccagtga

SEQ ID NO: 340787 - DNA, 498 bp, Pseudomonas aeruginosa
atgcgcctgcacaagctgaaggccagtgaatcgaccggcacctacctggtcgagtcgccagtcaccgaaaccgacatcctgctgatggcccggcagttggcgaatctgcgtctgcgccgggggcgagcactgacttcaccaaaagaggtgttcagccacctacaggcgctactggccagctatgagcatgaagtgttcgctctgctcatgctcgacagccggcaccgggtgcttgcctttcaggagctgtttcgcggcaccctcgatggagcaagtgtttaccccagggaagtcgtgaagatcgccctggaatacaacgctgccgccatgatcctggtacacaaccacccatcaggagaccccgagcccagccaggcagatcgtaagctcaccacgaaactgcaggaggcgctgaacctggtaggcgtgcgcacgctcgaccatatcgtggtgggccaagaaggctgcgtgtcactggcagaactgggttacctgtga

SEQ ID NO: 340788 - DNA, 165 bp, Pseudomonas aeruginosa
atgaagctattacttcgcacctttgcagcagtgttcgtatttgccggcatcctcgcaggctgcctggcaatgttgctgctggtgattctgatggtgcgctttccaccgctgctaattgccttggtactggcatgctggatcttgagtcggctacaaaggagctaa

SEQ ID NO: 340789 - DNA, 582 bp, Pseudomonas aeruginosa
atgacgcagctggttgaaggtggtctgcgtctgacgttcccggcgggctggcaggcgctcaagtttgatgacacgtcctggcatcgccagcgatttggtcatcatcaggcgatggatgttctcgctacccattctggtcagcactggtggattgagatcaaggactgtgaggggtttgaacaagataaccgcccgcgcatgtcacccgctgagccgcaggaggtagagcaggcgcgtacatgggtcaaatcacaagggctagaaagccgtgtgcggttgacacgcgccaagccgttcatcatcgatgaactgatcgagaagctgcgcagtactttggtcagtgtgcttgcagcaaagcgccagggagaggccgagttgcagccctatgtggccgtctttgatcaggggatgccatttagcgtgatcttgttgcttacttgggacatcgccgatttcaaccgtctagcccaacgtctgcagcagaagctgaatagggcactactgccgtatgggcttcagggcctggtggttaatgaccttgggcgtgtggccggcctggcctgtcaggtatcaagaatttga

SEQ ID NO: 340790 - DNA, 1044 bp, Pseudomonas aeruginosa
atgctcaaaagcgcaacgatcaaaaacttcggcccgctgcccagcggcgagtacaagttcgcccctggcctgaatgtggtggttggcgaaaatgggctgggtaagactcagctcatcaagctgctttataccctgctcaaggttcaggcggacagcaaagagctgaccaagacagcattgcagaaagactgtgctgacaaactcgtcaatgtgttccgtcctgactcgctcggccgtctggtcaccaggcgacaagggcatgatcgttgcgagctggcgctctcgatgaaggatcctaagcagaatctatccatcagttttgctacccgctctagcagcagtgtgcaagtcgactgcctacctgagaaggctctggtgcagtcaccagcctttctgccgacccgtgagctgctgactctatgcccatggtttggtccgctgtacgacaactacgatgtcccctttgaagagagttggcgcgataccgtctcgctgctcggaaatcctgctctgaaagggccgcgagcaacgattgcagcggaactgctcatgcctttggaggaggctatgggaggcaaggtggtagttgatacggccagcaagcgcttttatttgcaactccctggcgagggcaagatggaaatgccgttggttgccgagggcatgcgcaaaatcgccatgctggcccgcttgattagcaccggcactttgttggagcagggctatttgttctgggacgagccggaaaccaacttgaatccaaggctgatccgcaagatcgctgccagcatcatgtcgctctgccggcaggggattcaggtgtttatcgccacgcatagttactttttgctcaaggaactggatctgctttcgcgtcagcagcctgttgcgcagcgctatatcggtctgtcactcgatgatgcgaggcaggtgcagtgcgagcaggttgatagcctggcagagctgacttgcctcgttgcgttggatgaggaactggcccagtacgacagggaaatggagatatcccatgacgcagctggttga

SEQ ID NO: 340791 - DNA, 654 bp, Pseudomonas aeruginosa
atgcagcgtcatcataaaaatcacaatctgatgattcatgatggggcagactactgtggtctgcctattcagggtgataaggggccgtttgttcagcagtatctggaaaggctgcgtaacacgattgaaaatgcggttcagcaatattcgagggtctttgcttttagggttgacttgaggtttcctgctggaatagatctgccggagatctattcgaatcaagtggtagagcgctttgtcgagtcctttaaggcgaagattcgtcataaccggaaaatggcacgccaagagaacaggtgtgcgcatgacagtaatgtgcgatttgtatgggcgcgggaagtaggcctgtatggcaggccccactatcacatggctattttgctgaatttcgaagccttcaattccctcggcaaattcgaggaagggagagacaacatgttcaaccgacttgcccaagcctgggcaagtgctttggggctatcagtggaagacgtcagggggctggtagagatacctgccaactcagcctattgcctacgtcgtaatgacccgcagagccaggctgactttttctatagagccagctacctctgcaaggtcgctactaaggtctatgggaatggccagcatggtttcggtgcaagcaggctctga

SEQ ID NO: 340792 - DNA, 201 bp, Pseudomonas aeruginosa
atgaaagtgattcgactgcagcaggtaatggagatgactggcctcgggcgctccacgatttacaagtatgtttctgaaagctggtttccgaagccaattcccttgggcgggaggagtgtgggttggctggagagtgaggtagctgagtggatcctggaaagggtgtcagaacgagacttgcaagaagtcgctatggcgtga

SEQ ID NO: 340793 - DNA, 852 bp, Pseudomonas aeruginosa
atgaccaatgcaatcaatgacaggcttcagaagacgctcaacggactcaatgtcgatagcagactaagcaactggctatggcactttctaaaaggacaagccccacatgccaacctgggtgaactcggcagtcccggcatgcgagaccgcatagcagacctcatccaaaacaccccaacaggcgcagaatttgttgaggcacaaagcgccatgtccctgctacccgagaaagacctagagtggataacaaataacaagcgacaaaacttattcgtagccagaaaattaattgagaaaaacgggaaccatccaataattggagcaaccaccctgacaggccgatcattaaccattacaacaattgacatatgggcagttgaaataagccaaaagctatggctaataaatcaagtaaaatatgaatgggagcagcactcaagctcagactacatattcaaatggctagatggcgccgacgccacacaaaaactagaaacagcgtgggagataacaaaaaacaagcactccctactgacattccagcaaagccccccacaagaaaaagatgactttataactctactcgactctcaattcatctccatacacgaaaaaatattactcatggactccatcaaaaaacgatggagccaaaacaaatacagagcaaaattaacaggcaagaagcagtacaacttcatcctatccgacaaagcaatcaatcgccttgataagctagccgacaaacacgatttaaaaagaaccgaagtgctggagatactgctccagatggaagaagaaaaaggaacttacattcaagaaaagaaaagcatcacaaaaggaataacctag

SEQ ID NO: 340794 - DNA, 189 bp, Pseudomonas aeruginosa
atgctccaaaaaaaatggggcatgcacctcccccgatggggcgatgacatgccccaggggtgggaagaaacgcgacgttcaagcgccgcggtgaaaacagatcaatactcgctgggcaacagcagcgtggttacgctgcgatcccactcggtgatgatccagatcttcaggtcggaagtgacttggtag

SEQ ID NO: 340795 - DNA, 843 bp, Pseudomonas aeruginosa
atggctgtaaatgagatggatttgctttctgaggagcttcccgggtggggtctgactgaacgggaggtaacgtggctatggcttttcctggaaagcagggaaagcattcagatggatgagtgccagctcaacagccaaaccatgcgaaaccaaattgctagagcactcagaaggaatcctcgcgtcacgaggggcctagtacgagcacgggatagcgagctgctaccggaggaggcattcagctgggtcgaaaaaagcggacgacaaccaaaatggctcgccgctcaagcagggaataaaacaggactgcgaatacgtagcagtgtcttccgcacactcactgacagggagcaactgattgcactgttcgatctctgggacagagatttcggccagaaagagagtgcattgaagcgcctatcagacgcctggaccgagcacgcgcggtcagacaggatcttcagctggttcaaagacaaggacgaacgcacaaaatgcgctctggcatggagttggcttgagaaaaacaagcccaggctaacgtggcgcgccgagccctttacaaagctcactgagctgctggagttcttcgaccatagcggagcctccgacgaggaaaaggaactctacgtcgacaaaattaagaggcgctggagcacgcaaaaaacgcgcgagaaggctgtcgagaagaagcaatacaactttgtgctccccctgagcgtcaatgcgctcctggacaagcttgctgaagagcaccagctatccagaaccaaggtcttggagatgcttatcctaggcgaggaacagcacgagctgtatctcccgaaacaaccctccagatga

SEQ ID NO: 340796 - DNA, 255 bp, Pseudomonas aeruginosa
atgcgtataatgcgattgaaagaagtaatcgatacgactggtcttgccaggtcaactatctacaaatacatcgcggacggaatcttcccgaaaccggttaacttagctcctgccggcatggatatgccgagtacccgaggcgtggggtggatccagtcagaggtcgatgattggatcctggcaagaatcgaggagcgggatatggctgagggatccgccacacgtccaagcaaccatttgagcgtcgccaagtaa

SEQ ID NO: 340797 - DNA, 969 bp, Pseudomonas aeruginosa
atgaacaaccgtaagcacaacacccacctctcccagtccgacatagccctgcagatcgaatcactcgttcaggctatcgaacacagcgacactcctgcattccggatcacgcacaagcgctcaggctatgagcaggtcgagcagaccagactctcccggtacttcaccaacgtccagcagatgtacaacctgttcgatgatcgagtgccgtacgactacagcgagcacctgttagcgttccgggaagcctgtgacgacatcggtcttcagcgttcacccaatggtcctgtctgcatgagcgagacggagacgtactggctcagtcatcaccagagcatgaacgtcctgaccgcacggatccgtgaactgacacgagagcagtggtatcggcgtaggaagtgggaccggcagcagttggccaagcagcaggatagggaaatcaccgagtacacggatgcgatgatgagccgatactcgcgtaccgcgatcatcaggttgaacctgtactactggtctgaggcacaagccaggctacgtatcgaacaagtgttcaatcacttggatgccctgattaccaagcaccaccgccatccgatcttcgagcatcttatcggatacatctacgccgttgagcagggggatcgaaatgacggcaggggttaccacatccatgcagcctacttcttcaatggcaacatagtgtgccgggatgtctgtaaggcaactaggattggcaagctgtgggaggagatcactcgtcgtcagggctatgcccacagctgcaaccatgataaggaacagtacggcgacaagctaggcatcggccagatccatagggaggatcagtcgaagcggcctaatacccacgaggcaatgaggtacctggtcaaggacgatcagcacctgcgcttgaagcctgcgggggctcgctgtctgcgcaaggggactcttagtcgttctcgtcggtga

SEQ ID NO: 340798 - DNA, 246 bp, Pseudomonas aeruginosa
atgcgaaacatcttctctgaggcagcagtcagcatttctgagctgaagaaaaatccatcccgcatcttggctgaagccgcaggtgccccagtagccttgctcgaccaggatcgtgttatggcatatctggtgccagcagagctgtacgaacaaatactggagcgcctggacgatttcgagctggctgcattggcgaaggctctggcagctgaaaaatccatccgggtgtccttggaagacctttaa

SEQ ID NO: 340799 - DNA, 1782 bp, Pseudomonas aeruginosa; identical to SEQ ID NO: 328405

SEQ ID NO: 340800 - DNA, 156 bp, Pseudomonas aeruginosa
atgaccgactcctttgttaccgacctcatggtcggcctgtcgtctgtgcaggaagtgggcaccgaaggccgcttcgtcatgtggtttgaatacttctcaccagttcgcgcaactggtagtcgtcgtgtgctcgatgtgcaaaaattcatcgattag

SEQ ID NO: 340801 - DNA, 240 bp, Pseudomonas aeruginosa; identical to SEQ ID NO: 325917

SEQ ID NO: 340802 - DNA, 219 bp, Pseudomonas aeruginosa; identical to SEQ ID NO: 325916

SEQ ID NO: 340803 - DNA, 192 bp, Pseudomonas aeruginosa; identical to SEQ ID NO: 328898

SEQ ID NO: 340804 - DNA, 1911 bp, Pseudomonas aeruginosa
atgatcaagcgcaccctctaccatttccacttctgctgcggcctgggcggcggcgccgccggcttcaaccgggcgcgcccgcgggtcggcaacgtcgaggccgaatgggtctgcctcggcgggatcgacgtggacccggccggattgcgcgacttcgagcgcctggccggcgtcccgggcaccctgctggacctcttcacacgcgaccagtacgtgcggttccacggcaaggagccgccggcaggctggcgtgaggccacccccgaggatgtgcgccgcgccgcccagggcaagcgcccggacgcggtgttcatctccagcccctgcaagggcgcctctggcctcctctccgagaagatgagcctgaccccgaagtaccaggcgctgaacgagttgacgctgcgctgcatctggctcatgggcgaagcctgggccgatgaccctgtgccgctgatcgttttcgagaacgtcccgcgcctggccagccgcggccggcacctgctggaccagatcaacagcctgctcggcggcttcggctacgccgtggcggaaaccactcacgactgcggcgaactcggcggcctggcgcagagccgcaagcgcttcctgcttgtcgcgcggcacgtcgagaaagtgccgcccttcctgtacgagccggagaagaagtcgctccgcgccgtcggcgacatcctcggccgcatgccgctgccgggcgacatcgatgctgcaggcccgatgcaccgcgtgccgtcactgcagtggaagacctgggtgcgcctcgctctggtgcgcgccggcagtgactggcgcagcctgaatgacctggccgtcgaggacggctacctgcgcgatctgatcatcgtgccggagtaccaccggggcgtcctgggcgtgaatcactggggcgattcgtgtggcgttgtcgccggcgcgagccgcccgatgaacgggcggctctcagtcgcggatcctcgcgcgccggcaaacgccctgcaataccagcagtacggcgtgcgccgctggaccgacacatccggcgccatcatcggcgtcaagtcgcccggccagggcacgtactccgtcgccgatccccgcggccagagtttcggcaagtacccggtcaccgactgggacggtccgtccggcaccgtgatcgcggccagcaccaccggtcagggcgcattcgccgtggccgacccgcgcccaggcggcgtccggcacaacaacgtgtttcgcgtcgtcagcatggggagccacgccggaaccatcaccggcgggcactcacccagctccggcggccaggctgttgccgatcccaggtaccacaactggcacccaggggcgagcagccgcaaattgcacgtcggcgagtggggaagcgctaccggcacggtcaccggctcccagcaggtggccagcggcgcgctgtcgatcgctgatccgcgcgtgctcgatcgcaccaagggcgacgcctacctgaccggcgggcactacggtgtcgtagggttcgaccagtccgcgggcgcggtatcggccagtgctcggcacgacaatggcaggtggagcgtcgccgacccgcgcatgccggcggcgaacgaccggctgacctgcatcatccagtcgctggacggcacttggcaccggcccttcaccaccctggagctggccgcgctgcagagcctggtggacccggaagaacagttgatcctcgacggcctgagcgacagcgactggcgcgagcgcatcggcaacgccgtaccgccggccgcggccgaggccatcgccggcgtgatgggtacaacgctgctgctggccgaggccggcgaaaccttcatgctcagcaatacgcccatctgggtgcgcccggttgcggtggcgctgagcgtcgcgcaacaggaggtgcaaccgtga

SEQ ID NO: 340805 - DNA, 1356 bp, Pseudomonas aeruginosa
atgtctttcgatttcgatctgttcgtcatcggcgccggctcagggggtgtacgcgccgcccgcttcgccgccggcttcggtgcccgtgtcgcggtggcggagagtcgctacctgggtggcacctgcgtcaacgtcggctgcgtgccgaagaagctgctggtctatggcgcgcatttcagcgaggacttcgagcaggcccgggcctatggctggagcgccggcgaggcgcagttcgactgggcgaccctgatcggcaacaagaaccgcgagatccagcggctcaacgggatctaccgcaacctgctggtgaacagcggggtgaccttgctcgaaggtcacgcccgtctgctcgatgcgcacagcgtcgaggtggacggccagcgcttcagcgccaagcacattctcgttgccaccggtggctggccgcaggtgccggacattcccggcaaggaacacgcgatcacctccaacgaagcgttcttcctcgagcgcctgccgcgccgcgtgctggtggtcggcggcggctacatcgccgtcgagttcgcctcgatcttcaacgggctcggcgccgagaccaccttgctctaccgtcgcgacctgttcctgcgcggcttcgaccgcagcgtccgcgagcatctgcgcgacgaattgggcaagaagggcctggacctgcagttcaacagcgacattgcccgtatcgacaaacaggccgatggtagcctggccgcgaccctcaaggacggccgggtgctggaggcggactgcgtgttctacgccaccgggcggcggccgatgctggacgacctgggcctggaaaacacagctgtgaagctgaccgacaagggcttcatcgcggtcgacgagcactaccagaccagcgagccgtcgatactcgccctcggcgacgtgatcggtcgcgtccagttgacccccgtggcgctggccgagggtatggcggtggcacggcgattgttcaagccggaggagtatcgcccggtggactacaagttgattcccaccgcggtgttcagcctgcccaacatcggcaccgtcggcctgaccgaggaggaggcgctgagcgccgggcacaaggtgaagatcttcgagagccgcttccggccgatgaagctgacccttaccgacgaccaggaaaagaccctgatgaagctggtcgtggatgcccacgacgacagggtgctgggctgccacatggtcggcgccgaggccggcgagatcctccagggtatcgcggtggcgatgaaggccggggcgaccaagcaggcgttcgacgagaccatcggcatccacccgaccgcggcggaagagttcgtcaccctgcgcacgccgacgcgctga

SEQ ID NO: 340806 - DNA, 618 bp, Pseudomonas aeruginosa
atgaagatcaccgcagatcaactcgaccgcgctaccggctgcggtgcttctactgccggcctctgggtcgaccacatcaacggctccatggctcggtttgagatcaacacggctgagcgggtggcgatgttcctggctcaggtcgggcacgaaagccagagcctcaagcgcctggtcgagaacctgaattactccgccgagggcctgctcgcgacctggccgaagcggttcacgccggcagaggcgaagcagtacgcccgccagcccgagcacatcgcgaaccgcgtctacgcaaaccggatgggcaacgggtcgccggatacgggcgatgggtatcgataccgtggccgcggcctgatcatgatcaccggccgcgacaactacaccgaagctgcacgtgccctggcgctgccactggtagcgcaaccggaactgctggagcaacggacctgggcagcaatcgccgcgggatggttctggcattcgcggggtttaaacgatctggccgatcaaggccgatttgagcggatcatgctgaagatcaacggcggctacaacggcgcagacgaccgtgcggctcgcctcgaatgggcgcgcgcagcgctggcgggtgcgtga

SEQ ID NO: 340807 - DNA, 411 bp, Pseudomonas aeruginosa
atggcgagagcatggatcaacaactggaagacgacgctgagcgccggcctttcgcctggcgaattgagcctgacggtgccggatgctgccgccgcgctgctgccgctctctggcggtaactgggtgctgctgacgctggcggatgctgccggcgctcagcatgagatcgtgaaagcaacctcccgcgccggtggggtggtgacgatcgagcgcgcccaggaagccaccgccgacggcaactggccggcggggtcggcgatctatgcagccgtcacggccggcgatctcatggcactgcaagcgcgaatcgcggcccttgagggcggcactcccgaaggagccctggtcgatgcgagcggttcggctctcgtcgatggcgccggaaacaacctgatcatggagaacaactga

SEQ ID NO: 340808 - DNA, 765 bp, Pseudomonas aeruginosa
atgactgatctggcccccttcggcggccaggccgccaccatgaccagccgggagatcgcggatcttgttgggtcgcgtcacgacaatgtacgcgtgaccattgagcggctggccgagcgcggggtgattgctttacctgcaatgcaggaaaagcccactgctggccgccccgctcaggagtacgtcttcaccggcgaccagggcaagcgcgacagcatcatcgtcgtcgcccaactctatccggagttcaccgcccagttggtggaccgctggcaggaactggaacagcaggcttcccggccactgaccgccgccgagcaattactggccagcgtgcaactcaccgtcgatctggagcggcgacagcggcaaaccgagcagcaggtggcagcgctgaccgaaaccgtcggcgacatggaccgatcgcacccgctgctcgactcgatccccaacggcatggagagcattaccgctatccgtcagcggatcggaaagcagtacggcctaccgcccagggtgatcgacgcggtggtgcgtgaaatgccgcacagcccgcgccccttcgccatggtgcgcagcaagcacgaggaactgaacgcgcggcccttcgcggtctgggctaaggccgagatcagcagggtattcgagcgcttcgcgcgcggctgcaccttcgtgacccaacaccgagccacgcacccggatttcggcgccggccgggagcgcttccagatgcgcggcaccccttcgcaggagatcggcgaatga

SEQ ID NO: 340809 - DNA, 285 bp, Pseudomonas aeruginosa
atgagcaacgtacaaccgatggcaccgcgcaaggtcatgaccaggctggagcgggagtttctcaaggtggccggccaggagctggcgcaggtcaaggtgggcggtgctgctgccttggctgcgctgctggtcatgatcgccaactggcacggcgaccgcggcactctgggctttcacgactatggccggctctggttgctggacggcaatgcgaagggcgctgctgcggaaacgctgctgcgtgatctgttcggcctgaatggcaatccgaagggggctgcatga

SEQ ID NO: 340810 - DNA, 207 bp, Pseudomonas aeruginosa; identical to SEQ ID NO: 330464

SEQ ID NO: 340811 - DNA, 501 bp, Pseudomonas aeruginosa; identical to SEQ ID NO: 83644

SEQ ID NO: 340812 - DNA, 231 bp, Pseudomonas aeruginosa
atggcaacagtccagatgcccgacacccggaaggctgcgctagcgtcattcgtctacaacgtgggcgaaacgcagttctccaggtccacgcttctccgaaagctgaacgctggagacgtcaagggggcatgcgccgagttgtcccgctgggtgtatgccggcggcaaggtcttcaagggcctcgttaatcggcgcaaggcagagcgggagctgtgtgagcaggggctatga

SEQ ID NO: 340813 - DNA, 417 bp, Pseudomonas aeruginosa
atggctgaccgcactttccgcatccaaggcgctgccggcatccgtccggctttcgtcgcggcctggaacctcatccagggcctgatgaaagaagcgcagggtggctatgagctggtccttcgccctctcaagtcgaagcgctcgatcgaacagaacaagcggtactggtcccttctgcgtgaactggctgccgtggcatggatcgacaaccgccaattcgatgatcaggtctggcatgagcagttcaagcgctggttcatcggctgcgaggacgtgaagttgccggacggctcgaccgagttgcgcggcatcagcaccacgaagctgaccgtcgacgagttcggaatctacatgaccaagatcgaagcgtgggccgccgagcaagggtggccgctgatgatgcaggaggccgcatga

SEQ ID NO: 340814 - DNA, 192 bp, Pseudomonas aeruginosa
atggacgtcgagctcaactgggacgcgatcaacggccggccgacttcgacgccggcgcagatcgacactgccgtttcccaggcgcacacgcacgcgaacaagtcgacgctggacaagttcggtgaggagtctggcctggtgcgcttcaacggccagccgatcccggccgagtggaatgggacggcctggtaa

SEQ ID NO: 340815 - DNA, 153 bp, Pseudomonas aeruginosa
atgtggacataccgcgagcgccgcaaccgcgcggctttcagcaacgcgcaactcgcttacgaccgtgccgtcgacccgctctgggaccagccggagccggaaccggagcacgaggacgaagagcaggaggccgacgatggcctgggcgaatga

SEQ ID NO: 340816 - DNA, 696 bp, Pseudomonas aeruginosa
gtggacagcaagaaagcaatagaactcggtgcgaaggtgatgcagcttcaggcgctcatgattgcgtacgcaacggatggacgtacatctgatcaacctcgtgcctatcgcgatcaatatgccgatgtaacacttgagcttgaagatgcgaagtacgccaatccgaatccgcacaagtcactggaagtcttctatgccttctgcaagttgcaggagatgaaaacctacgcaagtcgtcgagcctatgtggaggagctgtatgctgatgtcttgctagacctcaagagaatacaacgccatgcgccatcctccaagaattggggaaaggcaaacgatgctctggccgacgaactgaacccgattcgtgctcagtggctaaaggctaagaacttcatttactccgcgacgccagacttcgagaactcgatcaaggagtctatcagttccgtcgagtcgtgcctcatggtgctgttcaacgagccgaatggaacgctgggcaagatcatcaagcaggcaaatctcgacccagatattgaacgactcgtaagtcaggcatacggcgccataagcaataaggcatttgtccggcatggcggtaccgttgcatcggaccttacaaaggccgaggccgagtttttcctagagttttctgctacatctatcgtttacatcacgcaaaagctgaagcatgagtag

SEQ ID NO: 340817 - DNA, 1911 bp, Pseudomonas aeruginosa
atgtacctcaagagattggccatcgatggtttcaagtgctttgagcatgacttttccgttgagctgcatgatgggctgaacgtgttagtaggtgaaaacggagctggcaagaccggtatcgtcagtgccattcgccagctttttaacgactctgaatccggaaagcgattaatccatgagcgtgacttctatcgtgggtttgagcctggcgcggtgccggcggagtcgatacgtatcgaagccaccttcagcgaccttcagcgggatgaacagacggcgtttatcgattggtgtggccgggagcctgaggcaaaactgacgtttgctgcgagtaataaggagtcacgggggcggtttcggcacgagatttggggggggccagaacacaccaagaagttggaagtggagaccctcgatcttatccactgcgtttaccttccccctctgcgtgacgccgaggtgaaactacgggatgggaggcagtcgcgccttgcgcgtctgctaaaggcgctttgccgcacagaactggaacaaagcagaaaggccggagaggtgcatcctctggaaaaacgtgtgggtgacttcaaccaagaactggcggagagcgaagagttcgccatcaagctcgccaatgaacggatcggggaaagcctgaagaaggccttaggccaacagctttcgcagagcaccgtgatacagttttctgaggtcaatttttcaaagattgtggaaggtttgcggctgctgttcttccctgatctgtcccatgctaaagttacgcaatttcgatctctggaagaaaacagtcttggctacaacaacctgctctacatcgcttcgatcctagcggaactgatcctagacgcggatgatgataaaggtgagaagacctacttgcgactgctattgattgaggagcctgaggctcacctacatccgcaactgcaaatccggctgctacgacatctcgaaaaagttgcaaaggcaagaggaatgcaggtgatcgtgactacacactcaacagtcatttcatctgctgtctcaatcaacaatgtcatccatgtgtcgaagacagagaagccgttagcggtgccgcttaggctgtgcggcttgtctgatccaagccgtaaatttgtcgatcgatggcttgatgtgactaaatctaacctgttgttcgcaaagggcgtagtgcttgtagagggtattgccgaggcgatcatgctgcccgaactcgccagaatcgttctgcagcgatttggggaggggaaaaattcgctggatgattacggcgtatcagtcatcaacctgaacggcatatacttcaactatttcatgcagcttttttgcgatttagatgggcagaacagaagcctgaatttacctgtgcgttgtgcaggtattaccgacagcgacccgcccaaatcagtcgagaaggtcattgacgagaatggcaaggagcgaaacgttccgtatttacctcatgctgagttgtatgtccccggcgagaaccacgcactcgcactgatttctgatatcgcaaagtctagctatgcccgcctctttggcagtcccttcaaaacatttgaatatgaccttgctctggaaggttctaacttggggcggatgctttctgtggctgcaaagttgtggcccgcgagcgagaaaggaacggtcaaacctgcgttggaggaggctgcaaaactcgacttcgtgcagatgaaaaatgcagataaggctgcccatgcaggagaattgctgtaccggattgaatgtacggagataggcaagggattgtacgctcaggtgctggctgatgagcttgctcgagatgcgacaggggtcagcgtgcctcagtacattcaagacgccatcttctgggcttgtgggctcgacgggcagatcccggcttga

SEQ ID NO: 340818 - DNA, 1716 bp, Pseudomonas aeruginosa
gtgtacctgaaggcctgcccgggcagcgggaaaaccgaggtcattgctgcaatggtgtgtcaagcggtgcgaggttggtctcggtttcctgcaggaatggcgattctgacattttctaacagtgctactgatgaactgagcagacgcttgaccagacacctaggtgagtcggtggcgtatccgcactgcgtatctacgttcgacagcttcctgctgtcccagatcgtggctggcgtcgcaagtatagtcaccgagtttcccggtaaagaaggtgactttcggattcgcgtagtggataacacttccaatctgtttctgacttcaaggagagtctcaggtcagcgaatctcggcgtgccggtacgattatgatcttaaaagcaagggcttcgtgttcgatacgggtgagctaacgctcgataaaaagctcaataaagtgaaacagacagagtcgctttttgaagacttggtcaaaacaaaaaagcgactgtggaaggcaggatttgccacgcacagcgacatagagatgatcgcgatcagagcgctcggtaataaggctctttcggattattttgagcgtttggcacgtcgcttcccagtgatctttatcgacgagtgccaagacttgtcctttgcccagctaaggatcatcaggagtcttcatcagcgtggggtacggtttcacttcgtgggcgacctgaaccagtcaatctatggcttccgccgttcagagccggggctagttaaacagttcgtcgaagaaaacgctttcaaatcatgcgctctaaccgtcaattggcgaagcgggcagggggttgtggatctttgcagcaatttgttgaagctggatcgactatcaggtaatccagctatagagaccatccggccgaagttgatccagtacgccaaatgcccctcggagatagttacgaccgtcctagagttaaccaagccctatcagcacgtcgttgtcgttgcgcgtgggcatagcacgctacagcgattcagtgtgtggagtgctctcacacctcaggaggagttggctttggcctgcatacagtttcacagcgacgatttaagcgaggttcgccaagcgatggaaacgtttgccgcctggctggtcaccaagttaggaactcaggtcaggacgtccgcaatgagttgtccccatgatctcgagtccggtctgacctggaggttgtttgtgtccaactgcctaacctacctcgctacctgcggctcagcgaatttagaactgacctggaagaactgggcctccttgaccaagaaaacgatacggtcgataccagaccagctttttgtaccggatgagcttgcagggaaacttggtgggttgcgagaagcgaatctttccgctccagcgggcttagggaaaaccaccttgcagagtcgtttggttcatcggcatcgggacgctggcacgcgccttcgctttgagaccattcaccaagtaaaaggtgaaacgcatgacgcaacggttgtggtctcttcgcagcagtctggtcctcatcagtcgcattggaaagactggctggcagaccccgcttctgaagccgcacgttttgcatatgttgccagctcaaggcctcgccacttgctgatttgggctgtaaagaagctcaaggatgacgaattaaaacggttggcgggcttggggttcgaaattctagagagtgagccgactctggtttcgtag

SEQ ID NO: 340819 - DNA, 858 bp, Pseudomonas aeruginosa
atgttcgcaaaaatccccagcactggcgagcttgatgggggggtgcgttatcaaaaacatggcgctggttgtagagtgttttttaatggaaggatggttgatttcgattttggggaagatggagaaatagatgaaatagagtgctttcggcttcagcgctttgctagtaaggatatggtgaaattctgctttgaaagtcatgaagaaatacgtaagtgctttgaggatgcaatcaagtctggctctttaacgaacgttgatgacttggctttttatatgaccggtcagccacgtctgcgagctacggaggttgactgtcgacttccaggtgatctactcccacctgaggctcaagacgttatactgaaaatctatgcgcacaattttcttcctgccgatctaatgcgtagcaattatgagaaactcgatgcccgctgggaaagacgaggaaggctctccaatacggatgaggtgaatatgcgcatatacttgtttacatggttggggtttttgtttgaagcatgcaagtggttcaagaagaagaatgtccgaaatttattgagaagtgagcggccaacagaatttagagagctaattgaagatgtaaatgtattgatttctctgtttgacaggtatgagtcccatcttaagagttttagaaatagcgtatttcacctgccggactctgaggtaattagagagtactttcatagagatgctgggcgaattgaatggtcaaatgaattgcacggtagacttgaggattttttttctcagtatcgagtgaattgctttgctcactacgcccttaatgagcggaaaagcgaactaaggtcacttgtaccgtcaaaaaagtag

SEQ ID NO: 340820 - DNA, 771 bp, Pseudomonas aeruginosa
atggcaagctctctcgctccacgtcaagttattcgtgatgggcagttcattacttcgccgaatggcaagtatatgttggtaatgcaggcggatggcaatctggtactgtatgaggacggaaataaacccctttggaatacaacacctgttgggccaggcgctaaggctgtcatggaattcaaccttaatatgtataataaggccggacagttggcatggaccagtaacgtgtctactccttatcttttcgaggattacaaagaccgtgcatacctagtgcttcagaatgatggagactttgggatattcatggatcaggcaaactgggcctctctggttctgtccaaaccagaggttggtgtcaagaacaagttgatccctaccggcactgtcatgatgcctggtactgaatatgtaaatggaaattatcgcctagtgtttcagggtgatggaaatctagtgatatatagaatcagccctattgctgtggtttggaccactaatactatgggggctgataaggcagttgtacaagcagatggtaactttgttatttacaaaggaaccactgtgctttggcagacgcgcactgcaacgggtgtgccggcatatctggagttcacagatagtggacggctctccttgagccaacccaacttgcagtggacgctcaaacgtggttcgttgtttgttccgccgaaggtaattccaggccagtatggtccactagataccaccccaatctggtcttggtctcacgactacccgtga

SEQ ID NO: 340821 - DNA, 660 bp, Pseudomonas aeruginosa
atgctcaaggacaagcaaagtttgctagtcgcagttcttctgtttgttagtggaggcgtgtttttcaatatccttccatccgtatctctggctattagcttggactggaatgcactttcggcaattggaactgttggggctgttttagtctctttggggcttgccgtgacgtcttggtggaacaggcgaggagaagaaaaactaagagcgaaacttgttgctgctagaattcggccagttcttgttgatttaattgatcagcttggatacttcagtgcttggtactatttcgataatctggatagtcctggtgaaatcgaggatgttcgtgggttggttaaacctttgaggatttgtacagattcgatttcaaaggaagacatagagcgcttggtggtgcttgaccaaaagtcaaccggctatctttccagtggggtcggtcgagttgaagcagtaataagtgaagtcgaaagagtaaccggtgattgggatgagataacggacgtccagaagggtagatacagagatacttgggggccgaccctagatgaggcaagggaccatatctaccaggcgatggatgttatcgagaaggctgtgaatgatgtcgctcctgagatagattggagccaggtgtacgccgaccatcacgaagattga

SEQ ID NO: 340822 - DNA, 165 bp, Pseudomonas aeruginosa
atgtaccccatcatttacgtcgccggcccctaccaggcgccggatccggtagctattgcccgcaacaacgagtacgccaggagaccaccctacaagtcagcaccattctgcggacatccagtggcgtttacggagagcttcgtgcaccaggaggtgcaaccgtga

SEQ ID NO: 340823 - DNA, 678 bp, Pseudomonas aeruginosa
atgatccacatcccccgcactgttgacctctggcatgccgctctaggcgacaagcaagccctgatgactgcacccgaatggcactgcgaaatgctgcgcagagctgcggacagtctcttatctgcaggtgatatcgaccggctggattatctcgacatgcttgacctagcgaccggcgcgctctcgcatgctcaggaagaacgtgtagcgcagtggttccgaccgaatcggacgtacctggttctgctcgaaagtcatgaggtcgggcagattgcgcgaggggcattcagaccttcggtacctgacctgagtgacggcctggtgcgatacgacgagcgcggcaagctcgtcatgctgtatcagcgcactatctatgctggggacatctacggccgccgatgggcatgcacgaatggccagacctacatcttcactgtgatcggctgcagttggcagggcagggaatggcgagcgcttaccgacccagaagaataccgccttgcgcaggtcttagccgagcaagccgaggagaacggggaaactgcagtagccgcaacctggcgagagcggcttgaggcatgcgagctacaggcatgcagagagtgcaaaggacacttcgcctctatggacgaatgtcgtttttgcaaaggcatgggagtagtacgcatccgaccatag

SEQ ID NO: 340824 - DNA, 864 bp, Pseudomonas aeruginosa; identical to SEQ ID NO: 330654

SEQ ID NO: 340825 - DNA, 255 bp, Pseudomonas aeruginosa
atgtcagatcaagaaccaatgaaagtcgcgtttcagcttgcgatttcccgggcagggggccaatccgagctttcacgaaagctcgccgcgttcggggtcaatctgtcccagcaaatgatttctcactatctgcgaggtagtgggcactgcccggcagaaatggtgctgaaggtcgaggccctgaccggcgtcagtcgccaccggttgcggccggacgtgtttggcgagcgcgacgatggattggctgttgcctag

SEQ ID NO: 340826 - DNA, 240 bp, Pseudomonas aeruginosa
atgaactactccagcctctccacctacgacctgctgaagcaccgcagccaccacgtcgacagcctgacccgcctgcgccgcgcccagccgcagtgggacgaggacgctgctcgacgcgggaaaatcacgatggccgatatcagcgaccagatccgcgagatcgatgaccaccttcgtccgagcggctgggagtcagtcgacctcgactactccggcgacaccgccccgatgtgcatgtga

SEQ ID NO: 340827 - DNA, 696 bp, Pseudomonas aeruginosa
atgactaattcacttcttattgcatcaaactctaccaatttccataagtttcagagatacatcgcgaatggtttggctatcatgggtcagtgcagccatacaggccacagtgtcacaatcttttgctttggcaatcagagtagccatcagcacagcacgctccattgctcctctcaatatcataaacagttgaaccatctctgggtccggaaaatcagcgggattgataccgcgcagtgcgagaaggtgttcttcagcagaagcaagagttgtcgtttgcaccagcctttctttatcggtggagaaacttttagcgagggcgctactgaccgcagcacactgggtcgaaacctccaatacgtatgcagtaataacttgttttttcttctctttttcggaagcttgatcacgactctgtctaatcgaaacaaatattgcagctacaatagcccccacagagcctatcgcctgtacccaagcggccattccttctctaataccagtagcagtaattacaacctgcaaaccccagccgagcgcagccagcgaaagaaacccccatacaacccaaatgctggccaacttcatgttttccggcattttaaagctacgcatcgtcaatgcccttttgctatcactcgcgccgagaggatgccagcgatacgtcccgcatgcaaagggagacgctatgaatga

SEQ ID NO: 340828 - DNA, 753 bp, Pseudomonas aeruginosa
atgagttggctcttttcgcaggcgctggtggaggcatacttggaggccacctgctcggctggcgaaccatctgcgcagttgaacgcgatgcctacgcagcacagattctggcgcaacgacaaaccgatggagcactcccgcctttcccaatttggtctgacgtatgcagctttgacggacgaccgtggcgaggacttgttgatgtggtatcgggaggatttccttgccaagacatttccgcagctggacctggagtgggaatcgaaggaccacgctcacgcctctggaaacagatggctcgaatcatcagtgaggtacgaccctctttcatcgagttggaaaactcaccactgcttattcatcgaggacttgccgtggtcctcggtgatcttgccgagatggggtatgacgcgcagtggatacgtctatcggcatccgaactcggagcgccacatgaacgcgatcgcgcctggctggttgggcgaaacatttccaacccctacagcggcaatgagcaaaggctcatcgaacaaagcacttacccgggtcgatggtcggtcccggctgcgaaaccgcctcgactattgggtggagcgcgatggcaagaatggccgcctgaatccggaattcgtcgagtggataatgggctggcccatcgggtggaccgccttaaagcccttggcaacgggcaggtaccacgagtggcggcggcagcattcgccctcctcgctgaaattggatgaggtcgcttga

SEQ ID NO: 340829 - DNA, 2466 bp, Pseudomonas aeruginosa
atgaaagagttgacaattaggcgtctgctgaatactccatttaaagatctatatttagaatttgttaggggcggcgaactttccgatgttcagcaggtgaaattgcttgcagttgctgtccttttgttaaaccaatcagctgtggaattgaagaggctaggatataggatagttctgttatatgggaacaggactggtcattatgatgcattatatgatgtggcaataaatagtgggctgatgcctgtgtcagcggtgatcaatgcgcaacgatttggaaaggaaagactcgctgagtcgtttatccttaattacgcggatagctatattgaaacatttcgacgtaatgatgtggtaatgaccgagcaacaagatttgttgcaggactttattcatgaaaaatacgacgagtcagtcgtggtggtagctccgacttcatatgggaagtcagagcttatcatatcttctgtaaaagataatccattgtcagtagtatgtgttattgttccatctaaggctctgctggcgcaaactaagaagcgtttggttgatgcggatatagacggtgttggaaaagtcattactcacccggaaatgtatgctgagggtaagccgagtagggtctttgtattaacacaagaacgcttgacacgactcctaagtgagcatgagtcgctatcatttgacatggtttttgttgatgaggcgcataaccttctgaatggagattatcgaaacgaactactggcttcggtaatttgcatggttggagctagaaatcgtaaggctacctttaaatttcttactccattcatttgtgaggaattgaacttaagagttcgctatttaaggacggggctggctggctttagaattgatgagtatgtgaaatctgagcttttttatatgtgtgattacaggggggataagggggatgaaatattacgattgtatgatcactttttgaatgaatgggtggatctgaagaagtcatacaagaatagctttgatctcgttttgggagagtctctttctaaaaatattatatatggtaataaacctaagaatattgaaatttttgcatgggctctcgcgcaaaagcttccgctggttaagtgcccgataataaagaaggcatgtgatgagttagcggataactttgatagccaatatttgataatcgactgtcttcggcgtggcgtgatgtatcaccatgggtcaattgctgatactgtcaggctttacttggaaagtatgttctctaagtctaaagatcttaaatatcttgtttgtagtgccacccttttggaaggggtaaaccttccgatcgaaagacttttccttattgatcatcgaaagggtgggagcaaccttacctcttcgcaatttaagaacttggttgggagggttaatagatttagtgaagtattttcaaagaaagggtctgagtcgctaaagaggttagagtcgagtgtttatctggtaggtatggatgggtatacaactagaaatgctgatttgtttgggtattatgagcgagtagttaacgtatctaagagtgataaagatgatcctgaaaatattttgctggaggcgacggatattgtagagggtgttaactctgataggtatgaggacgtaatagagcgtctagagaatctgcagccaggaattgttgatgattttgagtgtaaatatattaaaaccgaggtgggtcgtctaattcttgctaacggaattggggagattgatgtatttagtgtagaagaacttattgacctagagcttaagtcttttgttagtgagcatggggtcattcatagctcagataagctaatgttggcggttaagcagtgcttcattgatcatttcgacgaattgcgtggctatagtgatctttcccgtctagaggaggagtccgctcgagcattctatgccatgatgctggattggaagatcaagaagtacaccatgaaacagatgatttcacagttcttgaaacattgggatgaacgtgcggaaaagaatgcttcgactttggagtttgttggtaagtggggagataggaggttcggggaaagctataatgaacactgggtagccatgtctgagaaaacgcaaaaggaaaagataaatttagctattgttcggataaaagaagaagatgatttctttgactacaaaatatttagatttgttgaggttatgaatggggttggggttatagattccgatttttacaagaaaataaagtatgggactacagatgatataaaaattaaaatgattagggatggctatagtcgcgggctctctgatctaattttgaataaatactctaataaagttaaattgagtgcggatggtgaggttgatattgatcctaagttggtgggagaaatgatgatgaatgacgaaagcgatcttatgctttttgaggctcaaatgaatttaaaatatgtttaa

SEQ ID NO: 340830 - DNA, 804 bp, Pseudomonas aeruginosa
atggttgtggatggagtctttttcgaagagttcgagcaattcgcactttgctgtgtcgagaatttttccgacgagttgaaagagtcacttagacagaatctatcaaggatatgttacggggccaatcaggccagtcgtgagcgcaatatgtataaatatgctgctactatatcggctttttgggagcgttatagtagcaaggcagatcttacgaagaagggtatgcttggtgagttgttatctcatgtaatcatattagaaatgtttcctcgatttgaagtcgtgtcgcctttctttaatctggaagagcgaaatattaagaagggttttgatattcttctttatgagaagaatgataagtccgtctggattacagaggtaaagtcgggtgagttgcatgcaaagaaagatcagagtgcaacgacgaaagatctgctggttacagcccgggatgacttgaagaaaaggttagcagagcagcagcttaatcattggcaaaatgctatccatgcggcacgaatagctatcaatgaaaggtctgactacaaagatgtagttatagatatcctggaatcggaaggggatttagtagttggcaaaaaagctgttagtcaagataataacgcattcttggcttcggctctatttagcgatgtgtctagtaaggttgctaagtcggccttgcttgattttgtttctgatctcaatggtaaatccttgttcaagtcattctttgttttgtctttgcataaagggactttgagtaaggttgaggatttcttgaagttggaggctggtgtctaa

SEQ ID NO: 340831 - DNA, 159 bp, Pseudomonas aeruginosa
atggacaccttccaattctgcttcgcgggcatagtcggcagcgtcgccggcagggtcgtgacctggggcggcctgactgtcgatatcgaccagatcgagaatgcttggcttcgtcgggcaattgaagactatcgctctggccgtagggggcagaaatga

SEQ ID NO: 340832 - DNA, 216 bp, Pseudomonas aeruginosa
atggaagtggaagaaatcaaggctcaagacctccgcgcggcgcccccggtgttgccgtggcgggacttcgcgaactggattggcatgggggaagaccacgaaaccgtccgtggatggattcgcaagggctatctccccgcgtacaagatcggcaagcacgtgatggtcaatgttgcgctcttcacccatcaactgatggaaaaggaggagttctga

SEQ ID NO: 340833 - DNA, 789 bp, Pseudomonas aeruginosa
atgttcatttttgaaatcataaaacccggaacgtggctagatatagataaccatgactctgcatttgaaatcgaaagggctctaggtgatctggaatcgcagttttatacggcaaacatagctttaaataagttcatttcctgtgagagagagatagaggaacatactagaaatttgttctctgatgaagttagaaacagcgagcgcattcgaaaacacgagattgagcaggatatatgtagagagacaggcgctaaaagttatgagcagtttgaagaattgcactttcttacagaggttagatttaatcgtgagaaatggagcgctgggtatgttccagggcagttcctgaagaaatcaatttatatatatgcgcatgcatttgtttcggctgtcgacatgtttggacggtttcttacggttttaaaagggcaaccatctagctcggctattggagatatttcacttaaaaaattcaaagaggcattccctcagttaaggggtgtaaggaatagcgtgcagcacatggatgaacgctcacagggcctaaagacaggaagaaagcctatagaactaaaacctattgataacgaagctataaagtgcagcgggggagttattgcaataaatatactagtaaatgatcgctttgggataactctggatgatggttcatatggtgaggttgctatatccatagagtccttacaggttctaggcgaaatatttcagggaatattagactcttttaaatggcgcggcccaaaggcttatcttcctagtgcttga

SEQ ID NO: 340834 - DNA, 156 bp, Pseudomonas aeruginosa; identical to SEQ ID NO: 338804

SEQ ID NO: 340835 - DNA, 1350 bp, Pseudomonas aeruginosa
gtgggcggcggcaagcgcgtgcttcacgccgccggcgaccacggtgccgagcggttcatccagttcaaggacgcgcggagcctgtccgtcgcgctcgccgtagccgacttggatcagcgtcggggtggcaacggagaacgcgccgcccttcggccaggccgtgacggtgttcagcggctggtcaacggggtggaccgcttcgcgcgaccagttcgcaatgggaacgatgaaaggttgggcgcgctgaagcacctccttctcgatgccctttgcgatccgacgcatcgtcgcctcggccagcgggcgcttccggttgcggatggactggcccaggtcgctccagtcgatgcactcggcggccgtgcggtacggtttcatgcccttggccggcgttgcggcgtgcgtcttcactggcgccgcaggctcgtaaccgtcggcgacggccaccatgtacagccgctggcggctggtcgggtcgccatagtcgcagttgcgctcgatccagtattccagggtgtagcccaggccgcgcagcacttcgcagaagtgcgcccagctgcggcccttcggttgtccgtggcgcgcgaacttgcagcggcgtttccagcgcctggcgctgcttccggtaagggcaccggtgtccggcacaaggaattgctcgtcgcgcggcacgcgctcgcccggctgtgcaacggtgccgtcgagcttcaccacgcggcccgtggctttgtcgcgcttcgcgatcagcggcccccactggagtatttgcttcacgttctcgaggctgatgacccacgggcctttcccgtgacgacgcagcttgccggcccacttcggcacgacccacgacaagtcgcggatctcctttttgcgcggctggccaccggctgcttggctgtggtgccggcagtcaggcgaagcgtgcagccaggcaacgatcttgccgccggtgctttcgaggggatccacgccccatacgtcggtctggtagtgctcggcgtggggatggttggccatgtgcatgctgattgcggccgggttgtggttgattgccaggtcgaccttgcggcccagacccatttccagcccggtgctggcaccgccgccgccggcgaacaggtcgacgatgatcgcgtcgtcggtatcgtccagggccaggccgtactgcgtcttgaaatcaaaaacttgctttttcagagctgcgctcatgccgtcacccccttgcgatgggtaaccgcgagaagttcaagcaggcgccggtggaagtggtatcgggcgtcagctgccgaccagggactgatgcgtgctcgatggggcgcaatgccttcgaggcaaccccattcaacctga

SEQ ID NO: 340836 - DNA, 243 bp, Pseudomonas aeruginosa
atgggtgacatcctcgatcgcgcctccgaactggaggagttccatttacaggcggcgctcgcttctagaccccgtccggcgccggcgtacagtatcagcgcgacgatctgcgatgactgcggcagcgagatccccccagcgcgccgcctggcggtgcctgggtgtgattgctgcgttgagtgccagcagcgcagggaggtgcgtcgtggataccgcttgcagactaagtcgggtgcggtatga

SEQ ID NO: 340837 - DNA, 3552 bp, Pseudomonas aeruginosa
atgacgatcaccgtcgatgatgtaaagctgctgaaatcccagcgcctcaccgatgaggacgacggcggcggccgtgccaccgggcaggccgtggtggatcgcgagatcaacaacctgtttcccgatatctcgcgcctggaccggaccatcggccggatcaacctgcgcaaggccttcgccggcatcagctcgaacagcgccgagccgtacctgggcgctcatgccatcgtcacgcgggcgccggccgatccgcgtgtctcggtgctgctgttcaacaccggtagccagaccgacgagcgccgcgacgcgcgcaacgccatcgagtccttcgtggtgccggccgtgtccgcctcgttcgaactgctgggcaaccagttgcagggccagcgcgccatcgcttgcgtgcagcgcgaagaacagcggctacccgagattggcgaggtctatcagttggtgttcgagtcgcgctcgcagtatgtccgcatcaccgacgtcgaggcgcggctcgaacagttcgcccacgactacggcaacggcaacttcgtgaacttcacccggcgccggctggacctgtcgatcagcgcgccactgggcgcgaccttccccggcggccaggtgactccaggcggtaccaccagcccgaaaagccaggtgctcagcacccaggtcgccgatgccgcgcggtactacggcatcagccccctggccgaggctgtcagccgcggcgcgctgagcctgcgggtcaagtcggtctattcccaactggtgcccagtaccacccgggaaaacgcgctggtcgaccaactggccggctaccagcggcgcctgttcgctgcggccgggccggcgcggacggtcaacctgaatgtcgcgaacataggcagcggcaggtcgcggacgttcctcggcaccggctgcgcgccgggttcgctgtcgctgagcgccggcggcggtgtgttcgccgacgaccgcaagggaggcctgcgctacatcagcggttcgaactggattgccagcggtaccgtcgactacgagagcggcgcaatcgagatggcggcctccggcagcggctggagcgggacagcgagcgccacctaccagcctgccgcggcggcgacgggcgaagcggtgaccggggagatccctatcgaactgggcaaccgcggcttcgtctacaccctgtcgctgtccgaagcgccgccccagccgggcaccctggtggtctcgttcctcgccctgggcaaatggcaggagatccgcgaccagggcaacggcgaattggccggggaaggcaccggcacggtggacttcgcgaccggctcggtatccatcaccctgagcgcgctgccggacgtggggagttcgctgatctacgcctacgtcgggcagaacgatgcggcgctgacccagcgcaccggcaccagcgtgcaggcgcgtgcgcggatcaaccggacgttgccgcaccaggggctgttgcccggctcctacaaggcgacgttcaaggtcggcggggtagagcgcaccgtgctcgatagcggcaacggctcgctcagcggtaccggtggcagcggccagatcaactatgccgacggcaaggtcagcatggaattgagcgccaccccggatgccgggagtgggatcgtgcatacctaccagcagggcagcgtgaccgacagcccgctggcggtgacctccgacagcaccggcatgtgcatcggcactctccccggggcgccgctcaaggcgggcagcgtgcgcctatcgtggatcaccaagcgtcgccaggcggcgccgaccctcggtgcggacatgggcaccggggcgctgccgatcttcgaatcggagatcaccgtggacaactcggtgaccgacgacgccgccggcggctgggccgggcgcgccgggacgatcaactacgagaccggcgaattcagcctgaaggtggccggcaactacgtgttcaaggagtacacctactacaccgacacggtcgacaacttcggtatgaagaagctgcgtctggtggccaccgataccacgttgctggaggggttcggcggcacgctgagcgtgcgcgcgcagagccgcggcgtcgagtacggcgagcagaccgattcgcagaccgtcgctccggtgaccctggacctgttgcctggtgtggccgagccgatcctgccgggctcgctggtgttcacctgggccggcgaggtctacgtcgaccgctccggtgtgctctacaagaacatcaacagcagcaccaacgccggcatcgccgtcggctcggtggactacgccggccgtaccgcgacgctgaacacctatggctcgggggcggcgccgacggtcacgctgctggcctgcctgactaccaacgccggcttcagcgtcaccagcatgaccttccgcacgccgggggcgccgctgcgttctgcgagcctgcaggtgacggcggttcgcctggataccgcgcagatcgtgaccaccacggcggacgcgaacggtaagctcaatggcgcggtgatcaagggtagcgtcgatatcgtgaccggcatcgtccggctgcgcttcaccagcaatctggaggacaccactggggccagcgatatcccggtgattccgctgctgctgcgctacaacgcggtcgtcttcacctcgctgccgctggacgccaccctgctgggcctggacccggtgcgactgccggcggacgggcgggtgccagtgttccgcgagggcgacgtgatggtggttgctcataccgccgagaccacggtgccgagtcctcaagccgggggcgtgctgcagctcagccgcgaccagcaggccgagatcaaggtggtggacgccaacgcggtggaactggcctcggcgggctacagcgtcgacctggaacgcggccgggtgacatgggccaacccgctggtcctgcaggatgccgagggcaacccgctgaccctgccgctggtggtgcgtgaccgggtcgagcacatgaccctctgcaccgaggtccaagtgaacggcgagttgggaatctcctcgccgctgccctgggatctgccggcgggcgaaacgctggcgtccagtgcgctgagctggggcgacctgcaggcgcggctgcaccactggttcacccagcggacctgggatatcggctcgccgaactggaccgacgagcccaagggcgacgggaccaccgccaactacaacagcctcgcctatccgccgctgatcgccaaccgcggtgcgatcgatgcgaagtgggcgctggtgttcaactcctcgaccagtttcagcgtggtggaggagaagctgggggtcatcgccaacggcactaccaccaccgacacggcgccgatcaacccggagacgaacacgccgtacttcaccatccgcaaggaaggctggggtagtggctgggcggccggcaacgcggtgcgcttcaacaccgactcgtgtctggggccgatgtggatcgtgcggacggtactcagcggcaagggcaccgtcgaggacgatgaattccacctgcagattagaggagacgcggactga

SEQ ID NO: 340838 - DNA, 903 bp, Pseudomonas aeruginosa
gtggtgctggtgtcccaggcatccgcgatatcctgcgcgtcctgctggatctgctggcgaaaaccctcgctcatgctgctgagcaggtcgtggatgccggcgacggaactgcggatgcgctccccacccagcgccgccgggatcttctccgccaccttctcgatgccggcgaccatcagcgacatggtgccggtccaggccagggcgatagcgctgatgcccgaggtgacgccgttgaacaacgtccggaacggcgcgatgaacagttgcacccgcgaggccatgtcgtccagctgggtgctgaagctgctaagccaggccgaggtcttgtcgatcagggtgccgaaatcgacgtcggccaggcgcttgatgaagcgctcgacccattccgagccctggacgaaggcatccgacagccccttggccagcgtgtcgaggcgcccgtcctggtccatctgcgcgatggtatcgcccagttccttcagcttgttcttgacgtggtccagcgcgccagcgttggcaatacggttgagaaagtcggccgcagtgtcgccgaggttgctgaccagaccggtcagggtgctcatggccttcgcagcggccccttcggagctgcgccccatttcgtcgaccagcgccttgatgacgtcccggccaagcttgcccttgctcgccagatcctgcagctgcgcggcattcttgccggtgaccttggccagcatgtcccacaccggcactccacgctcgaccagttgcaggatctcctcggtctgcagcttctgcttcgcccaggcctggccgactgccgtcgtgatgccctccaggcgctccatgccgccgcccagcttctccgactggtcctcgatcgctttcagcgacccatccatcgggtccaggccgtag

SEQ ID NO: 340839 - DNA, 591 bp, Pseudomonas aeruginosa
atggagttcatgaccaaggcagcgttcgcggaccgccaaggctggtcgcgcgcctacgtgtcgaagctggtccggcaaggacgtctcgtcctcaccgccgacggaaaggtcgacgtccaggcgagcgacgaactgctggccgccagcgcagacccgagcaaggctgccgtggccgagcggcatcggcaggagcgggtggagaagggcgtgtacgcccacataggcgcaggtgcagccccgagcccggccttaccggcaccagggcagaccgcaccgctgcccgactaccagaaggcccgcgcgcggcgggagtacgccctggctctgctggcagaagacgaacaccgcaagagccgtggcgagacggtcgagcgcgcgcgtgtcgactccgcggccttcaccgctgcgcgcgctctgcgcgatctgttgatgggcgtgccgccgaagatcgccggcgacctggtgacactgaccgacccctgggagatcgaacgccgcctgacccaggcgctgcgccgtgccttggaagatgccgaccgcctcctgcagctcgatgccgagatcgaacaagggggcaaggagccgaactga

SEQ ID NO: 340840 - DNA, 441 bp, Pseudomonas aeruginosa
atgggtacttatttgttccaatacgcacaagataaggactatgtgcttggagttaccgatgaaaattccaacgccaaggtggtattgcgaaaagcgaagggaacgccctatcgttacatcctctgggatgtcgatcaggactcgggggttataaccctgaactctagcggcggtcagcttgcgattgacccgcagggtgagaatctctcttcacaaaccctgctaacgctggctgttgtgaaaactggtgctcagagtcagcgcttcgatatggtcacgaaaccgctctatattttgagcgtaccggaaccgggactttgcattgataaccaggatcgtgtagtcaaggacggaaatcctatctggctctacgagttcaacggttcgcaggctcagcaatggataccgcagcgactctcgttcgcgaaggctgatttctaa

SEQ ID NO: 340841 - DNA, 963 bp, Pseudomonas aeruginosa
atggcccgcggcggcatcaacaaggcgctggttcagaaagcccgccagaccattctggcgcgtggtgaaaatcccagcatcgacgcaatacgggtcgagctgggcaataccggctcgaaaaccaccattcaccgctacctgaaagagctcgaggacgctgactccggccggagtaccgtcgtactgccgctcagcgagcagttggccaacctggtgggccagttagcggatcagctaaaagaggaagcacaggccgccgtggcccaggagcgcgagcaactggcacgtgaacgactcgactaccaaaaccaggttcggcaagccgaaagccgcatccagcagttggagggtcagtgctctggtctcacggaacagctccagaatgcccagcaagcactgcagcaggagcaacagctacgccaacaggccgaggtcgagaatgcccgcctgcagcaagccaaccacgaccaggaagcgcgcctgcaagaccgcgacgggcagatccgttcgctggaggacaagcatcagcacgcccgtgatgctctggagcactatcgccaggccagcaaggaacagcgtgagcatgagcagcgccggcacgagtcgcagctgcaacaactgcaactggagctgcggcagctacagcagaccctgatcgtcaagcaggatgagctgacccaactgaaccgcgacaacgcgcgcctgctcgccgaggcgcggcagctgcagaaggatcagcatgcacagcaacagcttctcgctcagaggactcaggccctggagatcgcccaaagtacattggccggcattgaacgtacgaatgaagccctggagcaacgctgtcacgccttgcaggaggaagtgatccgacttggtgaagcctcctcaattcaggcgcagcaagcgcagagcctgcaggagcgcctggctgaagccagcgcgcaacgggttctaccccgttag

SEQ ID NO: 340842 - DNA, 945 bp, Pseudomonas aeruginosa
atgaatagctggttaacccttgtcatcggccttcccactgccaacgccaccacgcgcatgcgggcgtggcgggccctgaaagccagcggtgccgccgtgctgcgcgacggcgtgtacctgttgcccaacaacgagtcgtgccttgaagcactgtcagccgtcgagcgcgatattctctcgatcaatggcacggcctttctgctccccatcgatgatccgcaaggtgcccgtttcatcgagctgttcgaccgtagcgaggactacgccaagctgcgcgtcgagatcgaggcatgccaagcccagttgaccccggacaatgccctcgccagcaccaagcaggtacgcaagctgcgcaaggcgtttacccaggtggcgtccatcgacttcttccctactgcggttcggcaacagaccgacacggcgctgaaagtgctggaaacggccatcagccgggcgctgtcgcaggatgagccgagaagtcaggatcagcccatcgagcagctcgaccggagcgactaccaaggccgcctctgggccacccgcaagcgcccttgggtcgatcgtctggccagtgcctggctgatccgacgctgcatcgatccggacgccaccatcctctggctggcagcgccaggagactgccccgccgatgcgctgggtttcgacttcgacggcgcaaccttcagccatgtcggtaaccgcgtcaccttcgagaccctgcaagccagcttcgctctggacgagcctggcctgaatcgcgtcgcggccctggtgcactacctggatgtcggcggcgttcagcctcccgaggcctctggcatcgagcgggttctggcggggctgcgcgaaaccattaccaatgacgaccacctgctgactgcggcctgcgccatcttcgatggactactggcagctttcgagaaagaagagaaagccgatgagtga

SEQ ID NO: 340843 - DNA, 1362 bp, Pseudomonas aeruginosa
atgagtgagaccaccactaccgccgcgcaggatctgccgcgtaccgagtccgtcagtttgttccaggccttgctgttctggctcaagatgggattcatcagctttggcggcccagccgggcagatttcgatcctgcaccaggagctggtcgagcgccggcgctggatatccgaacggcgtttcctccatgccctcaactactgcatgcttttgcctggcccggaggcccagcagttggccacctatatcggctggctgctgcatcgcacctggggtggcgtgatcgccggggtgctgttcgtgctgccctcgctgtttatcctgatcgcgttgtcctgggtgtacattgccttcggcgacgtcccgctggtggcagggatcttctacggcatcaagccggcggtcacggccatcgtcgtgcaggcggcccatcgcatcggctcacgggcgctgcagaacaattggttatgggccatcgccgcagcctccttcgtcgccatcttcgccctcaatatgcctttcccgctgatcgtgctcggcgctgcgctgctcggcttcgtcggtggccgcttggcgcccgataaattccgtgtcggcggcggccatgccgccgccgggaagtcgttcggcccggcgctgatcgacgatgacacgcctacgccggagcatgcgcgctttcgctggtcgcgcctggcattgctgctggtggtcggtgcgctgctatggctactgcccatgggcctgttgaccgtcgccttcggctgggacggcaccctgacccagatgagctggttctttaccaaagccgcactgctcaccttcggcggcgcttatgcggtgctgccctacgtctaccagggggccatcggccattacggctggctgaccccgacgcagatgatcgacggcctggccctgggggaaagcacgccgggtccgttgatcatggtggtggccttcgtcgccttcgtgggtgcctatgtgcagcaggtgttcggtgccgagcaggcctttctcgccggtgctgtggcggccaccctggtcacctggttcaccttcctgccgtcgttcctgttcatcctcgccggcgggccgctggtggagtccacccacaacgagctgaagttcaccgcgccactgaccggcatcaccgctgctgtggtgggggtgatcttcaatctggcgctgttcttcggttaccacgtgctctggccggaaggtttcgtcggacgcttcgactggccttcggcattgatcgccctggcggcggccattgccctgttccgctacaagcggagcgttatccaggtcttgctcggctgcgcgctggctgggctggcagcgtattggctacagaactga

SEQ ID NO: 340844 - DNA, 453 bp, Pseudomonas aeruginosa
atgaagtggataacccgggaacgaccgaagatcgaccgtatcgcctgcccctggttgatcgcccggttcatcgatcacgaggcggagtttctctacgtgcccagcaacgaggtgctgggccgggctcaggagctggacgccacgccctacgacattccaggcgtcgagctatctcacgtgggggagctgtgcagcttcgacgcgttcctgaagaagtaccggctggacgaaccggcgcttcagcagttggccgcgatagtgcgcggtgccgatacctcccgcctcgacctggcgccgcagtcggccgggttgtacgccatttccttggggctgtcgcaccacttcgccgatgaccacgagatgctcagccatggcctggtgatgtacgacgcgctttacgcctggtgcaagaactgccagggcgaatcgcacaactggccgccacagatgtga

SEQ ID NO: 340845 - DNA, 135 bp, Pseudomonas aeruginosa
atgaagaagctttctgccgcactgatcgccgccataattgccctgacttccgtgtctgcgctcgcccacagcggcggtaccgactcgaaaggctgccaccgcaaccacaagactggcgactaccactgccactga

SEQ ID NO: 340846 - DNA, 708 bp, Pseudomonas aeruginosa
gtgaaacgcgatgccaacctggatctggtcaaatggttggccatgctgaccatggtgctggaccacctgcgctacctctggccgcaggcggcggactggctgttcgtgattggccggctggcctttccactgttctgcctgggcatcgcggccaacgtcttccgctcacgtccgggccagttgtacaccgacggcaacgctcgctacctggcctggctcctggccttctccatcctctccgaactgccgtaccgcctgttgtccaccgagagcagcacgctgaacatcatgcccaccctgatgctggggctgctgatcgcctggggtgtgcatcaccgtggccgcgatggcttgctcctcggggtgatgaccttagccgtggtgatcgtgttgcatgaacgtctgatgtacggcgtctttggcgcactgttgcctgcggccttgctactggccatacagcgccccggtccagggtggctattgccggcagcgctctgcgtcctggccaacagccgtaatcgctgggccgtaggctgggaactccacgatttgggaggcagcataacggtggagttcatggctcctctgctgggcctatggctgttgcgcatgaagatcgactggagggtctggccagtcagacgttggggctatctcttttaccccggtcacatggccgtgctgtccctgttccgcccggtgctgtag

SEQ ID NO: 340847 - DNA, 441 bp, Pseudomonas aeruginosa
gtgtgggatctgtccgcctatgccggcctgttcatcgcggccctcggcgctgccaccctgcttcccatgcaatcggaggcggtgctagtcggcctgctgctgaccggcaatcactccgttaccgcactgttgctgatggccacgaccggcaacgtgttgggctccgtggtcaactggctgctcgggcgctccatcgagcattaccggaacaagcgttggtttccggtcagtgacgacaagctggatcgtgcgcagcaggcctatcatcgttacgggcgctggtcgctattgctgagttgggtgccggtcatcggtgatccgctgaccatgatcgccggcgtcatgcgtgagccgctctggagtttcctgctgatcgttctgctggccaaggccactcgctacttggtgttggcagccctgaccgtgggagtgtcctggtga

SEQ ID NO: 340848 - DNA, 1128 bp, Pseudomonas aeruginosa
atgtcgagcttcgctgaactgttgcagcaaggcgcttcgcacgcctggctgtatttccccagcgccatcctgctcggggccttgcatggcctggagccggggcattccaagacgatgatggcggccttcatcatcgccatccgtggcaccgtaaagcaggcggtactgctgggcctggcggccaccgcttcgcacacggctgtcgtctggatggtggcgatgggggggatgtaccttggccagaacctggatgcgcagaccaccgaaccctacttccagttggcatcggccgtcatcatcattgccatcgcgctgtggatgctctggcgcacttggcgtggcgagcagatgtggcgtttcgaggaggattctgggcagtcacacgagcatcaccagcatgatgaaacacaccgtatcgataccggccatgggcgtgtcgagctatctatcttcgagggcggagttccacctcattggcggctaagtgtatttagcggccgtgcctggccagctaacgaggtctgcgtgctcacgacccgagccgacggtcaggttcggcagtttcgcttcgtggatcgaggcgattacctggagtcgctagatgcgatccccgagccccaccagttcaccgcacgcctgagcctggggcatgcggggcattcccatgactatgacctggactttcacgagcatggccacagccacgaccatgccgagctggagaagctggaactgtccctggagggctaccaggacgcccatgagcgcgctcatgccaacgacatccgcaggcgcttcagcaaccgcaatgtcaccacgggccaggtgatgttgttcggcctcaccggcgggctgatcccatgcccggcggccatcaccgtgttgctgctgtgcctgcaggtgaaggaggtcgcactgggcgccgtgctggtgttgtgcttcagcatcggcctcgccctgaccctggtcgcagtcggcgtcgcagcggccatcggcacccgccaggcatctaatcgctggccctggctgggcaagctcgctcgccgcgcgccctacctctccagtgcgctgatcattgccgtgggcatctatgtcggcctgcatggttgggctggcctgaccgcctag

SEQ ID NO: 340849 - DNA, 288 bp, Pseudomonas aeruginosa
atgggcaagcacgaacagggtcatacgcaccaaagtcatggtgacatcgtcaaaaggttgaagcgggccgaggggcatttgcgcagtatcgtcaccatgatcgaggacggccgcgcctgcgtggatatcgcccagcagttgcacgcggtggagaaagcggtctgccaagccaagcgcaccctgatccaggatcacatcgatcactgcctggagcacaccgtcgttgccctgaccagcggcgagcgtgctccgctggatgagttcaagcagatcaccaagtacctataa

SEQ ID NO: 340850 - DNA, 492 bp, Pseudomonas aeruginosa
atgtcgtcggtccgtaatcaccgccttgccatcctctcctgcgaagaaatcgacgagctctacggtctaccacagttcaccgatgaagaccggcacacctatttcgacctgagcccgcccgaacgggcggcgatagaggcgcgcgccacgtccactggcgttttcctcgcgcttgaactgggctacttcaaagccaagcgccagttcttcgtcttcgagctccagggtgtcgccgacgacgtgcgctatctgttggcccggtacttccccggtaaaaccgaggctggcgttcgaagtctgccgtcccgccccacccgggtgctcattcggcaaaccgtactggcgctgctgggctaccgcccttgggatgcctcggccctgcagcttctagaagagcgggcacgacgcatggccatgcgctcgacctaccagatccaagcacctacctgccatatggtgcgccaattggctctaaaatcatgtcatatgtag

SEQ ID NO: 340851 - DNA, 471 bp, Pseudomonas aeruginosa
atggattcctcgcacgcttgcgctcgctggccagcgtccgccccccgtaagccaacggaataccttctccgaaaaaatactgaccagctcagcccggccatggtctacaggctcacggtcaaaggcttcgacctgaatgacgtgaaagacatgcttgcgatttctgatctgtattcaacgaagaagatcatgagtcgcattgttggtaagtccatcagaagcattcagcgccagggcaataagcaaccagcacacctaaattcgcagcagagcgccatagcttttcagtacgcgaaagtattggaatacgcgacccacgtgttcggcactcagaagctggctgaagaatggctagggcggccctgcaggtatttggacggcgatgtgccgctggacgttattgataacccggtagggtttctggtactcgaggagtatcttgagcgcatcgagttcggagtctaccaatga

SEQ ID NO: 340852 - DNA, 954 bp, Pseudomonas aeruginosa
atgaagcgcttgatagtggcgagccttgccacgctagtcatcacctccctcgccctcgccgaaccaccgtcgaccttcaccgccgcaaaagcgatcgccaagaacaaggtgttctatgaccaggcgtctaccgggctcggagacctttactgcggctgcgcatggaagtgggtgggcaaatcaggcgggcgaatcgacgccgcctcgtgcggttacgatacgcgggctcagcagacgcgcgcggagcggattgaatgggaacacatcgtgccagcctggatcttcggccaccaacggcagtgctggcagaacggtgggaggaagcactgcgtggcggacgacccagtcttcagggcgatggaggccgaccttttcaatctttacccgtccgtgggtgaagtgaacggcgaccgcagcaattaccagtatgggttggtggctggcggcgctgccctctacggcgcatgcaccaccagagtggacttcaaggcacgctccgccgagccgcgtgatgaggtgaagggcctggttgccagatcgacattctacatgtacgaccgctatggtttaacgatgtcgcgccaacaacaacagctgctgatcgcctgggatcgccagcatccggtttcgacgtgggaacgggagtgggacagccgcacggcaaaagtcatggggcaccacaatcccttcattactggcgagcgcgcttggacactggggcacaaaccattgcgagaggggcttgttagccaacctcctaccaggatcgctgcacccccttccgctaaagtcgtggcccgtgacgtgatcattggtaaccggaacagccgggtgtatcacctgccgcaggactgcccgagctacgccaaggtggcgcctaagaaccaggagattttcaccaatgagtccgcagccatcgccgcgggctacaggaaggccgggaactgtcgctag

SEQ ID NO: 340853 - DNA, 1257 bp, Pseudomonas aeruginosa
atgttcgcgctgattgactgcaacagtttctacgccagctgtgaacgcgtctaccgaccttggctcgacgccgtgccagtcgtggtgctgagcaacaacgacggctgcgttattgctcgcacccgcgaggctaagcgcttaggcatccctatgggcgcaccgtacttccagtggcgagaccagatgcgggagtggggcgtagtctgcttctcaagtaactacgagctctacggtcagatgagcgcgcgcgtgatgaccacgcttgaggagatgttcccgcggctggaggtgtacagcatcgacgaggcattcgcggatctgactggtctgcagagtgacttggtcgagctggggcgcgaggcaagggctcgggtactgctgtggactggcataccagtgggcgttggcatcggacccactaagacgctagccaagctggctaactgggcggccaagacctggcgcaaatcggaaggggtaattgacctgcgcgatccatccaggcgcgatcgcctgctgcagatgactgatgtgagcgaagtgtggggcgtcggccgccggctaaccgcccggctgcagccgctgggcatcaagacggcctgggacctggcgcagtatgacccggtgtcacttcgccggcagttcagtgtagtgctggaaaaaacagcccgcgaacttcgcgggatctcgtgcctgcagcttgaggaggccgtgccgccgcggcagataatctgcagtagcaagatgtttggtgctcgggtgcgcgagttaccgccgatccgcgaggcggttgccgcctacgtgtccaaggcggcagaaaagatgcgcgcgcagggtagccttgccggtgccctgcaggtggccatccgcaccggcatgcataaccccgaccagccgcgctacgccaacgcaatcaactgcccactgccgtaccccaccgacgatactcgtgtgctcgccgcagcggcaattcgcggcttggatgccatctaccgccccggctacgcctacagcaaagctgaggtgttgctgatggacctgcgccagcgcggggaatttacaggcgacctattcgcggcctcacctagcccgggcgctgatcggctgatggccgtgatcgaccgtatcaacgcccgcgagggcagggggacagtacgactcggccgcatccccgccgcccctgagtgggcaatgcggcgcgaaatgatgtcgcagcggtacacgacgaggtgggatgagttaatggtagtgagatga

SEQ ID NO: 340854 - DNA, 1746 bp, Pseudomonas aeruginosa
atgcaaccgctgacggcagcggacgatattgccagcaacacaatggtgcgcgactggttggcggagagcgaaaatggtgccgatctaccacgctttgtcagctacctgagtggagtgttggagcagcacaaggccgccacggctttcgtgatttcttcggcaaccagtcgccattacagtgaaaaggggctggagcgcacgctgagccgcgctaacgcccaagacgcctggtattaccgtttcctcgacagtgcgcagcgccgcgtcgtcgaaattggtaccgacggcaataccggcgccctcacgctgtttatcgatctgcgcgtggaaaaagctggtcagttgctgggcgttgccggcctcggtttgcgcatggacgagctctcaactctgatcaaaaacttcagtttcggcgagcgcggcaaggtgtacctggtgcgcaacgacggcctgattcagatccatccgcaaaccgatttgaacggtgatcgccaactcgccgagcagattggcgcaccggcagcacgggccgtactgggcaagtctgcgctgtcatcggcggctttcgagcgcgagggcgagccctatctggcgatcagcttgccattgcgcgatttgaattggacgttagtcgctgaggtgccggaagcacaaatctatgcgcaagcgcaccaggcgctgtggttgaccagcctgatcggtgcgggtgtggcgctggtgtgtctggcattggtggtttggttggcgcagagcctggtcaagcctatccagcaggttacccgtgccttggtggcaattggcagcggcggcggtgaccttacccatcgcctggatgacagccgtgctgatgagttgggggatctggcccgtggcttcaaccgctttttgctcagccagcgcgagatgatcgcggacgtgctgaataccagcgagcggctgcgctccacggttggccaagtggcgaaggtggtggacaacaccgccacgcgtgccgaccgccaacaggaaatgactgagatggtggccactgcagttcatgaaatggggctgacggtgcaggagattgcgcgcaacgccggcagtgcggcttctgcgtcgcatggcgctcgggaggaggcgttgcaggcccgagaggtggtgcgcggctccatttcccatattgaaagcatgtctgacgatatcggcacggcttcgggcgcggtgggcgagctggcccggcaagtggcctccatcgaccaagtgctggcagtgatccgtggcgtctccgaacagactaatctgctcgccctgaacgcagcgattgaagcggcgcgggccggcgaaatgggccgcggctttgcagtggtggcggatgaagtacgcacattggcgcgtcgtacgcagctgtccaccgacgagattcagagcatgatcgccggccttaagcagggcgcggaaaacgctgtggcttcgatgcacaaggggcaggcggctaccgggacaggggttgcctccagccagcgcacgggacgttcacttgaggcgatcaccgagcaggtgaaccgcatcagcgacatgaaccatcaggtggcggccgctaccgaggaacagtcggcggtgaccgaggagatcaaccgcaacgtacaaggcatttccgatctggcgcgtgctaccgcgggggaggtgaatgattgtcgtcaggagtgccgcaccttgagcggcctggccgacgacctggcgcggcagatgggcgggttcaagctgtag

SEQ ID NO: 340855 - DNA, 663 bp, Pseudomonas aeruginosa
atgctcacccagaaaattgtctctgccatatcggatgcgatctaccaccggcgcttgccgccaggcacaaagctaaatgagcgggatattgcggagttgttcgatgtaagccggacggtggtccggcaggcgctgatccggctttcgcaggatcgcctggtggaggtgtcacccaaacgctcgtcatccgtggcctgcccgaccttcgacgatgcgtaccagctctaccagatgctcctggtactggagagcggtgtgattgaccaattgaccaagtcgatcacccagaacgagctggagatattgcgtgcccacaccctcaaggagcaggccgcgtaccaagcccacgaccatgatctgggcgacaaactgggccgtgagtttcactcgctgctgatctcgttcctgaagaacgacattctcaacaacatccacaaccagctgcgccggcaggaagcgctgatcaacgcgctataccgctcgggcttcgattactgccagctgcgtgacgagcacacccgcctggtggattgcttcgagcgccgcgacgcggcgtctgccaagaacctgctggcctcgcactacaacctggtgatcaagggttacaagttcaacacgacggtgccgccggatatcgaccttaaagcggtgctgggtctgtaa

SEQ ID NO: 340856 - DNA, 153 bp, Pseudomonas aeruginosa
atgaagacaatctcggctccaaacaaggcgcaatacctgcgcatgcttctgctggcgtgccagcatgtgatggtgatgtatgccggggcagtggccattcccctggtgcttggcgcggcgctgggtctgtccaagaccgacatcgccttctga

SEQ ID NO: 340857 - DNA, 1164 bp, Pseudomonas aeruginosa
gtgaccatcatccaggccatcggtatcgggccggtcggtatccgcatgccggtgatgatgggcgtgaccttcacggccatcggcccaatgatcgccatcggctccgatcccagcgctggtttgtcggctatttttggggccaccatcgctgccggcttgttcggcctggccatggcacctctagtgggcaagctgctgcgattctttccgccggtggtcacaggtaccgagattgtcgcggtggggctgtcgctgatgtcagttgccgcggcatggtccgccggtggttttggcaacgccgaattcggccgcccgctgtacctggcaatcgcctgtgcggtactgctgtgcatcttgctgatcgttcgtttcaccaagggtttcctcaacaacatctcggtgttgctgggcctgatattcggttttgccctgtcggctggcgcaggtttggtcagcctggacggcatcgaggacgccacggtgttcggtgtgatcctgccgttccatttcggtatgccgacgttccatttgtggcccatggcggccatgtgcatcgtgatgctggtgacctttatcgagtcgacaggcatgttcattgccttgggcgagatcgtcgacaagcccatggatgaacgcaccctggttcgtggctttcgtgccgatgccctcggcacggcggtgggtggcatcttcaataccttcccgtacacctcgtatgcgcaaaatatcggtctggtcagcatcacgggcgtgcgcagcccctgggtgtgcgcgttggccggggcgattctgattgtgctgggtctgtttcccaaggtggcctacttcgtggcgtcgattccgccctatgtgctgggcggtgccggcatcgtaatgttcggcatggttacggccagtggcatgaaggtgctcggccgggtggatttcaagaatgtcggcaatctttatatcgtcgccataagcctggcggtgggcatgttgcccgtggtctcgccgcactttttcagcaagttgccttcctcgttggggccgatcctggaaagcccgattctgctcacggcaattgtcgcgatcaccttgaatatctttttcaacggtatcggtttgagaaaaccgcagaacgacgccgcgactggcgagggtattggtcaacactccaactga

SEQ ID NO: 340858 - DNA, 717 bp, Pseudomonas aeruginosa
atgaattggcacagcgaaagtctcacttatcaatacggcaaagagttcaaggtggatgcacgcaccgtacaaaccattaccttcgaacatgccagcgactggtcgtggggcgatgtgtatttatttatggacaacaattggtacccaggcggtggtacttacaatgatggacaccattccatttacagtgaattggcgccgcgactttcgttgggcaaagtgtttgatagcaaactgtcgttcggtcccgtcaaggacgtattgattgcgtcgagttttgaatgggataaaaacgaaaagcatggaacgcacgatcaggttaactatttgctcggcccgggctttgatctcgatctaccgggtttcgattatttccagcttaacttctactaccgcaaaccagacggcggtgtagcacctagtgggcaatggcaaatcacgccggtctggtcgtataccattccgatcggccgctccgacgtggtgatcgatggttatatggactgggtggtcaataataaaggcacgtatcacagtaatctgctgttcaacccgcagatcaaatatgacctgggcaagcactttggttatgagcccaagcgcttctacgccggggtcgagtacaacaactggacaaacaaatacgcgatcaaagacacccgcgcattcgacaccgatcagaatgtgaccagtctgattgtgaaggtgtatttctaa

SEQ ID NO: 340859 - DNA, 990 bp, Pseudomonas aeruginosa
atggtcatatataccccgccttcagtggccaaaaacattccggttatcgatctggcggacagcttttcccacgatatcgagaagcgcaaggcagtagcctgggaaattcataaggcggcacggcagaccggtttcttttatattaaaaaccatggcgtaccggtagaactgcagaaagcgcagtttgatgtagccaaggaatatttcaaaacgccgctgcacgaaaaaatgttggtcaactcgaaaaactccagttgcctgcgagggtatgaaccgattgcggcgcaaattctcgatgaaggttcgccgcccgatctgaaagaagggtttctgctgggtcgcgagttggacgacgcacatccgcacgttattcgcaaaacaccctatcacggcccgaaccaatggccagcgggcaacccccgtttccgccagcagaccgaagactatatgcgctacatggaactgctcggtcgcaagatcgtccgcttgcttgccctgtcgctgcagttgcccgaagactttttcgaccagggcctcaaagagccgatgatcattacccgcatgctgcactaccccagccagccggccgatgcccgtgaaaaccagattggcgccggtgcccataccgactggggcctgattaccttgctgctgcaggatgaagtcggcggtctcgaggtgcgcaatgccgacggtgagtggctgaaagcgccgtttatcgagaacacctttgtggtgaacctcggcgatatggtgccggtgctcaccaatggcctctatcactcgaccatgcaccgcgtgttcaactccaaaaaagacaccccgcgctactcggtgccaacttttttcgacctggattactactacgaagcctcggtggtgcccacgctgcgcaaggccgatgaggtctatccggcgcccatcactgtcggcggtcatatcgcggctatgttcgacaagaccttcggggtcaagaaagccacggcataa

SEQ ID NO: 340860 - DNA, 639 bp, Pseudomonas aeruginosa
atgttgaaactttacgattacgagttatccggaaactgcttcaaggtgcgtttgctgctatcgattctgggcgtgcaatacgaaaccgaagtggtcgagttccacccggggcgtgaacataagcgccctgcatttctgcgcatcaatcctatgggtcaattaccagttttgcagaatggcgaaaagatcattcgcgactcccaggccattctggtttatctggcatcaatatttgatccgagtcgcaaatggtatccgctggatcaaccggagttgttgggtgatatccaggtgtggctggcatttgccgatagtctgaccggatcactttctgccgcacgtttacatgagttgttcatgtatgacttcgacgccgacgcctgtcgcgcgcgtgctcaaacattattggaggtgatggataaacatctgtggatcaatcgccaacaggatttcaagtttctctgtccactggcgcacgcgactattgccgatattgcctgctttccctatgtggccatggccgatgaagccgggctttcgttgcaggattatccctcggtgcgtctctggctggatgaagtcagacgtattccaggctttaccgtaatggccggcatattcccggccggcaaaccctga

SEQ ID NO: 340861 - DNA, 1758 bp, Pseudomonas aeruginosa
atgggttcgttacatcaggaatggcatgtgatcgccagctccgaagaccttccgtttcgccacgtgtaccaaacgcgcttgctcggtcaggagctggcggtctggcgtgacgacaacggtgttgtaaatgtgtgggaaaaccgctgcccgcaccgcggtgtacgcctgagccttggggtgaacatcggcaaccagctgaagtgccaataccatggctggaaatatgaaagcggctcgggccattgtgcctttgtgcccgctcaccgcacggcaaaacccagcgccgcctgtgtgcgcaccttcccctgcgccgaggtggacggcctggtgttcgcccagctcgaagccccggttggcaacgccaaacccgggagacagcgtccgctcggtgccgcgctgtccaccaatttgcgcagccatccagtggcaatgaacgccaaggccgtcgtcgaggccatccagcaggccgccccctcgttcgcgccgctgctgggagaacaggccgaccgcgtgcaaacgctggtaagcggcctgagcattgacctgagctgcgccgggctgctcgacagcgtgcggatttttgtccagccggaatcggactccaaggccgtggtgcatgcccgcctttacgccgctgctgccctgcccctgcaacgcaaaatcgtctttacccaactgctcgacgagctgtttgcccgcgtactgcaaagccccacgccagcgccgaccgcgcggcttatcgcctcggacgcggtgcctctgaagactcccaacccacccgccgccgataagccgggcgagccgttctcgtgcaccgtcatcgcgcgccaaaacgaaaccccggacatcgcttcgttctggctgaaaccggatgacgggcggctgttggcgctggaaccgggtatgcacgtgagcctgaccacgccctctggccacctacgccagtactcgatcgtcaacacgcctgacgagcaggatgtactggtgatcggcgtcaaacacgagccgcaatcacgcggtggctcgcgcagcatgcacgtggatgttcaggtaggcacccaggtgcagctgacgctgccacgcaatcagttccagctgcagccgccgggccgtcacgccctgctgatcgccggtggcatcggggtcaccccgattctggccatgggcctgcatctgcaacgcgccaagcgcccgtacagttttcattacctggcgcgcagtgaggaacatgtggcctttacccagcggcttgccgcgctcggtaaacaagcgacgatctacctgggcctcgatatcgaaggcacgcagcagacattgcgtgaattgctccaggaccgggaaccggcacggcatgacgtctatgtctgcgggccgcagccgatgattgatctggtcgtcgagctggcacgcgaagctggctttgccagcgagcagattcacttcgagtactttgcgctggcccccagcagcaagccgccggctgccgagtcgggcagttaccaagtgaccatcaagtccagcggcaaagccttcaccgtcagccccgggcagaccctgctgcaagcctgcctcgatcacggggtagccatcgattactcctgcgagcaaggggtatgcggcgcctgcatgaccaaggtggtcagcggcgaactgcagcacggcgatgtttatctttcggccaaagaaaaagacagcggcacgttgatcatgccgtgtgtatcgggttgccgctctgaaacgctgattctggatatctaa

SEQ ID NO: 340862 - DNA, 846 bp, Pseudomonas aeruginosa
atgttaaaagaaaacagctttgtctacgacgactggcatccggttggtgcgctggccgaggccgtcgttggcaagccatgccatacccggattctgggtcaggccatctgctacacccgcacccccgacgggctgatcgcgcaccttgccgacagttctcagccgctgaaaaccttgatcgtctacggcttgctctgggtgtcgttgtccgcgcaaccacgccgaattctggccattcccgagttcgaagaaacggaccgccgcgtcgtcagcgccggctcgatccgcgttgccacctctgggctgcgggtggtggaaaacttcctcgacatggctcacttcccgttcgtgcacaccgatattctcggcgccgaaccgctcaccgaagtggccgcctatgacgtcgagatcgacgaacaggctgatgaggtgctggcagtcaattgccgctttccgcagcccaagggttcggcggcggccagcgaaccggtggagatgcagtacgtgtaccgcatcgcccgcccctttatcgccatcctctacaagacttgcgtcatcgacgccaatcgcctggatgtgctcggcctgtacgtgcagcccgtggatgaggagagctgcatcgcccacacgatcatgtgctacctcgacgacatcaacaccgacaagcagctgcgcgacttccagcaacgcatctttggccaggacatcatgattttgctcaatcaggtgcccaagggcctgccgctggatccccggcacgaaacgcccgtgcgcgcggatgcactgtccagtgcctaccgccgctggatcaaagcacgcaacgtcacgttcggcaccgctcgctga

SEQ ID NO: 340863 - DNA, 1083 bp, Pseudomonas aeruginosa
atgaaaaagatgttcaagttgggctgtgccgggttgggtatccaggcgtcgtcgcgtgagaacccggtgtcactgaccgagttgccgattctcgagcaattcaaactggtcaaggaagccgaggtctgggacttcatcgatcgcattcccaacaaccgccaggagctggacgagtacatcaagggcagccaactttacgacctgccggtgctgtcggggagcggcctgtacaccctgggcctggatgatcacctgatcaaagagaacatcgacctgaccgtcgaggtcggcggcaagtaccacaatttcatgatctgggctaagcacaaggaccgccactacgtgaccaacgaagaggtcgccgagtgttacctggagtcgtacgagtacgcggaaaaagccggggtgatcatcaccttcgaaaaccatgtggacatgtggtccgaagactatcgccgggtctcgcaagtagccgatctggtggaagcccgcggcgcgaagttcaacgtggccattgactacagccactgcattttcaagattgaaaacgaagtggagcacgccgtctcgcagatgcgtggcgacaacgatgccatcgccaaacttgacccgttcaacgacgacagttacgcggacgaatggctgaaccgcaacctggtgcactgggcccagatgcgcccggccgcgcctaacggcccgctgaactggtggggctttgaaaccggcccttgggatgccaaaggtatcgaccgtccagggcgctccattcagtacccgttccggcgtcctgccgaaggcgaatggcataccgacatgtggcatgcgcacaagctggcgtgcaccaaggaagtcacccgcaaagtcatcgatgcctacctgcaaaaccccgctaccaacctgtcgctgatgaccatcgacaacatcaacctaaacgcctacggcctgggctggatgtacaacatgtttgccgacagctgtgcctacgcgcagttcgtccgcgagttgtacgccgagcgcgcggctgtgcacgaggcgcgcagcgccaagtcggcggctgaattcgttgctcagtaccgggcgtaa

SEQ ID NO: 340864 - DNA, 1068 bp, Pseudomonas aeruginosa
atgtccgctcaatggaagcccctgatagaacacaaaggttacctccgccatttctggcacccggtgtgtaccttgagcgagttcgagaaagccaacgcatccgggcatggcccgatgtcggtgaagctgctgggagagaacctggtgttggcccgtctggacgggcagatgatggccgccgatgaccgctgcgtgcaccgctcggcgcgcctgtcgctggggagcgtgtgcaagcaccagggcaaagacaccctgcagtgcccctaccacggctggcgctataacgacgccggcgaatgcacgctggtgccggcctgccccgaccgccctattccgccgcgcgcaaaaatcgccaaatacgactgcgccattcgctacggcatcgtctgggtgcgcctggacaattcgttcgactgcaccgaaatcccttacctgggcgattgggacagcgaaggcatgaaagtcgtggtggcggagtcgtatgtgtgggaaacctcggccgagcgccgctgggaaaacttcaccgacttctcccatttcgccttcgttcaccccggcactctgtacgaccccttcttcgccagtcaccccacggtaaacgtcgatcgcagccacggtgaactgcgctttcagctggcgccgcccaaagagatgtacgaaacgctgccggaagaagcgcccatgggcgacttcacctaccgctgctcgatgccgtactcggtgaacctggaaatcaaactgtggaaggacgattccaaattcatcctctggaccaccgccagcccggtggacgacagaacttgccgcaacttcatggtcatcgtgcgtaccgaagaccagcagcccgaccacgtgcacctggctttccagaaacgcgtgctggaagaagaccgcccggtgatccagtcccaatggcctatcgagctcgatagcgccgaactgtcggtagtcaccgacaagatctccatccagtaccgcaaatggcaccgcgaactgtcgcaagcggcgctggtcggcaaggacgaattcaaagcggccctcctcagcgaagtgctcgaggagcgttaa

SEQ ID NO: 340865 - DNA, 948 bp, Pseudomonas aeruginosa
atggttcggcggttacggtttcattcggtgtcggtcagctacttcgacatggttcagcactgcggctcgatccgcgaagcggcccggcgcctgaacgtggcttcgtcggcggtcaatcggcagatcctcaaactggaggacgacatcggtgcgccgctattcgaccggctgagctccggactgaaactcacccccgccggcgagttgttcgcacgccatatcggtgtggtgctccacgacgtagaacggctgcgctcggaactcgaagccatggaaggaatccgggcagggcatgtcgaattgatcgttgccgagaccctggctgtggacctgttacccaccgtgctcgaacacatgcacgcgcgttatccacgggtgtctgtcggtgtcaccgtttccggctcgcaaggcattccgcaggcgatcatctccggggcggcggacctgggtctggctttcgcgttgcctaaacacgagcagctccagcaattggccctggggcatttccggctggcggcgatcgtgccgcccaatcacccgttggccgataaaagccaggtcagttttggcgcctgcgccgactacgacctgatcctcagcaagccggaaatctcgacgcggcaacgactcgcgccactgctcaaatccgcccatttttccggcaggacccgcctggaaaccgcatcgcttgaactggccaagcagatggtagtgcgcggcaggggcgtggcgtttcaaaccgcgttcggcatcgaggcgcaggtggccgccggtgaactgaagatgcttccgctcaccgacagcggcggtattttctgcgacctgggcttgtacatgagcagcggccgctacattccggctgccgtggatgccttcgccagaattctcaccgacgagattttgcgtcgcgagcggcacgaggccagtcagttcggggctcttggctag

SEQ ID NO: 340866 - DNA, 996 bp, Pseudomonas aeruginosa
atggcacacgcccaactcgcaccgtcacctctggaggcctcgcaggccaccacgcttccagttatcgacatctcgggcctgcgctcggcatcactgatcgaacgcacccgggtcagtcagcaaatcggccaggcctgtcgtgacaaaggttttttctacgtcatcggtcatggtgtaccggcagctttgcagcagcaggtgatcgaccaggcggccacgctgtttgctctgccgcccgaagaaaagcgcaaggtcgacaagtcactctccatggccaatcggggctacgaaccgttgcgtaatcaggtgctcgaagccggcgcgccaccggacgtcaaagaaggcttttacatcggccaggacaagccgctggatcatcccgatgtgctggctggcaaattcaatcaggggccgaacctgtggccggcagacctccccgagtttcgccaaaccatggaggcctaccagcgggaactggagtcagtggctcgcctgctgatgcagggcgtggctctgtcgctgggcctgccggagcagcactttgccgcgttctgcgaggacgccatgaccacgctgcgcctgctgcattacccaccgcagccgaccactgcggcaccgggcgagaagggctgtggtgcgcataccgactggggtggcctgactctgctgttgcaggatgaaaacgccgggttgcaggtgtgggatcaggagcgcaatggctggatctgggccacaccggttcccgaggcctacgtggtcaacctcggcgatctgatcgcgcgctggaccaacgatttgtacaaatcgaccctgcaccgcgtggtcaatgtctcgggtaacgagcgctattcggtgccttatttctactccggcaacatcgcccacgaaatcgcctgcatccaggcctgcctggcacccggcgagtcacccaagtacccggtcatcagcgtcgaagaccactacaaaaacatgttccgcaaaacctattcgatgtga

SEQ ID NO: 340867 - DNA, 1086 bp, Pseudomonas aeruginosa
atgaacatgcctggattcaggaaagtactggcagggttattgagtggtatcggtctggcagcagccatcaccgcatacgccgacgagccgctcaaggtcggcttcgtctacaccggtccgattggcgaccacggttggacatatcaacacgagcagggccgtaaggcgttggagcaggcgctgggcgagaaagtccagaccacctacgtcgaaaacgttgccgatggcgcggactccgaacgggtgatccgcaacatggcaaaaagcggctacgacctgatcttcggcacctcgtttggctacatgaacccgatggccaacgtggccaagcaattccccaagaccgcgttcgaacacgccactggctacaagcgcagcacgaacctcggcacctacctgtcgacctcgtacgaagggcgctacgtggccggctacctggccgcgaaaatgaccaagagcaagaccgtcggttatgtcgcgtcctttccgattcctgaggttatccgcgacatcaatgctattcaggtcgcgttgaacaagtacaacccaggggcggtggttaaagtggtgtggctgaacacctggttcgatcccggcaaggaatccgacgccaccaacacgcttatcgaccagggcgccgatgtgatcttccagcacaccgccagcccagcaccgattcaggcagccgagcgccgcggggtgtactcggtgggctatgcctccaacatggccagcttcggccccaagtcggtaattacctccatcgaatacaactgggcgccgttctacatccgcactactgagtctgtactgaacggcacttggaaatcggctgactactggggtgggctggccgatgacgccctgaccatgccgatcagcgatatcgttcccgctgaatttaaggccgaggcgcagcagatcattgcctcgatcaagagcggcacgttccaccccttcgatggcccggttgccgaccaatccggcaaggtcagaattgcgccaggagccacggccagcaatgcggatctggcaggtatggactactacgtccagggcatcgctgcggagtttccgaagcagtaa

SEQ ID NO: 340868 - DNA, 312 bp, Pseudomonas aeruginosa
gtggtggatcgcttaaaggacatgatcatcagcggtggcgaaaacatctatcccgcagaactggaggcggtgatcgcgtcgctgcccggcgtggccgaggttgccgtggtgggcaaggccgacgagcgctggggcgaggtgccgatcgcatttgtggtcgcgacccaaccaggcgctaccgacgaggcctcgattgtcgaggcatgccgccagcgattggcgggcttcaaatgcgtgaagtctgtgcacatgcttgaggccctgccccgcagctctgtgggcaaggtgttgaaaagacagttgcttgcctga

SEQ ID NO: 340869 - DNA, 309 bp, Pseudomonas aeruginosa; identical to SEQ ID NO: 327388

SEQ ID NO: 340870 - DNA, 303 bp, Pseudomonas aeruginosa
atgagcatccaagtcaccagcaccaacggccgcacaataaacctgaaaatcgaatccggctccgttgtcgcctccagcggcccggtaaaattcatggcggacaaaactgacacaggtttcgagagtcgattccttgtcccggaagccgggaaccgccgcatcgaagttgcactgaccggtaaagatctggaagcggcaaactccctgttcgccgaacttgctgaaagcgtggaagcaactaacaaaatgtaccgcgagctggatgccgagcgcgcgcaaatcaacaaggccatggagggctga

SEQ ID NO: 340871 - DNA, 177 bp, Pseudomonas aeruginosa
atgatggaccgtaaaatcactcccgctgacgaagaaaagatccgcgagtggcttaattgcgaagaggccagcgtggataacgacggtgatgtctgggtagcggtaccgatggcaggccattggttgagcgacgagcaaaaagctaaatacatcgagtggcgcggtgatgaagcctga

SEQ ID NO: 340872 - DNA, 219 bp, Pseudomonas aeruginosa
atgaagcctgacgcctccaaccacaatccagatccgcgctacctgcgcgggctggtcgacaaagcaggtgtcagccagcgtcaggcagccgagctgctcggcctttcctggcctggctttcggaactacctgcgcgacgagtcccaccaactctaccgggctgcaccgtacacggttcagttcgcactggagtgcctggctgaaagccctagctcctga

SEQ ID NO: 340873 - DNA, 156 bp, Pseudomonas aeruginosa
atgcaaaccgctcaagtaattcccttccagttcgatgctcgcgaagtccgcaccctgctgatcgatgatcagccttggttcgtagcggctgatgtttcttgcgccttggaataccgaattgccggtgacatgacgcgcaatctcgacgatgactag

SEQ ID NO: 340874 - DNA, 282 bp, Pseudomonas aeruginosa
atggataaggaacttgaaaccttcgaggccgacctcctcgcctcgattgacgaaatgaagaaggggaaggccgcccgctcgacgcaggttgaactttctccggttgctgaagttcgcgcaaaagttggcatgccacagtctgagttcgccgaacttttgggcgtgagcgtccgcacgctgcaagactgggagcaaggacgccgatccccgtctggagcagcgaaaaccttaattaaggttgctggcatgcacccggaggcattgcgggagttgcgcgcctga

SEQ ID NO: 340875 - DNA, 207 bp, Pseudomonas aeruginosa
atgattggtcggcataaagtcgcaagggatgaactgacgaaattcaaatcccttttaaatgagttcgggagaaccccagttacagatgagcggagcaaaatgcttcttcacgatgctctcatcaggcttggttcggctctggatatcgttttgatggatatccaaaacctgaacgaggaaagccctgccaacagcaagcctgagtaa

SEQ ID NO: 340876 - DNA, 318 bp, Pseudomonas aeruginosa
atgcaaaccatcatttcgatcgttatcagcctagctctgagcttctccctgatctcgggagtggtgcagttgtcgcagttcgccttctacgtgtgcgccgcggctaatgtgctgtcctggattgtcgttctcaccggtcaggtcaaatgcgacgtcgcagagaaaattcggaagggggtatggatcagaatcccggcttcggttttctacctctatgccctgatcttcagtggtcatccgcttctcgcggcttcttcgttcatggctcaggccttcatcctcggcttcgcgttcagcaagcaagcgaaacctgcatga

SEQ ID NO: 340877 - DNA, 201 bp, Pseudomonas aeruginosa
atggatatcgtagacatcgccaacgactacgccgagcgtgaactcgctgaacgcctgtactcccgagtcaagtacgtcggcgagagcctgtacgaatgtgaagactgcggcgaggagattccggtagcgcggcgctcgatcgttcccggggttcgtaagtgccgggaatgcgcggaactggctgagcggagggctgtgtga

SEQ ID NO: 340878 - DNA, 1164 bp, Pseudomonas aeruginosa
atgacagaacttgagttaccagccgttgagcgacctggtgaagcggacctcgatgcgatgacctttggtagagctctccatgagtgggctcgaaggcatggagcattggcgtttcgagaagttgcgcctgcagcagaggttatgccgctggagcgaatcttcgatacagatgcggactcggccaagcgcatatctcaagctctgcaccgattgaaaattacggcgatcactgcagatggggaaaatggaacggtttctgtcctctgcaagaatgcaatctcgtctcagatcgacaagaagctgccgaagcgtgttcacgaaattgatatcacctataccgggaaaaccacggtagaggtaaatccgccagctatcccattttcaggctctgcggggtcacccgtttggttttcgcatggagggagaattgcctgcggctcttctgtaacgtccagtcaagtgtttgacgcaggtacgcttggctttctagcacgtctagcagatggtcgtcttgttggtttttcgaataaccacgtgaccggtgaatgcaaccataccccgccaggtatgcacattcttagtccttccccgctcgatgctactccatccagcccaccgccattggccataggctctcatttcgccttggttccgcttcacagcggagatccaaatcagatcagccttcaagaaactgacgcagcgattttcttgatcaccgagccagattgcgtctcttcgatgcaagggaacggcttctatgacactccagctgaaactattcccttgcatgcgggactaagagtcaagaaggttggcagaacgacaggactgagagttggcacggttttgggtgagatggttgtcccgttcttcatcccttacaagtccagcaaattccagtctatagtatatttctctggcgtctgggcggttgagggcgacggcggaaacaccttctctgaaggtggtgacagcggatctctcgttgttactgccgatggaacgaaagcggtcggagtggtcttcgcgggaggtggtaatgtgtcatacattctccctatcgacaaaatcctcgaccttttcactatgacgctagtgtcaggacacaactcggagctagcaaatgaacagccgtcaagcagcagcgacgttactgcgtag

SEQ ID NO: 340879 - DNA, 654 bp, Pseudomonas aeruginosa
gtggccctgattaagtgcaaggaatgcggcgcccaggtgtcgaacaaagccaaagcctgtccatcatgcggcgcaaaggtacccaagagcgtcggcgtcatcggctggctgtttgtcatattcatcgtcctgcctattgcttggcagtttggaacgggaattggttcctccggcgatgcggctcagtcgcgatcgaacagcccgcagcgggcaaccacaagccctactaaatccccttgggagcgccatgaatacaaagacccgatgagcgatgaattaaccaggatgctcacgcttcagtcgaagacgtccaccctcttcgatttcccatatcgagttgcagggggctcatacctgaatcttaccttccgcaaaaaaggcaaagatctggacgcgttcctcaagatcaccaaagggcagatgcagtgcggttatcgagactgcggtttcgttcttcgggtcggtgaaggcaaggcgcaaaagtggaccggggtccgcagttcgaccaacgacagcgacctgatgttcgttcgggacgctaagcaactggaggctatcgtcaaatcgggtaagcctttccggatcgctatcgagttcttccaggcaggagagcgcgttttcgagtttgacccggcaggttacccaggtctatag

SEQ ID NO: 340880 - DNA, 207 bp, Pseudomonas aeruginosa
atgaataccaacacccaaccgtccgaagccatcgacacccaacggaagctggaagccgagattgcggatttcctgcgacagcgcatcgaagatgggaacctcgatgcggaggacatccctgtgcgcctggcacgctatggtctgatggcccccgaggcgttcctcgccgaaatgcgtgagcgcatgggcatcgacgacgagaaataa

SEQ ID NO: 340881 - DNA, 360 bp, Pseudomonas aeruginosa
atgaataccacaacccgcaccagcactgcagaacgtctcggccgcgcctttggccgcggatggcgcgcctatgctcgcggcgaacggcgggcgtcgaactggctggtatccaagggactgccgcgagctggcgccgccgcgattgtgtggatagtcaagctggccgcgctcggagtgttgctctacagcaccttctggctggctctgctgctggtgttggtcatggtggttgcctggatggcccgcaatgccgacctgggcgatgaattgcccgagccagagtggcgaaacggaccagcagggtttggcctatacacctacgacggttttcgcattgatcctcatgtcgaggacgattaa

SEQ ID NO: 340882 - DNA, 393 bp, Pseudomonas aeruginosa
atgattcgtcagttcttcgtttggttcggtggcttggtcaccatggctttgatctattgggcggcggtcattcttcatgccattggcggttatcggattgagattgcgccagccttggcggcgggagtctccgccgggatcgtcgctctgctctgccatgagttcggatatcgagccgggcgcaacaaggcactggatgaccgcttctacccagatgcagatgcgccttacgtgcactttccccgaggcatggacagctaccaggaccgtctggatttcctgaatcgcgccataaagcggctgcacgagatcgagtcagccaaggccaacgatgctcaggatcaaggccccagcgatcagagcaatcagccagagggcgaacgtcatgattga

SEQ ID NO: 340883 - DNA, 198 bp, Pseudomonas aeruginosa
atgaactggttgaaagaagccttcaggcgctggaaggaaaggcattgggacaaggagtacttcccagaaggccggggcggaataacgccgattagggtcttctgggagaaaaggcgcgcatcaatcatgacgttcgccctctggctgattgctctgatcgctggggccttgatcctgagcatcgttggccttggctga

SEQ ID NO: 340884 - DNA, 240 bp, Pseudomonas aeruginosa
atgctcgggttcacgacgaaagctgaggcgcgacgcatcggcgcctcgcaccacgggagctattacggcattccgatgtggctaggggatgtcgatagcgattgcccgctagcgttcgcaaagtgggcgccgcttgagctggtcgtctccctgctctcggtcattgagggcatcgtcaactcgatgctcgatcaagagcagacgttcatgttcaaggttggtcggaggatcgaccagtga

SEQ ID NO: 340885 - DNA, 639 bp, Pseudomonas aeruginosa
atgcgtgcttggattgctgtggggatacttatcattttgtccgggtgtggggatggatcggatgaactggcgggtgatggcaataacgctcaaggcgttgttgatgattggatatttaaggactatgaagataactcgattatctttggtagcgattcctctgatccctcatacatggttttcagagaccgtgtggctgatgtgaatcggcagaagaatgaggctgctgtattggcttcgagaaagtgtaagcacgtagttagtgtgatttttattagaaaggaaagcagcttagataacctgaggttcatggttgattgtgaagatggagatagattctccataacaagtagagatattgagagcggatccccagttaagtctaactctcagagagctataggtaagtctgatgcaatagaaaggtgcaagggggtcgtggaaaaagagctggggaattctaagaatctggagtttagcgagcttcttgggtcggcctactataaggctcctaatggtaatgttcgtcttgttctgaattttgaagagattggcatgggtgggtcgaggtataaactcaaggcatcatgtactttcgattcagactggaatgcagatcttaatatatccagaagatag

SEQ ID NO: 340886 - DNA, 309 bp, Pseudomonas aeruginosa
atgctcatgtatgaggatatccgcgtgctgatgaacaggctccctaagtccgtgggcaagcgtaaccagcaccagttgtgctccctctcgcctcgcgaatttcatcgctggaatgaagtcactgtccgcagtgaccagtacgatcatatccacctgcttcttgagcgtgaggctggctatgtccagtccgatcctcatgtcgacagctttctgctgtacgttcgcctcaaggtcgttggtcgtaaattgtgtgtcggggttggcacgcctgagcgacctgcctttgattcgccatccctgatggactag

SEQ ID NO: 340887 - DNA, 1275 bp, Pseudomonas aeruginosa
atgactcacgccttgaatgcccggccgggagcgcaccccggccatcctccggaagaactgctgatcgatgccgaagtcgacgacgaaccagttccgccggcgccgccactacgcccctggctgctcctgctgggcctggtgctggtggcgctgaacctgcgcccggcgctgtccagcctcgcccccctgctcaaccaggtgcgcgacgataccggcctctcggccgctgccgccggcctgctgaccaccgcgccggtactctgcctggggttgttcgcgccgctcgcgccgcgcctggcccggcgtatcggcgccgagcgcagcgtgctgctgatcctcttctgcctggccggcggcatcgtcctgcgcagcctgttcccggtgttcggcctgttcgccggcagcgtcctggccggcgccagcatcggcatcatcggcgtgctcctgccgggcatcgtcaaacgcgacttcccgcgccaggccggggtgatgaccggggtctacaccatggccctgtgcctgggcgcagcgctcgccgccggcgctaccgcgccgctggagaagctcttcggcaactgggaactggcgctggcgttctggtcgctgccggcgatcctcgccgccgccttctggctgccgcagacccgccagggccagcacgcccatcgccaggccttccgtgtcatcggcctgtggcgcgacccgctggcctggcaggtcacgctgtacatgggcctgcaatcgtccctggcctacatcgtcttcggttggctgccgtcgatcctgatcgaccgcggcatgactgcggtggaagccggcctggtgctgtccggctcggtgatgctgcaactgatcaccgccctgctcgcgccctggctcgccgctcgcgccagggaccagcgcctggcggtggtgctggtgatggcgaccaccctcgccggcctgctcggcttcctctatgcgccgctgcagaccatctggggctgggcggtcctgctcggcctcggccagggcggtaccttcagcatcgccctggcgctgatcgtcctgcgctcgcgcgacgcccacgtcgcctcgcatctgtcgggcatggcccagggcgtcggctacaccctggcggccatggggccgttcatggtcggcgtggtccacgacctgaccggcggctggaacgcagtcggctatatcttcatcggcgtcgccatcgccgccaccctgttcggcctcggcgccgggcgcagccagtacgtgggggcccgcagcgaacacctgtag

SEQ ID NO: 340888 - DNA, 606 bp, Pseudomonas aeruginosa
atggtggccgagcaactgggctgggagcgtttttccctgttggggcactcgatgggcgccatcgtctcggtgctgctcgccggggccttgcccgagcgcatcgagcggctggcgttgatcgatggcctgattccctacactggcgaagccgacaaggcgccgcagaagctcggcgaagcgctgaaggcgcaactggcgttacgccacaagcgcaagccggtctatgccgagctggaaaaagccgtggaagcgcggatgcgcggggttggcgagatctcccgggaggccgccgaactgctcgcccagcgcggcctggaaccggtgcccggtggctatacctggcgcaccgacgcgcgcctgaccctaccgtcgccgctgcgcctgacccaggcccacgcgctgaacttcgtgcgcagcgtggaatgcccggtcagcctggtgctggccgaacagggcatgctggcggtggagccgcgcatgcgggcgctgctggagaccctgccgttcgagcggcaccacctgccgggcgggcatcacctgcatctggacgatgaggccggggcgcaggcggtggccagggtcttcgcggccttcttcgcgcgctga

SEQ ID NO: 340889 - DNA, 234 bp, Pseudomonas aeruginosa
atgagcctgcaggtcgaggaagtacgcatcagcctgccgcacatcgaactggccgcgcatctgttcggtccgccggacggcaagccggtgatcgccctgcatggctggctggacaacgccatgagcttctcgcgcctggcgccgaagctcgccgggctgcgtatcgtcgccctcgacttcgccggccacgggcattccgcgcatcgtgccgagggcgccagctacctgctctga

SEQ ID NO: 340890 - DNA, 642 bp, Pseudomonas aeruginosa
atgcaggaattgtctgtcttgctgaccctggcggcggtgttcgccgtcgccctggtcagccccggtcccgatgtcgccctggtggtgcgcacgtccctgcaccaggggcggcgggccggcctggccagcgcgctggggctggcctgcgggattctcctgcataccaccctggtgctgaccggcgtgtcgctgctgctcagccgtacgcctgtgctgttcgccatcctgcaggcgctcggcgcgctgtacctggcctggctcggcgtcggcgcgctgcgcgcctggctgcggcgcggcgacggccagccgggccggctcgacggggcactgccgccgtcgcccctggggccctggctgcgcggagtggcgaccaatctgttcaatcccaaggcgctggtgttcttcatcgccttgctcggcagcctgattcccgcgcagatgtcgctcggcggcaaactggcggtggcggcgctgctgttcggcatgggcgcctgctggttcggcctgctcagcctgacccttacccgcccggccctgcagacccgcctgttgcgcgcggtgccctggctggacgcggcctgcggggtggtgttcctgctggtggcggcggcgatcctcgagcatctcgtccgctctgcctga

SEQ ID NO: 340891 - DNA, 465 bp, Pseudomonas aeruginosa
gtgaaactctggctgttgcgccacggcgaggccgaaccgcacgccagccgggattccgagcggcgcctgaccgcccatggccgcaaggaggtgctgcagagcgccgcgcggctggccgggttgccgctggacgggattctcgccagcccctacgtgcgcgcccagcagaccgccgagctggtgcgcgaggcactgggcctggtcgagccggtcggcaccgcgccctggttgacccccgacgacgatccgcgcgaggtgctcggtttcctcgacgagcgcagcgagcgcaatctcctgctggtcagccaccagcccctggtcggggcgctgggcggtctgctggtgcatggcaaccggcgcgatccgttgccgatgagcactgcctcgctggccgagctggaaggcgacttcgccgccgccgggctgatgaccctggtctcgctgcatcacccgcggcacggctag

SEQ ID NO: 340892 - DNA, 147 bp, Pseudomonas aeruginosa
gtggacaacgaaaacgaaaccatattggcagtgatagtcatcgttctcttcgtcctgggagtcttccgggttgtcggggacttccagaacctctacgagcagacagaacagaaaggacaggagttgagcagatggagcaagcagtga

SEQ ID NO: 340893 - DNA, 291 bp, Pseudomonas aeruginosa
atgcgcacgaaacccttccgcccgccgcgccggcatgagatcgccggccttcgctactaccgcactgcctcggcctacaactggctcggcgtagcgatggcccatccgactcgcgcaatccagctgctgctcgaacagtgtgagccagacgtgctctcgccgatgttcgagattgagatcgacgcgatcctgagccaggcagacgagtacgcgcggtctcgcgaagtgctggaccgcgaggtgctgcgcgaaatgctcatgcacctgatcgccaaagctgcgggcggctga

SEQ ID NO: 340894 - DNA, 297 bp, Pseudomonas aeruginosa
gtgatctctagcggcgtggtcgccggttatgcggatgggtggtttaccgggggctatgtggagtggcaggtggacggcgacaactacgacagccgctacatcgagcggcacgccggacccgatctttacatcctgggcggcaccgagggcattccggccgggggccagctgcgggtttatccaggttgcgacgggctcgcgcagacctgcgacgacaaattcagcaacctccccaacttcagggggtttaacgcgatgcaaggcaagtcgccgttcgatggcgatcaggtctggtga

SEQ ID NO: 340895 - DNA, 216 bp, Pseudomonas aeruginosa
atgaccatcaaagccatcaacgttcgtaaccagttcaagggcaccgtgaaggaaatcatcgaagggccggtgctctccgagatcgacgtgcagaccgccgccgggatcgtcacttcggtgatcaccacgcgttcggtgaaggaactggagctggccatcggtagcgaagtgatcgccttcgtcaagtccaccgaggtatccatcgccaagctgtga

SEQ ID NO: 340896 - DNA, 2280 bp, Pseudomonas aeruginosa; identical to SEQ ID NO: 332481

SEQ ID NO: 340897 - DNA, 1263 bp, Pseudomonas aeruginosa
atgccgacgcttaacgtgcctcaggcgaagttcctggccttgccgcacaagttctgcggcttcgtggctgggttcggctccggcaagacctgggtgggctgctcagggctcgcccagcacgcctgggaatggccgcgcatcaacgccggctacttcgcgccgacctacgcccaaatccgcgacatcttctacccaacgatggaggaggtggctttcgactgggggctgcggaccaagatcaaccaggcgaaccacgaggttcacctctacagcggcagcgcctaccgcaccaccatcatctgccgctccatggagaagccgcaaaccatcgtcggcttcaaggtcggccggtccctggtggacgagctcgacgtcctgtcgctggtcaaggcgcagcaggcctggcgcaagatcatcgcgcggatgcgctacaaggtggacggcctgcgcaaccgtgtcgacgtcaccaccaccccggaaggcttcaagttcgtcttccagcagttcgtgaagcagttgcgcgagaagccgcacctgcaggacctgtatggactggtccaggccagcacctacgacaacgaggcgaatctgccggacgactacatcgattcgctgatggagtcgtacccgccgcaactgatcgcggcgtacctgcgcggccagttcgtcaacctgacgtcgggcacgatctacaccgcctacgaccgcaccctcaacgcctcgcaggagatggttcagccaggcgagccgatattcgtgggtatggacttcaacgtcggcaggatggccgccgtggtgcacgtgaagcgcctgggcctgccgcacgcggtcgacgagatcgtcaacgggtacgacaccccggacatgatccgccagatcaaggagcggttctggctgtacgccgacggcgactaccgaccgacccgccagatcaggatctaccccgacgcctccggcgactcgcgcaagtccgtccgggccagcgagaccgatatcgcgctgctcaagcaggccggcttcgtcgtatcggctccggccgccaacccgccggtcaaggaccggatcaactccatgaacgccatgttctgcaacgccaagggcgagcggcggtatcgggtcaatcccgaccgctgcccgacctacgccgatgccctcgagcagcaggtgtggggcaccaacggtgagccggacaagtccgccgacatcgaccaccccaatgacgcaggtggctatttcatccacaaggaatacccgatcatgtag

SEQ ID NO: 340898 - DNA, 162 bp, Pseudomonas aeruginosa
atgtctgattttctcttcgcggtagccggacttgtggtcagcctgctgttcgtcttgatgctcatcggtgcctcgtttgccacttggcaaatgcagaaggctcgtctggaactctactcgttcttgattcaggacgtgatgcgagggctcgatgatgactga

SEQ ID NO: 340899 - DNA, 186 bp, Pseudomonas aeruginosa
atgcataacgatcatgcccagttgaaagaggagtttctccaactccagatccaaatgcacgaagcggcggccaaggcggccgagtacaacgaacaggccggagattgtcttcagcagtacgccaaggctctcgagcgaagcatggagatcgtgcagcttatgaagcgaggggggagtgatgtctga

SEQ ID NO: 340900 - DNA, 654 bp, Pseudomonas aeruginosa
atgcctatgcaagggcgagtggttttaccgaattatccgcttcacgtggtccagcggggacacaatcggcaagtggtattcgccgaggacgaggactaccagcgttacctctccgatctacgggacctcaaggatgcctttggtatcaaggtctacgcattttgcctgatgaccaaccatgtccatctgctcttggcgcctggtgattcgctgtctggcttggcgcaactgatgaaaacgctggcggcgcgcacgacacgatatcggaatcgcttggagggccgttccggaacgttgtgggaaagtcgctataaatcgagtgtcgtacagagcgatgcctacctgctggcgtgttgccggtacatcgaactgaaccctgttcgggcgcggatggtggacgatgtggcggcctatccctggtcaagttatgggctgcgggcggattggttgaaggagccaaactggttggatatggatccctgcttcattgagctaggtcagacggccgaagagggatatcggcgatacgtaacgttcatgaaagaggcgataccggccgaggagttgaggctgattcgcgaggcggtttgtagtggtctactgatcccggacaccgatttaggcgagaatcctcgccgtgaaagaggtgtctga

SEQ ID NO: 340901 - DNA, 480 bp, Pseudomonas aeruginosa
gtgagcactgccgaaccgttcgattacctgttcttggagacgctcctggtcgagcgcatccgcgccgaggtgcccggccttcaggacgtttcgggcgtccccgatctggccaccctcgacgaacagcgccagggctcgccttgcgtctatgtcgtctacctgggcgacgagatcggcaccggggcgtcgcaccagggcggcagtcgggcgattcagacggtcacccagcactgggcagccgtgctgacgttgtactacgccgacgcccagggcgacggccagggcgcccggcgcgaagccggcccgctgctcggccggctgctcaaggcactgaccggctgggttcctgatcagggcgtcactccgctggcccgcagcccgcaggcttcgccagtcagctacagcaacgggttcttctatttcccactggtattcaccgccaactttgtcttcccgaggctcaagtcatggaaaccgtaa

SEQ ID NO: 340902 - DNA, 3480 bp, Pseudomonas aeruginosa
atgaaagagaaagcggcgccagacgctgaggtcactcatgtgcatgctgagggcggaagcgtagcggtcggaggggggttgtatggcaccgtcaacattaatacccctgacgcaatagaagctgcccttctctccgcgctacaaaagcaccaagcccagggcgttagcgcggcccagatcgatatagcgagggagtggcaaaacgaactcgacaagctgattgatagctttaaagaaaaagtcgagtctgggcaagcaaacactgcattaggcttacttaaagaccttctagatcgccaagcgtctaagctttcatcgctacaggtcttccgtataaaagcaaatattgctgtttgcctatatcagcttggaaggtcaagcgaagcggccgtcacgttgcacgaggcttgcagctttgcaccagacgagcctaaagccaaggctaacaaagtcttagcctatatgtttgacggtaaaattgatgaagcctaccagtattccgtagagcaactaaagctagacccgtccaacgaatggctcgcggcaaatggactccaagccgctcgaatgtgctcagatgatgagggtatttacgatcttattggtgagggggtaaagcaaacagagtctgtccaggccgcctatcttgacgggctagcggtcaaaaggatagggaactggttggagcttgcgaaagaggctcacttaaaattccctgacaacaagaccatcagcggaattgttgctgctgccgagctagaagctgttgtcgctgagcacaatcttaatgggaagtgcaaattcccagtatcaaaccctgatagcgtcaatagagcaaaagagcaccttgaaaagaactgggccgagtttagagaaagcgagcattctctaggggttatgcaagaggcagacgcgtgcaatctcttgttgtgctacgcgctagttgcagatacagagcatctaaagcagtttagtatagagttacttgctaactatcctgagaaccctagatttgctgagctggcggttcagatttctctggacttcaaactgtcagacctgttcgataaagcaatcagcctgcttgaaaacgagcaagagcgccgcaggtatacctttgtaaaaaatattcatgatagaaactggtctgagttagcaaaaatgcaaagctactcgatagatcggtttgatccagaggtaagatctgccgcaaaagttgcagctttcattgctcaagcaaagcaggggcaggcccatggaaaggagcggcttgaaaagcttatctcagaagagcagctttcgggtcgcggaaggtatacactattcgagctggcgcttggctctaatgtaagcgcaataatgcaaatcgcatatgagtacggcgtttctcagataacacccgagaatgatttgtctgagatcatatcattctgccgaattgcaagaagcttctctgactggaaaattatagttcgactgctaaagggcatagccaatcctttagagaactcagaagaaactaggcttctgtgcttagggtatatcaacgattatcctgtaagaaaggatgcagtacatttttttgatcgcatcattgctggcggtctagcaagtatctttttaacattaatggtcggcctctttggctataaacaccatgattttgcgcttgctaaagcacagcttaattcctacctgagcaaaggcggtcgcgatgcgacagcgtatctaattctttccgacatttgccgcttagagaatgacgataattcgttgcaggaactcttaaatggttatgaggcagaagagttagagggtagtcctgagcaaataatgcacgtagcaaaactacttactttgcatggcgatgcacaaaaaggcttagcgcttgggtataaaattttcgttgaaaatcccaagtctgccgagatatggttaggctactcgcatatatttcttttttcagggaagagaatagacatacaagcgattgatgatatttcagcaggagtttattttacacttacatcctccgaaggagttaaaatcgaaaggcttgtcgaagatgacatcgatagccagtttctactagcgccggacaatgtggatcaatatgtaaagaaagtgtacggcctaaagaccggcgactccttcacgcaacaaaaaatgcaaggcgatgtaacgtggactgttacggaaatcaagcataaatttcttagggcctttcattacgtacttgaaaggtatgaaacagagtttccagattctggcgggctttgggctgtaaagatagaaaaagataatgtccagccaatgctagatattatcaaaaagaactccgagcatgatgaaaatgtcatttccgagttctgcgagaaacatattccaataagtgcgatggcggcaatttgggagaaaaacccaattaagattgccgatatgattcggacgtacaaaggcgagattgccacatgctcgggcacgctagaggagcgttcgcaagcttacgcaattattaatgatcacgctaaaaacggaatcgttctagatacttataccgcttgggttgcatcgtctcccaatatctttatcgctcttaagaaatcgtaccaaaaaataatggtgtctcgcaccacaatcattgagttgatgcacttgtgcgacgagataagggcgtcatttggctctgaattgtctattagctggctgaatggacagtttcagaaaaccatctcgtctcaatcagaaaaagagcagcttgtaaatgaaatcagcgagcgcatccgttcactagaagaaaattttgaagtagtgcagtatgactatccgtccacccaggacgagataacggagcaaattctagaaaatttcggcccaaatctgttggcgccatattttattgcattaaatggaaacgcgattttcgtttcagatgacggctactcgcgcgagttcgccaaaggcctacttaacttgaactcagcagtttggctacagacactgcttgatgtcgctctatccaaatcgaacataaacctggttgaatatagcgagtgcctgtttgacttggctagatatcgtcacagccacatagctctaactgtggctgccctgaatacagtctatgagcaagataacccagatctgctgaaattctccataatctcgaggtatattggcgtacataatgccgatatcaaaagtcattttggattggttaagaatttcatagggctaagatggatattagaagtgtctaatccggataactccttggccttagaatacctcttgcggtctcatagcagagagcatccagatcacaaggcaatgaaggcgactagcatcctaattcagaacttaattcgggttcccggtggtgtttcgctactcaatgcgattgcacagataccagcattaaggctgtccacttatatcgaagactgggctagaggtcacttcctgcctgttagcgattag

SEQ ID NO: 340903 - DNA, 474 bp, Pseudomonas aeruginosa
atgagtgaggtcatggaccaggcagtcattggtatgccgtatgaaatggcgttggggtgcgaagtgtcgcgcaggcagtactactcccgtgcgaacgctgtcctggcggaacgcgacgccctcgccgccaaactggcgatgctagaggacgcagcagcaaagggagatgctgctcgccagcaatgcggcggaatggagatggagatcgaggaacttcgcgctgaactagcggaactgcgcgcaagggtggtggttgtgccggagcggaagcttctaaatgccggagtcccagggctgaatcgtaatagcggctggaacgcctgcctcgacgaactggcgcgcatcaacggtatgacggtcagcgaggggcttttgcgcaggctgtgcgagccactgctttcgcatgctgattacgtcgtagctcgcaacaaactccgcgccctgctgagcgagcaggagggagggaagcaatga

SEQ ID NO: 340904 - DNA, 1119 bp, Pseudomonas aeruginosa
atgcaacagaatgagaatttcgcaaagcaggccgagcaggcagaggcggagcggccggaggtggtggcttatctgttcgtcaaaccggatggaacactttccatggatgccgtcagacataagccgtcgcaacccgccgttgcggtcatgaccgtcgcccagcacgagcgcatcgtcggggagctgcgggcggagaacgcagaatggcaagaagccgccgggagatctcgttccgatgtcgtggcgtacattgcggagcgcgcaaagctgctggaagagcgcgccgccgccctggtcgaagtcgagcgcctgcgcgagtccaaaggcgatcctgttggcagcctcgaaaagtgcatgaaagtgatgtacgagcgcgacgaacacgctaagcagctggaagccgccctggccagggtcgcggagctggagaaagaactggcaatggcacgcgacgccgcgtccaagggtgacgctgcgcgccacgcggctggcggcatggaaatggagatccaggagctacgcgagaaagtaaccgagctacagaagaagctgcgcagccgatggacttacgccagcacccaggcaaccaattgcgccggttgcggggagcacaaacacaccccgctgcgcgtcgactggatgggcggctatgtctgtctgacctgcatcgacaagaagctggaagaactccacgacgcccagactcagcacagcgtgccggaggggtggatgctcgtcgagtgcggaatctggacgcaggaacaggtggacgagatgcagaagacagtggctcgattccgcaattcagaactcgtcgacgaccgcgcgctagcgatggctgttgctgacgcaggccagtgcaaggctccagagatatcgctggccgagctgctcgccgccgcgcccggcaactcggctcagcacagcgtgccggaggggtggaaacttgtgccgctggaggccccggtagagatgctgcgcgccggaagcatagcgctcggcatggagccgctgtccgacggaagcgatggaggctatcccatcactggtcagcaatcgactatccgccagtgctatgcggccatgctcgccgccgcgcccggcaaggagggggtgtga

SEQ ID NO: 340905 - DNA, 447 bp, Pseudomonas aeruginosa
atgagcaatctgaaccgctgggaaggcattggtcgacttggccaagacattgaactgcgctacctgcctaacggcgatgccgtggccagtcttagcatcgccgtagatgacagctacaaggacaagcagtccggccagaaggtcgaacgtactgaatgggtgcgctgcgtagccttccgccagacggccgagttcctggccaagtggctccacaagggcggccgcctctacgccgtaggcaagctcaagacccgcgagtatgagaaggacggcagcaagcgctacgtgacggaggttcacctagcccagggaacggaaatcatcgactggccggctaaggattccgaaccacgcccgcagtcccagcaacagcaatctaggccgtctcagcaggcacaacagccggcgccggactacgacagcttcgacgacgatatcccgttctaa

SEQ ID NO: 340906 - DNA, 732 bp, Pseudomonas aeruginosa
atgagcaacgcagttgcacagcggcaggaaagtgctgccgtaattcaggccggagaatcggccaccatcctccaagttatccagcgcgccgccgcagacccgcaatgtgatatcgagaaaatggagcgcctcatgcagatgcatgagcgattccaggccagacaggcagagcagcagtacaccgaggcgctagctgcaatgcagcaagaactgcccgcaattgcggagcgtggagacgcgaatggccgctacagctacgcgctctgggaggacatcaacgagcgcctaaagccgatcctggccaagcacggatttgccctgacattccgcaccccgcgcaatgagaaaggcgtcgaagttgaaggcgtcctcagtcaccgcggcggtcacagcgagcgcacctcgatgctgcttccggcagacaccagcggcaacaagaacgccgtccaggccgtggccagttcggtcagctacggcaagcgctacacagcaggcgccctgctcaactacacaacccacggcgaggacgacgatgcgttcaccgcagcggcgccagttctgatcactgaagcccaggccaagcagttgaagtctctgctcgataagtgcagcgataaggcgcagacagctttctcttcaattcacggaacgccagagcaggttaccaaggacgactttgaccgcgtgctggccatgcttaagaagtccgcagaccagaatcaagcggggtga

SEQ ID NO: 340907 - DNA, 219 bp, Pseudomonas aeruginosa
atgagcgggatcgacccgaattgccgagagactgtagcggcggcgttcgacatcgctcctgctctggccgctgagatcgttttcgagaacgacgaataccctggctcctaccagagacaggacgatggctcgatgaagtgggggcgcgaaacgccagagcatcgctggaggcgtatgcgcgactgggtcgaatctagcatccaggcgaccatgccatga

SEQ ID NO: 340908 - DNA, 270 bp, Pseudomonas aeruginosa; identical to SEQ ID NO: 324403

SEQ ID NO: 340909 - DNA, 2232 bp, Pseudomonas aeruginosa; identical to SEQ ID NO: 324402

SEQ ID NO: 340910 - DNA, 750 bp, Pseudomonas aeruginosa
atgatggctgaagtcactcaacgtgcagagcagcaacaagagagccagaagaccctggtcggcaccatcatcagtacgcccttccaatttctcggcgtgatgttcggttcgctggtcggcgcaatcatcgtagagtgggtttgcctgtatttcttctggcctgacgcgggctggaagcatgcccaggccatgttcgagtacgaactcagttggctgtcgcaggggctgctacacagcgtcgtcgtgcaggagccaggtcgaaccgccacctggctggcccagttggcctatgactggttgttcgtgaagaccgggatagtcgactggatgaccaacatgaccaccatcgcgcaggcagggccacggagccctctggacgttcgctatctcaccgcccagggcgtctccacgctgcagaactacggcctggccgcgctgtacacggtgctgacatttgtcgtgcgcctggtgatcctggtcatgacgatcccgttgttcctgatggccgcgttcaccggcctggtggacggcctggtgcgccgggacctgcgcaagttcggcgccggccgggagtccagctacctctaccacaaggcgcgcggcagcatcattccgctagcggtcgtcccttggacgctctacctggcaatccccatcagcatcaaccccttgctcatcctgctgccctgcgccgcgctgctcggcgtagcggtgtgcatcacagcatccaccttcaagaaatacctctag

SEQ ID NO: 340911 - DNA, 1482 bp, Pseudomonas aeruginosa; identical to SEQ ID NO: 324400

SEQ ID NO: 340912 - DNA, 1302 bp, Pseudomonas aeruginosa; identical to SEQ ID NO: 328571

SEQ ID NO: 340913 - DNA, 1923 bp, Pseudomonas aeruginosa
atgtttcaactcctttcctggatctccaggaagccgtcccccagccaactaaccaaagctgccccagggggattcctccctcctctgagcagtatggagctgctcggcacacctcggcgccggcagctactggagaacatctggcagcgcgcctcgctatccaagcagcaattcgaggagatctaccggcggccactggccaactatgccgagctggtccagcagctccctgcttcggaaaaccatcaccatgcccatccaggcgggatgatcgatcacggcttggagatcgtggcctacgcactgaaggtacggcagacctatttgctcccgatcggcgcagcgccggagtcacagtcagcccaggctgaagcctggtcggccgccgcggcgtatggtgccctggctcacgacataggcaagatcgtcgtagacctgcaggttgagctgcaggacggcagcacatggcacccttggaacggaccgatcaaccagccttaccgcttcaagtacgtgaaatcccgcgaataccagctccacggcgctgcctcagcactcctcatccaccaactgctaccgcgcaccgcactcgattggctcagtcgctttccagagctgtgggctcaattgatctacctgttcgcaggtcagtacgagcacgccgggatcctcggcgagatcatcgtgaaggcagaccaggcctccgtcgcgcaggagttgggaggtaatccggatcgagcgctggctgcaccgaagcagtcgctgcagcggcagttggcagacggccttcgcttcttggtgaaggacaagttcaagttgaatcaacctagcggcccgtccgatggatggctgactcaggacgcactctggctggtgagcaagcccgcggccgatcagttgagagcctacctgctggctcagggaatcgaaggggtcccctcctccaacgcgccattcttcaacatgctccaggaccaggccgtcattcagacgaacgccgaagacaaggccatctggacggccacgatagacaatggtgctgggtggagaaacaagttcacgctcctcaagatcgctccagccttgatttgggctgaccctgccgagcggcctgattcctacagcggatcactcgtcattgaagagggcaacgcctcccctgaaaagccggaaacgacctgcgaaatccccaacgatccgattgaacagcagcaagcaccagaaaccaagatgacgctccgccaaccttcgccgagcgttgcgaaaccgtcaaaggagatacgggcgattgcgaacccgtcaattgatgatcaggaagaaacggacgacttatacgcgcttcttggtaatatcacttcgccaccaagcgggctagacactactagccacgcctcaccggctgcttctcctacgaacactcgcggggaggagaacctgcagcagccattaggaaccgcggagccagcagattgcgctcctgaaacagttgaagacgtatttatgcctagcagaagcactgatctgggacagggattcgttggctggatgaaagctggcatcgcggcccgtcgcctgttcatcaacgacaccaaagccttgatacataccgtcgacgggaccgccatgctggtcacaccaggaatcttcaagcgttatgtccatgagcatccagagctcgaaaagctggcccaggccaaggagacgaccggctggaagctggtgcaacgcgcgttcgagaaacagggtcttcaccgaaagaccaataagaacctgaacatctggaccatcaaggtttctggtcctcgcaagacgaaagagctcaaggcatacctgctccaggatcccaaactgctgttccctgtgcagcctctggacaacccaagcctcacggtcatcaccgatgccgaagggggtgtggaatga

SEQ ID NO: 340914 - DNA, 273 bp, Pseudomonas aeruginosa; identical to SEQ ID NO: 324362

SEQ ID NO: 340915 - DNA, 1515 bp, Pseudomonas aeruginosa
ttgcagcacgctgctgttggtccattcgctggcgcggatgtccagcaggccattggtggtcagttcgccgccggcgcggatcacctgcccggaatccaggccgaaggtgccattgccggtgtggaggatgcgcccaccggcgttggccaggctgcccagttgcaggtcgaggtcctggttggcgctttccagcacgccgtaggcgttgttcaggccgccagcgaccaaccgcgtgctgccgctgcggccgagggcgcgcaggctgccgccgctgttgtcgatcgcggcggcgcgcaggtgcagctcgctttcgctttccaactggccgaagcggttggccagcgcgccggccaggctgaagtcgatgcgcccggcgccgaccttgccgccctggcccgccgccgcgccctggttgaggaagcgctggccgtcgaggctgagcaggccgctggcgtagaggccgccgccctggttgtcgaagtcggcggtgacgatgcggttgtcgccgcccagcgccgagaggtggccctgctggttgcgcacgccttgcccggcgcgaatctccagcgactgcgcctgggtgacgccggcgctgttgtcgaacagcccggtgaccagcttcagccaacccttggcgctgttgagcacgccgccggcgccgttgtcgaggctgccgctctgcaggtcgaggttgccggcccggctgtccaggcggccgccctggttgtccagcgcgccgccgatacgcagccggttgtcgccctgggcctggagcgtgccctggcggttgtccaggctgccggcctgcacatcgagggcgccggcctggctgaagatcaggccgtcctgctggttgcgcagggcgccgccgcccaggcgcaggctcatgccggcctggctggcgagggtgccggaggcgctgttgtcgaggctgccggcgctgatctccagcagcccctggctgaccagcttgccgccgcggttgtcgacgctggcgctgcgcagcagcaggtcgccgccgctggccaggcgcgccgcgccggtgttgaccagggcgccgccgaggatggcgtcgagccggccctggctgatcaactggccgtcgctgttatccaggctggcgcccttgagcagcaggctgccgccgttgatccggccgccggcgttgttcagcagcgtatcgtcgcgctcgaagctcagcgcgcgctgcgccgagaccaggccgccctggccgttgtccagcttcccggcgatgctcagggtcacgtcgctttcgccggagacaatgccctgggcgttatccaggctggcggcgtcgatccgttgcgcgcccttgctgaccagcgcgccctggccgtggttgtccagcgcgccgccgaggctgatggccagctcgccgtccttgctcgaaagggtgccgccggcgctgttgtccaggctcccgcctgtcaccgtcaggccctgccatccggagagcaggccggcgccggcgttgcccagcgcgtcggcgtctag

SEQ ID NO: 340916 - DNA, 1383 bp, Pseudomonas aeruginosa
atgcgaatgaacatcacctcggtcgcgctgacgtggctgctcgcagcgcaacttgcccaggccgacgacccgatcaacgtgtccaagaccggcacggtgctcagcgacgaggtcctctacagcattggcggcggcagtgcggtgagcatgggcaccgccggccagatggactcgatcggcgtcggcttcggctggaacaacgacatgatgtgcggaaacatgaacctgagcaccaccctggagaaccagctcaacggtgccacacagggtttccagaacatcatgggctcagtcatccagaacgcgaccggcgcggtcatgtcgctgccggcgttgatcatccagcgcgcgaaccctcagctctacaacctgatcaccaatggcatcctgcaggcgcggatcgactacgatcgctcgaaagggacttgcagagcgatcgccgagaagatggccgacatcgctggcgagcagaccggctgggggaaaatcgccgaaggccaggccctgggagccacgctggcctctggcgggaaagacgccgtatctgccctcgaagcggtggagaagaagggcggcaacgatggcgtaacctgggtcggtggagacaaggccggcggctccggccagaagcccattcgcatcgtcaacgacgtgacccgggcgggctacaacctgttgaccagccgctcagtgaatgactcgtcgagcgtgccttccgccacatgcaacaacggcctggtctgcaacacctggtcctccccccaggaagccgccgcgttcgccacccgggttctgggcgaacaacagcaacagacctgtgaaggctgccagaagacggtgacggctgcaggcgtcggcctgaccccgctgatccaagagacctacgacaagaagctccagtcgctgcaggagctgctgtcgaaaagtaagccactgaccgccgagaacctggctgcggccggcaccgatgccttgccgatcacccgcggcgtcatcgaggcgctgcgcgacgagcgtgaccaggacgtcctggcgcgccgcctggcgtccgatgtctccctgatggacgtgctcagcaaggccctgttgttgcagcgcctgatgttcgccggcgccaaggagcccaacgtcgccgccaacggcctggccacccaagccgtcgatcagcagaccagcctcctgcagcaggagatctccaatctcaagaccgaactggaactccgtcgcgagttggccagcaattcgcccatgcgggtcatcgagcgcgggcaacagcgcgcctcagggtccagtggcgtgttcgagtcggcgcccgatgccgatcgcctcgatcgcctgcaggccccctctgccgccggcggcaagacgggagggagaccgtga

SEQ ID NO: 340917 - DNA, 549 bp, Pseudomonas aeruginosa
atggcgagccgtgggttcagtcgtcgagccgtgagtcaggccctgggtatgcggtcgcagaagttcaaggaactcctggaactgctgccagaaatggactgggtgcctcctcggcagtcgtgggactgcctgcgtgccaaccaggagaagaagggacgcaagtgtccgatgacagaggggcggctgcgcgcggttactgcggcgaggcgcgtcgcgatggcaaaacacacccgctacaccgcgtttggtgtaacagccaccttgccggagctggtgagacagttcggccaggtcgccgtcgccagcgtgcgtatacggttggccaagggaatgcctttggagcaggcccttacctccgcgcgcagcgaccccctcggaaggaagactgcccctgccgaccaccacccctggagacaggaagcccgccaaggggtggtcaatcaccatgaacgccaagccgcagcaatgcaggagcgcgttcaggggaagcgcctggaccgagcggcctcactgctgagccaggaggtgccgccatgcgccgagcactga

SEQ ID NO: 340918 - DNA, 309 bp, Pseudomonas aeruginosa; identical to SEQ ID NO: 340407

SEQ ID NO: 340919 - DNA, 1077 bp, Pseudomonas aeruginosa
atgcgcctggcgccgcgccgggagttcgaagcgaacatgtacgcggtggaccgcgagcggcagctgctggacatgacgctgttcggctggggcgcacgcatttgggcgctgccgatttggcctgatatccaactgctccaggaaccgctggcggccggctcgctgaacattccgtgcggcacggccggcctcgacttccgcgacggcggcctggcgatgctgcgcggcgaggacgcttttacttatgaggtcgtcgaggtcaagacggtgaccgccagcggcctggacctggttcggcccgtccaggccgcctggggaactggctcgcgactgtacccggtgcgcaccgcgcagctgaccgagcagcccacgctgacccggctgaccgataccgcgcagtctgcgcgggtgtcgttccttgtgatggaacccagcagttggcccgaggtgatgccggcgacgatgtaccgggggcgtcctgtcctggaacagctcccggacgaaagcgaagacctgacgtcgagctatcagcgcctgctgtccaccctggataacggcagcgccattccccgcgtgaccgacgtcgccggcatggcgctgcccgtcatcggccatcgctggatcggcatgggccgagccgagcggtcggcgttccgtagcctggtctatgcgctgcgcggccagcagaagccgctatgggtgccgacccacgccgacgacctgaccctagtcgccaccgtctcgcagctgtccaccgcactggacgtgcgcaatatcggctatgcccgtttcgccaatgggcgaccgggtcgtcgcgatatccgcatcgagctgtacgacggcaccgtctatcaccgccgcattctcaccagcaccgagctggacgccgacaccgagcgcttggccatcgacgccgccctgggccgcctggtcgagccgaccgatgtagcgcgcatctgtttcatggcgctctgtagcgccgccagcgacgtggtcgagatcgagcacgtcaccgatagcgagggcgtcgcaactgccgccctgacgttcaaaggggttcgtgacgatgagttttaa

SEQ ID NO: 340920 - DNA, 1050 bp, Pseudomonas aeruginosa
atggaagtggacaacacgcgcgtgaacaacccgctgctggcacaggaaatcgccgacttctccaaggactgctatggcccttcccgcgcacggctgttcatgcggcaacccgatctgggctccgtcgccgaggacaacaaggcgctgcaggacctgaactggatcggctcccgattcctgttgaacaccccagggtactacgacaccgactactccaagactccacggcaatcgtggccctacaacgccacccgcgacgccgggctgccccaggtgggcggtggtggtggctaccctacctgcaagcagtggtgggctgactcagggatcggtttgcgtgatcggatcaaggaccaggtggatccggacctgatgaccagcttcctcaagtgggcgaaatggctgaaccaggacgaggtgagcgaggcagtcattcgccaggtgatatccccctccagccaggttaagggcaacgtctacagcgattatggcgggcaggtgggcggtaccgtctggaatggactttcgagaacagccggcacctttggcgtggccctggggagcctggcctacttcccggcgatggacatggtccgccaggcgctgccgatggtgatgtcgttcctgaagatggccatgatcatctgcattccgatggtcctggtcatcggcacctatcaactgaaagttgccatgacgatgacggtcgtattctttgcgatgatgttcgtcgacttttggttccaactggccagatatatcgatagcacgatacttgatgctttctatggttcggggtcaccgcatctttcgttcgatccagtcatggggctcaatacggcgactcaagatgcaatcttgaacttcgtgatgggctctatgttcttgattcttcctgcactctggatcactgccatcggctgggcaggtcttcagattggaacggtgctcagtgggctcgagacaggagttaaaagggtagatgcagccgcagcccaaggtggaggtctagctaaacaaggaattagttctttccagtcaaaagactaa

SEQ ID NO: 340921 - DNA, 1029 bp, Pseudomonas aeruginosa
atggaagtggacaacacgcgcgtgaacaacccgctgctggcacaagaaatcgctgatttctccagggactgctacgggccctcccgtgcgcggctgttcatgcgacaacctgatctgggctccgtggccgaggacaacaaggcgctgcaggacctgaactggatcggctcccgattcctgctgaacaccccggggtactacgacaccgactattcgaagagcccccgtcagtcatggccctacaacgccacccgcgatgccggcctgcctcaggtgggcggtggtggcggctacccaacctgcaagcagtggtgggctgactcagggatcggcttgcgtgatcggatcaaggaccaggtggatccggacctgatgaccagcttcctcaagtgggcgaaatggttgaaccaagacgaggtgaccgaggctgtcattcgccaggtgatctcaccctccagccaggtcaagggtaacgtctacaccgattacggcgggcaggtgggcggcaccgtctggaacggcatcgcgagaaccgcaggaaccttcggcgttgccctgggcagcctggcctatttcccggcgatggatatggtccgccaagcgctgccgatggtgatgtcgttcctcaagatggccatggtcatctgcattccgatggtcctggtcatcggcacctatcaactgaaagttgccatgacgatgacggtcgtcttctttgcaatgatgttcgtcgacttctggtttcagttagccagatatatcgatagcacgatacttgatgctttctatggttcgggatcaccgcatctttcgttcgatccagtcatgggactgaatacggcgactcaagatgcaatcttgaacttcgtgatgggggcaatgtttattatattaccgctactatggattactgcagtaggatggtccggcatacaaaccggagcaattcttaatgggctagcagacggaaccagaggggttcaagaggcaggtgggaaagctggagaaagaatcgaacgtagcgtgtaa

SEQ ID NO: 340922 - DNA, 303 bp, Pseudomonas aeruginosa
gtggcgcgccaggtgctggccggtctggtgacccagttccaggccacgatggaagccatccaggtagacgcggacatcaagcccgccgtgaaggtgcagctgctcgccagcctggccgacgcctacaacaagacggtcagcgcgtccaagcgtgttctgcccgaaacatcagcgctggccaccgctatggaggtgctccagcgcctggccagcttcatccgtgagcggtttccgcagcacgcccaggcattcgccgatgtgctggagccgtttggagaagtgattgcgaaggagttggggtaa

SEQ ID NO: 340923 - DNA, 306 bp, Pseudomonas aeruginosa
atggatgcgccgctgtccatccccggcctcggcacaatcacccccgagcaactccggtcgcgcagcgccgcgacccttgaagtgcaggccgagcggatcgacgaaccgcgcccggccgcagccgccacccaagccaccaccgcccaggtcttcaccctgccgaccgctcccgcccagcgctaccggcagtggtgcgagctggccgagcggcagcgctccggcctgcccatcgagccggacgccgcccagtggttcgaggtttaccccaaatccaaagaattcgccgcccagcagcggcaagcatga

SEQ ID NO: 340924 - DNA, 645 bp, Pseudomonas aeruginosa
gtgggagtcgcacgcccaggaactgctccagctctgcaggcaaacgctggaggagctgcaggatcccgagttcgccatcgtcgtcgacggtgtgctgctgcgcgtcacccaactggaagatgctttcaacggcgggagtgtcttcgtgctgcgccggtcgacagcccaagttcgaagcttcgaggatatcggctatccgagcgaggtggtcgctacgctcctgaacccgcaactgcagggcttgatcctgttctgtggcgatatggcgaccggcaagaccagctccgccgcctcgctgattctcgctcgactgcagaccctgggtggggttggcttcacagtcgaggatccacaagaaaccaatctcagcggccaacatggactcggccgctgtatccaagtcagaacctcacgacgctcgggaggctacagcgaagccctgttgcgcacgctgcgtaccggagccgacctgatattgatcggcgagatccgcgacgaagacaccgcctaccaggcctgcaaagcttcgctgaacggcaacctagtcatatcgaccatccacgccaagaactgcccgcaagccatcgaacggcttatcaccctggccaaacccctcgcgtccaatgcctacgacgtcgtggctga

SEQ ID NO: 340925 - DNA, 270 bp, Pseudomonas aeruginosa
atggccgtatacaccatcaccctcagcgacaccgaaggcggaatagatttctccatgcaaggcccgccgctgcacgactccgaagcatcgaagatcgcctacgcccttatgcaatcgatcatgtccctaggccaggcactcgcaaagcagaacggagttggtaacgccgtttcctgcgcctgcgacgagtgtctggcacgccgcgctcgcggcgaggaaccgcaacaggaaatccattccaccaaggccaagagccgcaccgtccattga

SEQ ID NO: 340926 - DNA, 348 bp, Pseudomonas aeruginosa
ttgaacctctggctttatgcggtacacaagtccacccgcttccgtctggtggagctggtagcgctctttctcctgttcccagcgtttgaactgagcaatttcggcttccaactcgcctatgcggcgggtcaacgtcgtctgatccgcgtgggcgctgttcagctgggattgcagcccaagcagcacgccgttcaactcgaccaccttggtcgttacagccgcatccgtcttgagcgtgagcatgctctgcgtaatgtcagtggccgccttgatgccgccgtaggcaccagcaatccagtccatcatgaccaggttccttctggggagaaatcgacccatgaagggtag

SEQ ID NO: 340927 - DNA, 243 bp, Pseudomonas aeruginosa
atgcaacgccccagcggaatcagtctcagcgatctgttcgcgatctgccgtgaagacccggccaaccggtggctctggatacgcctctatctccgcgacctgctggcccgcgtcgtggttctggtcttcatggcaatcggtgccgcaggcctcgcctatggcctgggaggggcgttcgcctacggcttcatgcagaccgttgcgtcctaccaagtccagctcggcgtcgagaagtcgccatga

SEQ ID NO: 340928 - DNA, 243 bp, Pseudomonas aeruginosa
atgcagcgccccagcggaatcagcctcagcgatctgttcgcgatctgccgtgaagacccggccaaccgatggctctggatacgcctctatctccgcgacctgctggcccgcgtcgtgattctggccttcatggcaattggtgccgcaggcctcgcctatggcctgggcggggtgttcgcctacggcttcatgcagaccgttgcgtcctaccaggtccagctcagcgtcgagaaatcgccatga

SEQ ID NO: 340929 - DNA, 252 bp, Pseudomonas aeruginosa
gtgcaggggatggccaagttcgcgcgcgagatcatctgcggagccctcgatggcggaagcttcgatggggcagacatacaggaaagcgctgaacgccatggactgatcgccaagcaggtgatgaacgagccgtgccgcggcccagaagagtactgcgcctgcgcctggtctacctcgttcccggctgaatgctaccgggtaactccagagattcgcgccctgctgagcgagcaggagggagggaagcaatga

SEQ ID NO: 340930 - DNA, 195 bp, Pseudomonas aeruginosa; identical to SEQ ID NO: 333000

SEQ ID NO: 340931 - DNA, 711 bp, Pseudomonas aeruginosa
atggcatattgcattcatctacggcgcagccgactccagagccttgattcgcgccgaaaccgctacgaacgcatcttgaatgctggaggctgcagccaacccactggcagcatcagcagtgattgcatggttgtggtcgccagccgccgcggtagtagcggttgtaccgatcgcaaggctggatgttcccgcgccaatagccccccttgctgttgcggcatcagcaccagccgcaataacagccggtttccctgtcacatccccccaggcaggcgcatagtttcccgctttggcggtggttgcggtggtgcccaactgcagattggaagtgccggccccgattgctgcacgcccatcgccctcgttgacggcagtcagcagagatttgccgatggcggaagcatcggtgatgtcgtccaccacgatggtgacagggccagtgccactaccatccggcgtacccttgaccagagcctggtagacggccttgtcgtcggggtagagcaggataggcgcaccgagcggctgccagccatcggcgatggcctcggtcatgaagcgctcgatctggtcgataggtgccttgagcacccgatatgcggtgtaggccatggtttcctccctacagggtcggctcttgggggatcaaccgggcgcgacacgagttgtaggccgcgctcagggtttcgacttcgctcagggagtcgttaa

SEQ ID NO: 340932 - DNA, 147 bp, Pseudomonas aeruginosa
atgtggacataccgcgaacgccgcaaccgcgcggctttcagcaacgcgcaactcgcttacgaccgtgccgtcgacccgctctgggaccagccggacccggagcccgaggacgaaaaccaggaggacgacgatggcctgggcgaatga

SEQ ID NO: 340933 - DNA, 1017 bp, Pseudomonas aeruginosa
atgaccatcctgaaaaatgttgacctggaaaacggtaccgtcgaggtcgccgagtacaacgcaaccaacgccgccctggcaaaacttcgcgagaagtacgcgacgctgccggacgccaataccgccgatggctacgagttcatcaaggccggtatcaaggaattgaccacactgcgcaccagcctggaagccgctcgcaagcgtgaaaaggcgccttacatcgaggcaggccagatcatcgacgccgaggcgaagcggatcaccgccgcactggtgacgttggaagatccgatgaaggccgccaagaaggaggtcgacgatcgcgtcgaacgcgagcgccaggaacggatcgcacgcctgctgtcgaaggtcgacgccatcaaagggatgccggcccaggtacgcggcaagaccagcgacgagattgccgcgatgatcgaccgctgtggcgaaattgacaccgcacacgacttctacgacttgacgaaggaagcccaagccgcacagcagacggccatggacgaactgacccaaatgctgaccgaccgcctggccttcgagcaagcggagcgccagcggcaggagttggaagcccagcaagccgaaatgcgccgccgcatggaggagcaacaggcggaaatgcgccggcagcaagaggaaatgcaacgccaacgcgaagaactggcgcgccagcagcaggagcttgccgccgcgcgccagcagctcgccgagcaggacacgcccgtcgctgtcgagccggaggcgccgaaggccgaggttgcaccagcgcccgcccagatcaagcccgccggcaaggcagcagagcccagcgctacccagtggcgcgcccgcgtcgtcgataaaaccgcgttcatcgccgccatcgccgaaggcctagccaccgaggacttgctcgttgtcgaccagccggcactggacagcctggccaacagcaagggccaaacgctgaatctgccgggcgtgatcgtcgagaagtcacccgcgaaagcagcctga

SEQ ID NO: 340934 - DNA, 225 bp, Pseudomonas aeruginosa
atggacgagatgctgaggcgtaggctccgggcggagttgctggaggtggggttcctcaaccagtgctgccttgacctgatggaaagcatggaggctgagttcagcctcactgatgaccagcgcgagtgcatcgagcagctcagccgatttctgcaggaagggatcggcaagctgacatctctgtccgagcgtgtagcggctggcgatattgtcgtgctttgttga

SEQ ID NO: 340935 - DNA, 774 bp, Pseudomonas aeruginosa
atgcagttcggcgccaagccgctgttcgagaacgtttccgtcaagttcggcaacggcaaccgctacggcctgatcggcgccaacggttgcggcaagtcgaccttcatgaagatcctcggcaacgacctggagccgagcgccggccaggtcatgctggaacccaacgtgcgcctgggcaagctgcgccaggaccagttcgcctacgaggacttcagcgtcatcgatacggtgatcatgggccacgaggaactctgggcggtgaaggccgagcgcgaccgcatctactcgctgccggaaatgagcgaggcagatggcatggcggtggccgagctggaagtccagttcgccgagttcgacggctacaccgccgagtcccgcgccggcgagctgctgctcggcctgggcatcccgctggagcagcacttcggcccgatgagcgccgtcgcccccggctggaagctgcgcgtgctgctggcccaggcgctgttctcggacccggacgtgctgctgctcgacgaaccgaccaaccacctggacatcaacaccatccgctggctggaaggcgtgctcaccgcgcgcaacagcaccatgatcatcatttcccacgatcgccacttcctgaacagcgtctgcacccacatggccgacctggactacggcgagctgcgcctgttcccgggcaactacgacgagtacatgaccgccgccgaacaggcccgcgagcgcctgctgtcggacaacgccaagaagaaggcgcagatcgccgagctgtaa

SEQ ID NO: 340936 - DNA, 300 bp, Pseudomonas aeruginosa
atggggctggccttgcgccttgggctgattgtcctgggtaacgtcgagcgcgccgaactgctgctggcgcacgtcgatgcgtccgccccaagcgttcagaatgccatccaaggtgatctgtccgggaccgcgcaggacgatggcgcgccccggatcgacctcgaccagcgaaccgcgccccagctccagcgtctggctggcgggatcgagctgcccgaggatattgccgtcgccgcctgcctgcaggtacaggtccgccccttcgcgttggaccaagcgtccggccaaggcatcctctag

SEQ ID NO: 340937 - DNA, 882 bp, Pseudomonas aeruginosa; identical to SEQ ID NO: 338800

SEQ ID NO: 340938 - DNA, 1116 bp, Pseudomonas aeruginosa; identical to SEQ ID NO: 338801

SEQ ID NO: 340939 - DNA, 1860 bp, Pseudomonas aeruginosa
atgcacgatcccactcccggcatccggggtggcgctcaattccatgctgaccttgccgtcggcatagttgatctggccgctgccaccggtaccgctgagcgagccgttgccgctatcgagcacggtgcgctctaccccgccgaccttgaacgtcgccttgtaggagccgggcaacaacccctggtgcggcaacgtccggttgatccgcgcgcgcgcctgcacgctggtgccggtgcgctgggtcagcgccgcatcgttctgccccacgtaggcgtaaatcagcgaactccccacgtccggcagcgcgctcagggtgatggataccgagccggtcgcgaagtccaccgtgccggtgccttccccggccaattcgccgttgccctggtcgcggatctcctgccatttgcccagggcgaggaacgagaccaccagggtgcccggctggggcggcgcttcggacagcgacagggtgtagacgaagccgcggttgcccagttcgatagggatctccccggtcaccgcttcgcccgtcgccgccgcggcaggctggtaggtggcgctcgctgtcccgctccagccgctgccggaggccgccatctcgattgcgccgctctcgtagtcgacggtaccgctggcaatccagttcgaaccgctgatgtagcgcaggcctcccttgcggtcgtcggcgaacacaccgccgccggcgctcagcgacagcgaacccggcgcgcagccggtgccgaggaacgtccgcgacctgccgctgcctatgttcgcgacgctcaggttgaccgtccgcgccggcccggccgcagcgaacaggcgccgctggtagccggccagttggtcgaccagcgcgttctcccgggtggtgctgggcaccagctgggaatagaccgacttgacccgcaggctcagcgcgccgcggctgacagcctcggccagggggctgatgccgtagtaccgcgcggcatcggcgacctgggtgctgagcacctggcttttcgggctggtggtaccgcctggagtcacctggccgccggggaaggtcgcgcccagtggcgcgctgatcgacaggtccagccggcgccgggtgaagttcacgaagttgccgttgccgtagtcgtgggcgaactgttccagccgcgcctcgacgtcggtgatgcggacatactgcgagcgcgactcgaacaccaactgatagacctcaccgatctcgggcagccgctgttcttcgcgctgcacgcaagcgatggcgcgctggccctgcaactggttgcccagcagttcgaacgaggcggacacggccggcaccacgaaggactcgatggcgttgcgcgcgtcgcggcgctcgtcggtctggctaccggtgttgaacagcagcaccgagacacgcggatcggccggcgcccgcgtgacgatggcatgagcgcccaggtacggctcggcgctgttcgagctgatgccggcgaaggccttgcgcaggttgatccggccgatggtccggtccaggcgcgagatatcgggaaacaggttgttgatctcgcgatccaccacggcctgcccggtggcacggccgccgccgtcgtcctcatcggtgaggcgctgggatttcagcagctttacatcatcgacggtgatcgtcatggagcactccagccagaaaagaaaaccccgccgaggcggggtgtgggatcaagggtcgggggtgggcggcgctacggtgagcagtcgcaatgtcaccaggtagtcggcgtccggaccgggattgacctcgcggaacagcggttcggcttccagcggcgccccttcggcgcggttgaagatcaccgagaattcgcggccgtctggcagcactag

SEQ ID NO: 340940 - DNA, 357 bp, Pseudomonas aeruginosa
atgaccgcgcgccggctgacccgggccgaaatgaaccacctgcgccgcctgatcggttgggttcgctgcgaggtgggggcagagcccgagggaatcgtcaccgccgccaaagaggcgctcgaccaattccaaggcgtgtcggaggacggtaagcggaggttgctcgagcactaccagaaatcagcagccataccgaagtacatccgcgctgcgatcaaggccctggagaaggtgtgcctggaagatccgaccgaggtggttgacggtgagttggttgctcgcgggcgccacgaagtgccgctacgcctggtcgtagcgcgcaacgaagaggagatagggaatgggaagctcgactag

SEQ ID NO: 340941 - DNA, 672 bp, Pseudomonas aeruginosa; identical to SEQ ID NO: 338810

SEQ ID NO: 340942 - DNA, 1062 bp, Pseudomonas aeruginosa; identical to SEQ ID NO: 330709

SEQ ID NO: 340943 - DNA, 1398 bp, Pseudomonas aeruginosa
atggggcgacctgcagggtggatgcaggagttgacggggcgaggggcaatgcgctcgccaggtgccccgtcacttcgccgagagatcgagcggctattctgggaacagatcgcaaccgggatcacaagcgaaagggcggcagaggctattagcgtatcgccagcggtaggcacacgctggttccgtcatcgcggcggaatgccattattcatgtcgaaccacatatcaggaaggtacttgtcgttcgctgagcgagaagagatcgggctgctccgggcgcaaagtgttggtgtgcgtgagattgctcgccgtcttggacgaagtccgtcgaccatttcacgggagctgactcgtaacgcagcaactcgtagcggccggctcgagtatcgcgcttcagtcgcgcagtggaaggctgaattggttgccaagagaccgaagccggcgagattggtgaccaacccgcaactgcgccattacgtgcaagagcgcttggaaggcaaggttcataacgctaatggccgtgagattgccggtcctctacaggcaccattcaagggacgaaataaaccacatcgtggtgaccgtaaatgggtcaatggttggtcacccgaacagattgccaaccggctgcaaatcgacttcccggatgacaagtccatgcgtatttctcacgaagccatatatcaggctctctacattcaagggcgaggcgctctcaagcatgaactggtgagttgcctgcgtactgggcgggcgttgcgcgtaccaagagccagggcgcaggccaaggcatgggcacatgtcagcgaggatgtcatgatttccagccgtcctgctgaggtggaggatcgtgccttaccagggcattgggagggtgatctgatcattggcctgaaccgatccgccatcgggacgctggtcgagcgctcaagccgatttaccatgctcgttcatctgcctcgcgaggaaggttacgggctgactccccggacgaagaacggccccgctcttgctggctacggtgctgtcaccatgaccaatgcattgaagagggccgtgactggcttacccgttcagctgtggcgatcattgacttgggatcgtggaaaggagttatcggatcacgtccgctttaccattgagtctggagtaaaagtcttctttgccgaccctcacagtccatggcagcgcggtacgaacgagaatacaaacggtcttctacggcaatatttcccgaaaggcaccgacctgtctcgttggagttaccaagagatccaagccgtagcccatacgctgaacactagacccaggaaaacgctcggctggaaaacacctgccgaggtactgaatgactatctaacatctattcagcaacccagtgttgcgacggccgattga

SEQ ID NO: 340944 - DNA, 300 bp, Pseudomonas aeruginosa; identical to SEQ ID NO: 338822

SEQ ID NO: 340945 - DNA, 231 bp, Pseudomonas aeruginosa
atgacctcacaaccaaaaccgggtcggatcaccactggccccaacggccgcccggtgatcgccggcccctggccgtcctaccgtcaattccgcgacctgcccgagcgtaagcgctgggtgctctacggccacgccaaggcatgccgcggtgcgcttgaagatcaaggattcctcatggccgagggataccacgacttcgtgaagcgcgtcaccgaggagttagacatatga

SEQ ID NO: 340946 - DNA, 267 bp, Pseudomonas aeruginosa
atgcagttcttgcacagccgcaaatacttgaacgagggcgatgttgtcgaagtcaactgctctcatcaatgtaatgttcgccttaccaccgacacgcaattttcaaacttcaagaacggccgcaggcacacctactacggcggtttttatgaacgactacccgctcgcatcactgtgcctcacaccggatactggaacatcaccattgacttgggcggaggatccgctcgcatcacccattcgataaccatccacagcaacagctag

SEQ ID NO: 340947 - DNA, 225 bp, Pseudomonas aeruginosa
atgctgcatgagccggaggagtatcgattgttcagtctgtggatggtggtcttcatggctatcggctggttcggcggctgggtatacgcccattacaccgtcgccgaagaatgccggaagctcggcaaattctacgtcggcaaaaccgttttcgagtgcaaggcgatcactgactcgaaaggccgaacgctgacagaggaagacaaggagaacggcaatggctga

SEQ ID NO: 340948 - DNA, 207 bp, Pseudomonas aeruginosa
atgccattcgacgaaagccccgcagtccgccgcataaacgccctctgctctcccgcgccagcacgctacctgcacattcccaccggcattcactgggtcgtcatcgacagcctgggcaatgtcctgcaactcgaaaacatcgagcgccggcgccgactgataaccgtttctgacctcgatagcgagacctggagaaagctcacatga

SEQ ID NO: 340949 - DNA, 267 bp, Pseudomonas aeruginosa
atgtgcaactgtcacagtgagtcggaacagcgactgagggaacacgtacagcagcagctcccaactggcgcaaccggattgagtgttgagcttcaaggctatgtgttcagcctcggcggaagcgaaggggtaaaccatcgagctgcctgcccggtggagatccagtatcaggcaccaaaaaagtcgggaggcatgaaaaacgtgaagcagaaaagcttcctgcgcgcctcctactgcccattctgcggcgagaaatacgacaagtag

SEQ ID NO: 340950 - DNA, 252 bp, Pseudomonas aeruginosa
atggaagcgcaaaacgtttgggctgtaatcaacatttggaccaatgaagtgcttgaagaaacgacccactaccaagcggctgcggctcttgaaaacgagtacgccgaacgctggtatgcagaacatgtcggcccgttcttccattccttctggtgcgggcattggcagaaatgcgtccgcctgcccttttcgctctgccgtatcgatgccctgagccgcttttacccaggcattaaacgtttggccgcttaa

SEQ ID NO: 340951 - DNA, 588 bp, Pseudomonas aeruginosa
atgacgccggcctgtgtgcccctgcgcattgagaaaggggcgacgtttcgcgacgcgctgcggatcatgcagccgagccttgtgtacagaccgatcacgcagatcgcaccgaccgcgcctgtccggctgaccatccctgggcacggggtgcctggcacgtggctggcgtgggctgatggtgtccagggcatgcccgaactgaaccgcgctcgacttcggcaattgcctcaccgggtcgcgtccatcgacgacgacaccatcgagatcaacctactgtcagccgttgggctggcgcctgttggcggacagttgatctaccagccacctgttgacctggctggcgccgaggtacggatgcagatccgcgatgcgccaggtgggactgtgctgatgacgctggcgctcggctctggtctggatctcgccggcgccggaacgatctcgcgcgagatatctgcatcggctaccgcggcgctggaatggtcagcggcggtctacgacgtggacgtgacatacccggatggaacggtccatcgctactacagcgggccgatcattgtgagccgtgggggagggtgcgatggatga

SEQ ID NO: 340952 - DNA, 285 bp, Pseudomonas aeruginosa
atgagcaaacgactgcttcttgatggcgttttcttttctgaaaactggagcggcaccctggacgccgcggcggcgcttgcaggcgtcgacgtgtcccgtcttgcatttcacccggtcgaccaactagaagaagttcgcgaactgcgaagagaggcgtatcgacgagagtcggacccaatccgacttgaggaggagtttgacgctcgccgtgctggtcgtgcgccggactactcggcgtatgacgccaaggtcgaggagatcaaggcgcgcttcccgctgccgtag

SEQ ID NO: 340953 - DNA, 264 bp, Pseudomonas aeruginosa
atgctggtcattcgattcaagggctggtcggtgaaactcgaccaccaggtgggcagcgctgggaagttcggcatctggtcgttccacggttcggagagcagctacgtgccggacatggagacgattctccggcatgcagcgatccggccggcggagccgaaggagggcgccgaggtagaggtattcatctgtgattctcgcatgccgcaggatgaatggcggcctgtcggcagcggtgtcgccgcttacgaggcggagcgctga

SEQ ID NO: 340954 - DNA, 741 bp, Pseudomonas aeruginosa
atgaattgtctggataatgcttatccagaatatggatatgggataacacgatatcggtcggccgccggccgccgagggctcccatcgctcccgcggacggggcgcaaggataaccgagccaaccccgccgacggaacggcaaaatgtcgcggggcctttcgctctagacgaggaagcctggatgaaattcaccctccgccagctcgaggtgttcgtcgccgtggcccagcaggagagcgtctcccgtgccgccgaggggctgtcgctgtcgcagtcggcgaccagcacctcgctcggcgagctggagcggcagttcgactgcaagctgttcgaccgcgccggcaagcgcctgaccctcaatgccctcggccgccaactgctgccgcaggcggtggcgctgctcgaccgcggcgaggaaatcgagaacctgctcaacggcaagaccgccttcggctccctcgacctcggtgccaccctgaccatcggcaactacctggccacactgctgatcggcgccttcatgcagcgccagccggactgccgggtgcgcctgcacgtgcacaacaccgcccaggtggtgcagcaggtcgcccactacgagctggacctgggcctgatcgagggcgactgccggcatccggacatcgaggtgcaaccctggatggaggacgaactggtggtgttctgcgcccccccagcatccgctggcgcggcggggcggcgccgacctggaacggctga

SEQ ID NO: 340955 - DNA, 1287 bp, Pseudomonas aeruginosa
ttgatccacgcagcgcggtcgctggccgggcgccgggcggggccgctcctcgccctgctcctgctcggcctcgccacggcccgcgcggagccggtcgacggcctgccgctgcgggccgacggcgatggccgctggagcctggcggcgggccgctacgccggcaacttcgtcatcgaccggccgctgcacctacgctgcgaggccggcgccgaactggacggcggcggccacggcagcctgctgaccctgaccagccccgggatcaccgtcgagggctgccggctgcgcaactgggggcgcaacctgaccgaactcgacgccgcgatcttcgtcggcaaggccgccagcggcgccgtgatccgcggcaacgacctgcgcggcgcgggcttcggcgtctggctcgacgccacggcgggcgcgcaggtgctcgacaaccgcatcgagggcgacgaaagcgtgcgctcccaggatcgcggcaacggtatccacctctatgcggtgaaggacgctctggtccgcggcaaccgggtcagccacacccgcgacggggtctacatcgacacttccaacgacagcagcatcgaagccaaccgcttcgaggagctgcgctacggcgtgcactacatgttcacccacaacagccgggtgaccgacaacctgacccggcgcacccgcaccggctacgcgctgatgcagagccgcaagctgaccgtgaccggcaaccgctccatcgacgacgagaactacggcatcctgatgaactacatcacctactcgaccctggccggcaaccgcgtcgagggcgtgcgcagcggcagcaccggcgacgcgatgatttccggcgccgagggcaaggcgctgttcatctacaactcgctgttcaaccgcatcgaaggcaacagcttcgccgacagcgccctgggcatccacctcaccgccggctcggaggacaatcgcatcgccggcaacgccttcataggcaaccgccagcaggtcaagtacgtcgccagccgcgagcaggagtggtccgccgacggccgcggcaactactggagcgactacctgggctgggaccgcgacgacgacggtctcggcgacgtcgcctacgagcccaacgacaacgtcgaccggctgatctggctgtacccgcaggtacgcctgctgttgaacagcccgagcatcgagctgctgcgctgggtccagcgcgccttcccggtggtgcgctcgcccggcgtgcgcgacagccatccgctgatgcggatgcccgccgcggagccgaggccatga

SEQ ID NO: 340956 - DNA, 1716 bp, Pseudomonas aeruginosa
atgaatcccccggcggcgcggatcgagagcctgacgattctcatcgccgaggacaacgcggccgaccgcctgctgctgtcgaccatcgtcagccgccaggggcatcgcgtgctgaccgccggcaacggcctggaggcggtggcgctgttcgagaccgagcggccgcaactggtcctgatggacgtgatgatgccggtgatggatggcttcgaggctgcccggcggatcaagcagcaggccggcgaggagttggtgccgatcatcttcctcacctccctcagcgaaaccgaggcgctggtgcagagcctggaggcgggcggcgacgacttcctctccaagccgtacaaccgggtgatcctcgaagccaagatcaacgccatgggacgcctgcacctgctgcaacgaacggtgctggagcagcgcgacctgatcgtccggcacaacgagcacctgctcaacgaacagcgggtggccaaggcggtgttcgacaaggtggcccattccggctgcctgaacgccagcaacgtgcgctacctgcaatcgcccctcgcgctgttcaacggcgacctgctgctggccgcctacaagccgtccggcggcatgcacgtgctgctcggcgacttcaccggccacggcctgccggcggcgatcggcgcgatgccgctggccgaggtgttctacgggatgaccgccaagggctatccgatggccgacatcctccgcgagatgaacgccaagctgaagcgcatcctgccggtcggcgtgttctgctgcgccaccttgctcaacctgagcttccagcgcgaactggtggaggtctggaacggcggtttgccggacggctacctgctgcgcgccgccagcggcgagcgggtcgccctggtgtcccgccacctgccgctgggaatcctcgaaccggcggcgttcagcgaccgttgcgaaacctatccgctggatatcgaagatcggatattcctgttttccgacggggtcctcgaggccagcaacaaggctggcgagatgttcggcgaggcgcggctgctccagctgttcgagcgcaatcgccagccgtccgcgctgttcgacgagatccagcgcagcctggcgcagttccgcggcgcggtgcaggacgacgtgagcatgctcgaagtgcggctgcagccggatagcggcctgcaatgcccgccgctggcgttttccgatagcggcgtgagcagtccgctggactggtcggtgagcttcgaattccgcgccgaaaccctcaagcatttcaacccgctgccccatgtgctgcaactgctgctcgaggtccacgacctgcgcgcgcgcggcggcgcgctgtatacggtgctcgccgaactctattcgaacgccctggaacatggcgtcatcggcctcgattcgacgatgaagagcgacgcggcgggattcgcccgctattaccaggagcgggtcagccgcctgcaggccttgcgcgacggctacgtgcgactgcacctggacctggcgccgcatggcgcgggggggcgtctgctggtgcgggtcgaggacagcggcgaaggtttcgacgtggagcgcgcgctgaatgccgtggagcgccaggaacgcctctgcggcaggggtttgcgcctgatccgcgaattgtccgatcgttgccagtggtcggccgacggaaaggtggtgtccgtggagtttttctggtcgcctcaggcataa

SEQ ID NO: 340957 - DNA, 777 bp, Pseudomonas aeruginosa
atgctaggttcgacaggaaaaatgccaggcacggccgctcttcgcagagctgccggccccaccgcgagacgacttccggacggaccccatgcagcgcttgatccaggccaacggccaaccgcactacggcatcttcccgagtgccccgcagcacatcaattaccgcgatttcgacttccgttcgccgatgggccggcgcgtgggggccctgggcaaatggcgacgcttccatcagttccagtactttggcctgatcagcccggagctgatcggcggctgcgccctggctcagctgagcttgcttggcgtcggcttcgtctacctctaccagccttccagcggacgcatgctggagcggcgcttcaagctgccgctggggttcggaacccgattttcccagaccccggacgacggcgtctgcgaactgcgccaggggcgcaacctgctacgcctggagaaccgtatggctcaccgggagaaacgcctgctggtggaactcgacgatggcacccgcatcgacgcctgcttcagcgaggaggcgccgagcttccagccgatgtgcctgtgtacgccgaccgcggtgaacggctgggtctacgcgcagaaggtggccggcgtgcgctgtcgcggcgacgtgcgcagcgccctcggcgaccacgacctgcaggcgctggacgccttcgcccatcacgactggtcggcgggctacgcgcccggaaaccttctggaactgggcttgcctgtccggcgaggcggacggcttgcgggtcggcctga

SEQ ID NO: 340958 - DNA, 2052 bp, Pseudomonas aeruginosa
atgcccggtaaagccttgcgtgtcatgttgtgtgcctggtcgtgcctgttggccgggcaggcgagcgccctgggagtgggagacatcaccctgcattcggcgctcaaccagccgctggatgcggatatcgaactgctcgacgtcggcgatctcggcgcggacgagatcgaggtccgcctggcgggcgccgacgtcttcgccgcggccggggtggaacgcttgcagttcctcaacgagctgcgtttcagtccggtgctccaggggcgcggtggcaatcgcatccatgtgtcctcgagccgaccggtgcaggagccctacctgaatttcctggtggaggtggcccgccccaacggccgcatcgtccgcgaattcaccgtactgctcgatccgctcggttatacgccgcgcatgcttccggccgcgcgcagcgggatcgagccgcagcggcaatcctcgacgccggtgcctgcgccgcgtagtgccgcggtcgtcgtagacccggcactgctggagccgggcgacgaatacctggctcgccccaacgacaacctctgggccatcagcggacgcctgcgtggtgccggcaacgccgatcgcgcgcaactcatggaggccctgtaccagctcaatccgcaggccttcgtcaatgccgaccggcaccggctcaaggccggcgcgcgcctgcgcctgccggccggctaccagccggagcgaggcgcgcccggcgccgtgaaggaggcggccgtggaagtcctgccgccagccgatgccgccgtggtggaaaacgctccggcggctctcgtcgaggcgcagcgccaggcggatgccgaggccgaggcgttggcccggcaacgggaggaactgagccagcggatggacgatctgcaacgccagttgcaggccttgcaggaacaactgcagcagcgcgatcgccaggtcgccgaactgcaacagcaactggcccggcgccaggcggtgcggcccgcggcgccgccgcctgccgcggccgcgccttcggttgcgcaaccggttgaaacgccgacggactcgcagtactggcgctggatgatcgtcctgctgctggtcctcgctctgctcggcgtgttgctgttgcgtcgccgccgcgaagaggctcctgtcccggcggtcgaaccgaagcgccgggtcgccctgaacctgccgctgcggcgtgcgccgcgccccccggcggccgcaccggcgccggcaaaggtcgaggaacaggccaggccgccggtcgccgctccctccagcccgccgccgtctcctccgcctgctccggccgccgctccgcgcgccgccatggctgcggcggacaagctggacggcgccgacatctatatcgcctacggtcgctacggacaggcccgcgacctgctgcgtcaggtactcgccgagcagccgcagcgcctgagcgcgcggatgaagctgttgctggtgctggctgagctgggcgatgcggccggcttcgacgcgctggccgaggaaaccctggccagtggcggcaacccggaggccatcgacgagttgcgcggacgctacccggcgctgctacagatgccggcgaccgagacgccggcggcaacaaccaaggacgacgactggagcgacctgccgctggccgagccgcccgttttgcagcaaccggatgcgacctcgggcgccgacggcttcggcgacctcaacctcgatctcgatctcgactggggcgccctggagaatcccctggacaaccccgacctgccgcgccgcgccgctgccggcaaggcggaaccggcggaggaggagcccctggcgttcgagagcaatctccatgaactgccggatgtcgccgagtacgaacacctcgaactcgaccagccagagccggccacggtgccgccggaggaggcctcggccagcctggaccgggcccgcgcctgcatcgacagcggcgatctcgaccaggccagccgcatcctgcgcctggtggtggcgcacggcgacccgtggcagaaggccgaggcgcgcgagttgctggcgctgatcgcctga

SEQ ID NO: 340959 - DNA, 873 bp, Pseudomonas aeruginosa
atgttaaatctttttgcattgactagcaatcctgcgaagcgtatagcacgcttttctctttcaaacattgttcagcgtgagttgactagttatataaagattcaggaagcggcttttgaggatgcagaggaagaggttgagtttgatggaaagtataagccggatataggagaagtgttgtttgtcgatggatatgatgatatcgatgatttgcaatctgcaattcttgctccattaggggtagaggaggtcgatcccactgaagagttttttggcgaaataaagtctctttttaccgggtacgcgcagccaaacggcgttgttaagattcttttgcagaatttcgatagacgcaaagtgatatcaacaaatgggctttcgatatttcattccactaatgtatataaaaaaatcgaagggataggtctaacggttgatcataaactttcggctattttggaggggggtaaattaaagttttttagttttcatgctgctcgtcagatttttgatctaagtgagtattataaagtcgcgactgatgaggatgtaagagatttctcgcagcaagctaatgtgcaggttggcgatattgcgcgtatgttagaaatatctgattcttgggtgaggagaaagatatctcttatacagcaaagtggaattttgcagagtgttccaattaatgatatgaaggcagttgcgttagagtttaatataccgctcgttacattggcgagtaatggtacggaagttattgttgttccggataataagccggatttgaagaagcttctaaggttcttggatgaggactattataagtctcctctttccaatacgagctttgttaccaactcaaagcgagcgatatga

SEQ ID NO: 340960 - DNA, 897 bp, Pseudomonas aeruginosa
atgactttattgacactcttgaaccttagcgagttccctgagctaagtacaaaagaactaatctcttacatcccattccttaaaaaaagagcctctccagaaagtctaaaaaaagcattagacttctcaaagaaaaacatagatgaagctctcaaaagggggcacaccatagtttctatatttgacaaaaaataccccaacagtttaaagagaattcctgatgcaccaccaattcttttctgcgcaggcgacatatcgttcctgcaagataagtgtctcgcagtaattggaacacgagaacctaccgaacacggaaaattaattacaaaaaaaattacaagctggtttacagaaaacaactggaacatagttagtgggcttgctctaggcatagactcactagcccatgaagtgtgtttaaactccacagcaaaaacagcagctgtgttagcccacggattagagaaaatatatccagcaacaaatagaaagctggcagaaagtataatcgagaaaaatggagcgcttatatcagagtacccttatttctctgccacttttaaggcaaatttcgtacaaagagaccggatccaggcggctctatccgctgctgtaatattaattcaatcagatgtaacagggggaagccttcacgcatcaaaatcagcacttaaatacggtagatatctagttgttgccgggcagtcagaaacagacataaaaaacagtgaacccaaaataaaaggcaatatgaagctgctatatggaaacacacatgaagtctatgaaatatttaaagacaaattaatcgacacagctagaatcctgaagcttttcaccaaggaaaactatcaagaaattgaagatgaaataaataagaacagctggtggaactaa

SEQ ID NO: 340961 - DNA, 1437 bp, Pseudomonas aeruginosa
atgataaaagtagcactatttgatctagacaatactcttgcccataccgaaagcctcgaagaaattcgcaacctagggcaatatgagaaactaacccctgaaagactaaataagattagaccctaccctaagaccataaatctcataaaaaaactacatgaaaaaggagttaaaataggagtagtcacaaatgctggaagaaactacgcaattccagttttaaaacatttagacatcccccacattgatgttactgtaacatattcagatgtaggggcagcaggtatgaagccctcccctaatggtatactactagcgctagaaaaattaggcatcgagcctagccaagatgtcatctatattggtgacgactatgtagacatagtcgcagcttatagagcaggcgttaaaccagttattccttcatggggcccaagaaagccagtatcacaaatgccggcagttgtactaagcactgaatatcttttagacgaaatagatgacacagaacaattgcagtttgtagcagataggtcagcggaaaaccagagctttaacttccctcgaaaaaggctttactttgccccgctagatcttgccaccaacgtagtcacactaagggaagatttaaaaattatttgccttggtagatactacagccaaaaaagccctataacagcaagacttcacgatcagcaccaactctcaaaggatattttcgaaaaggagttagatcaaaacttcaaggctccagaatactgggtagacttgctagcccactgcattgaaaacattcccagctatatactacaaaacgggaatacatttgacattttcaccataatcccctcaaaaaaagaaaaaaataaacgactagaaaacctattacaaaggaccagaaaaaaaagtcagagcccttcgctattccttgaagatgtctttgagttttcagcgggagcccctagcctcaagacactatctagagatggtcgcctagcggcggtaacgcagagcctacacctcacgcacaactacgatttgcgaggtaaaaccgtcttactcttcgatgatgttatgactacaggctctacttttacgcgtgcatttgagctattaaatgaagcaggcgcaaaacttatcgtaggcctcattctagccaaaaatgtcagtatcgcagaagaagacaaagactgccccaactgcggacgagcaatgcgtatccaaaagaacaaaacaacaaacgaacgtttttggggatgcactggctaccacgacaagcaatcaaaatgcacctatgcagaacctctagaaattaagaagtgcccaaaatgtggacgttccatgcatatgaaaacaaatcgctacaaccagcagaaattcatagcctgctcaggctataatcaaagccccaagtgcaactattctgagaatgtataa

SEQ ID NO: 340962 - DNA, 957 bp, Pseudomonas aeruginosa
atgcacgaatctcacccttccctgacgccccgactcggcatcagcgcctgcctgctcggcgaaccggtgcgcttcaacggcggccacaagcgatccgcgctttgcgaggaactggcgcgacacgtcgagttcgtctccttctgcccggaacaggccatcggcctgggcacgccgcgcccggcgattcgcctggaaggcactccggaagccgccgaggcgcggagccgcgacggcctggcggtcggcggagcgctcgccgaatatgcgcggagggtggcgcaacgggcggatacgctggacggtttcatcttcatgcaacgctcgccgtcctgcgggctgcaacgggtcaaggtctatccagaaggcggcggcgcgccgcgcgccgaaggccgtggacgcttcgccgcagccctttgcgaagccttgccggagctaccggtggaagaagaaggccggctgcacgatccggtcctgcgggagaacttcctcacccgcgtgtatgcccatgcccactggcaggccctgcgccagcgcggcctcagccattcggccatcgtcgccttccatagccgctacaagtaccagttgctggcccattcgccggagcactaccgcagcctcggccgcctgctcggcgaagccggccactaccagccggaagccctcggcactcgctacttcggcgagctgatgcagggcttgcgccgctgcgcgacccgcggcagccatggcaacgtgttgctgcacctgagcggctacctgaaacgcgacctcgcaaccgaagacaggcgtgaattgcgcgagctgatcgagcaataccggcatggcagcgtgccgctggtggtaccgctgaccctgctaaagcaccacttccgtcgccacccgcatgcatacatcgcccagcaggcctacctgcaaccgcacccgaccgaactcggcctgcgcaacgcgctctag

SEQ ID NO: 340963 - DNA, 441 bp, Pseudomonas aeruginosa
atggagccgacctgggcggtggcgctgggcttccgcgaggtactcgacaccccggtgcagggctgcttcgtgcacgacagtccgatcgcctggctggcctgcaatcgcagcaagccggggcgcgacaccaccctcgacacctgggtgctgcacgccaccagccagtggagccggcagcacatcgacatggccaaggaggacgtggtcgagcacctgcgctgcgccttcgccgaagtgatcggctgcgccgtaccggaagccgccttcagcatcgcccaccgctggctctatgcacgcccggcggaggcccaccagtggggcgccctcggcgatcccgacctgggcatctacgcctgcggcgactggtgctccagcggccgcgtcgaaggcgcctggctcagcggccaggaagccgcgcggcgcctgctggaacatctctga

SEQ ID NO: 340964 - DNA, 414 bp, Pseudomonas aeruginosa
atgagcgtccccatcgccatcatcggtactggcatcgccgggctttccgccgcccacgcattgagatccgccggccagaccgtacaactgttcgacaagggccacggcagcggcggccgcatggccagcaagcgcagcgaggccggcacgctggacctcggcgcgcaatacttcaccgcccgcgaccggcgcttcctcgacgccttgcaacactggcgcgaggaaggctgggtggacgagtggaaacccgctctctaccaataccgcgacggccagctgagcccctccccggacgagcagccacgctgggtcggcatcccacggatgagtgcgatcacccgcgccctgctcaccgatctgcaagtggtcttctcctgccgcatcaccgaggtcttccgcggcaagcagcactga

SEQ ID NO: 340965 - DNA, 1656 bp, Pseudomonas aeruginosa
atgaccagcttgcatgccgatgaggccttcctgggccactaccaattcagtcacgacccgttcgcgccgcgcgttccgggtttcaagttcttcccggcgcagcgcaagccggtgctcggccagttgcaccatctggcccgctacagccagctcctgctgctggtcaccgggcccctgggcagcggcaagaccctgctgcgccaggcgctggtggccagcaccaacaaggatgcggtcctcagcgtggtgatctcggcgcgcaccgccgccgacgagacttcgttgctgcgccaggtggcgcagggcctgagcatcaaccaggcgagcctggaggcgatcctgaccaaggtggcgcagctggcgatcaccgggcaggacgtctacctgatggtggacgatgccgagcagctccaggacagcgcgctggaagtgctgttgctgctggcttccggcaccaacgagggacgcctgcatgtattcctgttcggtgagccgtcgttgctgccgcgcctggaggtgttttccgagggtgaggagcgcttccatgccatcgaattgcagccatacagcgaagaggaaacccgcgactacctggcccagcgtctcgagggcgccgggcagggcatcgagctgatttccaacgacctgctggtggacatccacgagcagtcggaaggctggccgggagcgatcaaccaggtcgcccgcgatgccctgatcgaagcgatgctggccaatcgtggcgcagcgcgcaaggcaaccggagggtctttcaacttgcccaagaagcatctggtgattcttgcggtcgtggccatcggcgtgatcgccgcctggttcatgcaaggcaagagcaagccggaggcgccgcagaccgcctctaccgaattgtccatgaatggtggtacgccggcccaggcccagcagccgggcagcggcccggccgtggagttcaacggctccagccagccgttgccgctaccgttggtcggcgagtcgcagccggtcattcgcgagccgctggcccaggccgccgggcaaggtggcgacgacgaaggcggcctgccgtccgccgcggtgccgcctaccgtttccagctcggctcctccggtgacgccgctggccaacaacggcgtcacgccgatgcatccggtgccgccggcgccgaccgaaccgaccgcgcctgcggcgaccccgactccggcgcagaccccggcaccggccgcgccggtcgccagcgccccggccagcaagccggccccggcccccgctccggccaagccggcggcgagcaagccggccaccaccgccgcggcgaagccggccccggctccggccgccaagccggccagcggtggcggtgcgggaagtcagtggtatcgcaaccagtctggtggtaacttcgccctgcagatcctcggtaccggctccgaagccaatgcccaggcgttcattcgccagcagggcggcggcgatttccgctacttcaagaaaaccctgcaaggcaagccgttctacgtcgtcacctatggcagcttcccgaaccgtgccgccgccctggccgcagtgaaaaaactgccgtccaaggtgcaggccggcaagccgtggccgcgtaccttcgccagcatccagcaggagatcggccaggcgcattga

SEQ ID NO: 340966 - DNA, 864 bp, Pseudomonas aeruginosa
gtgcgggcgaagctgggcctgtcggagcggcgggcctgccgggcactgggcttgtcacgcagcgtgttgcactaccagccgcgcatggcgaacgcgccgttgcaggccaggctcgttgcgttggcgggcgaacgtcgccggttcggctaccgacggctgcacatcctgctggaacgggagggctggatcgccaaccacaagcgaatctaccggctgtaccgcaacgctggcctggcggtgcgcaagcgccgcaagcgcgatcgcgtggccgtcgagcgccgtccgctgcagctgccgtcggggcccaaccacacctggtcgatggacttcgtcttcgacgccctggccaacgggcgcccgatcaagtgcctgacggtggtggacgattgcaccaaggaagcggtggaaatcgccgtcggccggaggataaatggccagaacgtggccgacatcctggatgcggtatgccgtttccgcggctaccccgcggcgatcaggaccgaccagggacccgagtttaccggccgggcgctggaccagtgggcgaccgccaacggcgtgacgcttgtgctgacccagccagggaaacccacgcagaacgcctatgtggagagcttcaacggcaagttccgggacgaatgcttgaacgaaaactggtttatctcgctcgagcacgcacgggcggtaatcgccatctggcgcaaggactacaacgaggtgcgtccgcacagctcactgcccaaatgcacgcctgccgagttcgccgccgcgctgcgcaacgaaggtgccttgactggttcgaccgctgatcgaaacctgacccaccggagcggtatgctccccaacctggactctactaagtag

SEQ ID NO: 340967 - DNA, 264 bp, Pseudomonas aeruginosa
atgaagaagcgatacaccgaagagcagatcatcggcttcctgaagcaggcggccgccggcacgccggtcaaggagctttgccgcaagcacggcttcagtgacgcgtcgttctacctgtggcggcgcaagttcggcggcatggatgtgcccgacgccaagcgcctgaaggcactggaagcggagaacgcgcggctcaaaaagctgttggccgagtcgatgttggacaacgaagcgctgaggatcgtggcgcggggaaaatactga

SEQ ID NO: 340968 - DNA, 339 bp, Pseudomonas aeruginosa
atgcgatgcgtccttgccctgtcgatttcggtgcttgccgcgctgctggccgcttgcagcgagcagccggccgacaacctcgccgatgccctggccgccgatccggtgcggctcaaggcattgcgtgcgcaatgcgcggccgaccggcagaccgtgggcgaggacgcttgccgcgccgccgccgaagccttccggcggcgcttcttcgccggccataccggcccggatgaataccagacgctggccgagttgccgccgatcccaccgagcttcgatgaacccgacgacgacgacgacagcgcggcggcggccgtgcccgattcagaggacgcgccatga

SEQ ID NO: 340969 - DNA, 273 bp, Pseudomonas aeruginosa
atgagtgccccggacactttcgcggccggctttgaggtgccgctgcatcgctcgctgaccgagccgatcctgctgggcggggcaccgcgcaccgtggcgattgccaacggcacgctggccgccgccgtcgggctgggcctgcaactgtggattcccggtgtggtgctctgggtcgccggtcattcgctggcggtctggggtgcgcgtgtcgatccgcagttcatgcaggtcttcgcgcggcacatcaagcacaagccgttgctggacgtgtga

SEQ ID NO: 340970 - DNA, 465 bp, Pseudomonas aeruginosa
atgagccactaccgcctcaacctgttcatccagccggagcacgccaagcgcctcgacgagctggccgccaagaaaggcgtgtccaaatcgtccatcgtcgcggctgcgctcgcatcgtggctgtcgcccgatgcggccgaccagcgcgaggcggccatcgccaagcggttggatcgcctatcgcgccaggcggagcgcctagagcgcgaccagaacatccagatcgaaacgctggcgctgttcatccgctattacctcacggtcagcacgccggtgcccgaagcccatcaggaagccgcccgcgcgcatggcaaggcgcggttcgagcaattcgtggagcagcttggccgccacttgctgcgcgggcgcagcctggtgcgtgacgtggtggaggaactgcatcccgacccgatgcggatggacgacgcggcggcagtcgccgaagcgcgggagcgtgccttatga

SEQ ID NO: 340971 - DNA, 249 bp, Pseudomonas aeruginosa
atgaagattcgtccgttattgattgcagccctggctagcgcatcgctcgcttcgccgctcgtgatggcccattccggcgcgcatgacgacgatgaaaaggccatgccgaagacatgcgagcagttggccgatacgaagcggtatatcagcgacgtagcttaccccgaagtgaagaagctgaaagagcagtgcgacgcctccgcgaagaggcagccggctgcaacgccgtctcctacaccccgtcgttag

SEQ ID NO: 340972 - DNA, 792 bp, Pseudomonas aeruginosa
atggtcgatcgcagcgccgagcattggtatccgactgccgcgtatctgtacgtgctgcatctggacgaccttgcgctcgcctgggaatacctgcgcaggaatcccgactaccggctcgactggctgcgttgtcatcgccgaccacaggcggcacaacaggcagcgcatcgctggggcctgcgcctgctggaagacccggcgctggatgcgcgcgaagcgcatccggcctggctgcccggccacactgccgtggtgcagctttacccggacgaagacccgccatccgatgccgtggtcttcgcgttctggcgtattccgggccacaagcaattgatccatgacggcaagcgcctggtgctggcggcccgctggcccgggcgcagcctgcgcttcgcgctcgcccccggcctggaggacggcatggctgtcgcctatgccatgcgggccagcgccacaacatccccgcgcggtctcgctttcggcatggcgttggctgcgcagactgcgcccgcttccgtcgcgctgcccaggccgacgccggccgcgctgctggaactgcacaccttgcagacgctcgacgccgccctggcgggtgcgtccttgcgcgaggtggccacgggtttgttcggcgtggatgccgcggccgattggtacgccgatggcggcctgcgctcgaaggtgcgccgcttggcgcggcgtggcgatgcgttgatgcgcggcggatatcggcaactagcacaactcccgccgcttgagaagggtcgttttgaaggcgacgcaaaacgaccctga

SEQ ID NO: 340973 - DNA, 972 bp, Pseudomonas aeruginosa
atgaccacgactagccctcaaacatcgggccacgatcatttcttcctcggcggcgaccaccaacgcaatgagcgcaaggtgtggctggtgatcgcgcttaccgccagcatgatgctggtggagatcactgcgggcaccgtctatggctcgatggcgctggtggccgatggctggcatatgtccacccatgccggtgcaatgctgatcgccgcgctggcctaccgcttcgcgcgccgccacgtgggcaatccgcgcttcaccttcggcacgggcaagctcggcgatctggccggttttgccagcgcggtgctgctggccctgattgccttgttgatcggctgggagagcatggttcgcctgacccaaccaatccatatcgacttcgagcaggcgattgcggttgccatcatgggattgatcgtcaatctggtctgcgcctggctgttgaaggacgaccattcccattccggtcatcaccaccatcacggtcacgatcatcacgaccacgaccatcacgacgagcaccatgaaccaggcaagggccgcgacaacaatctgcgcgcagcatatctgcatgtgatggccgatgccctgacatccgtgctggccatcgtcgcgctgctgctggggggtagctatggctggacgtgggccgatcccgttatgggcgcagtcggcgcgctggtgattgcgcgatggtcatggggcctgatccgggacaccggcagcgtgttgcttgatgccgctgccgaaggcgaggaagtccgggaggagatccgggaggcgatcgcgcccacgggcagcgaggtcacggatcttcatgtgtggcaggtcggccccggccatttcgcggcgatcgtttcgctgatagcccaggaaccccgagaacctgcgcattacaaggcgctactcgcccatatccacgaattggtacacgtcaccgtcgaggtggaacgtggggcggccgcatga

SEQ ID NO: 340974 - DNA, 273 bp, Pseudomonas aeruginosa
atgtcccacaccacacgccagaaagacaagctgatcgcccgtgttcgccgcctcaagggacagttggaaggcatcgaacgcgcgctggaggccgaggccgcctgtgtcgaggtgctgcgccagatcgcatccgtgcgtggcgcggtgaacggattgacggccgaggtgatggaagaccacctccgcgagcacgtcctggccgttccgaccgacaaggagcggcatcagggcggcgaagaaatgatcgaggtcatccgggcctacatgaaataa

SEQ ID NO: 340975 - DNA, 2055 bp, Pseudomonas aeruginosa
atgaacgccatgattcaaaccgaagcccgcgccgtcaacaccgccgccgctgtgccgctggaagtcgccgacccgaccaagaacctgattctggttccgctgtcgcggctggtgctgcgccccacgggccgtaacgtgcgcaagaccccgcgcatgtccatccctgaactggccgcgagcatccagcgcgtgggcctgctgcaaaacctgatcgtgattgcatccgccgatggcgagcattacgaagtcgtcgccggtggccgtcgcctcgccgcgttgaagctgctggcgaagaagcgccgcatcagcaaggaatgggaggtgccttgcctgttggtggctgatggcaccgcccgcaccgccagcctcaccgagaacgtgcagcgcgaagccatgcacccggcagaccagtttgaagcgttcgcggcgctggtggccgaaggccgacccatcgaggatattgcggcggatttttccgtcacgccgctggtggtgcagcgccgcttgaagctggcgaacgtctcgccacgcctgatggcggactaccgggccgatgccgtgagccttgaccagttgatggccctggccatcatcgacgaccacgccgcgcaggaagccgcgttctacgatgcgccccaatggcagcgccaaccttccgcgctgcgcgaacgcctgaccgagcgggaaatcgacgcctaccggcatccgctggtgcgcttcgtcgggctggacacctacgaggccgcaggcggtggcgtgcgccgcgacctgttcgcggaaggcgatgcgggcgtgtatctgaccgatgccgcgctgctggagcggctggcgcaagacaggctggcggacattgccgccactgtccgcgccgagggctgggcatgggtggatgccacgccgggcgtgacccatgccgacctgcacgccttccagcgtgccccgagggagcggcgcgaaccgaccaagcgcgaagcgcagcgcattgggaagctgcaagccaagctgcgcgaactggccgaagccgtggatgccgcgctggacgccgaggacgaggacaaggccgacgcgctgcaagaggaaggcgaagccctgggcgagcagttgcaggcgctggaagatggcttgcaggactacagcccgaacgtgaaggccgcagccggtgccatcgtcaccatcgaccgcaacggcgaggccgtgattcatcgcgggctgatgcgcgaggccgaggccaaggcgctgcgcacgctggaaaggttgcggcagggtttcggcggcgaggataccgggaacgacgatgaaggcgaggatgccgacgacgcgcccaaggccgcagccatgtccgaccggctggcgcagcgcttgagcgtccatcgcacggcggcgctgcagatcgaggtggcacggcatccgcaggtcgcgctggccgcgctggtgcatggaatggtgcagaaggtcttgcaggctagccactacgggaatgacttgccgctgggcgtgcgcctgacggtgcaagaccggctggaaggcatggccccggactggccggaatcgcctgccgccgtggcgctgcgcgagttgcaacaggtggcgggcgaagccttgccggaggacagcgccgaactgttcgccgcgctgctggcgaagccgcaagatgaactggtgcggctgctggccgtgtgcgtggcttctacggtggacgtagtgacgcctcgcgccacacagcaccagcccggcgaggaactggcgcgggccgtgggcctcgatatggccgcatggtggcggccgaccaccgaaggctacttcaagcacgtttccaaggccgcgatcctgcgagccgtgggtgagtacgcgccggagcacgtcacgcggctggcgaagctcaagaaggccgacattgccagcgaagcggagcggctagcggatggcgcgggctggatgcctgccatcttcaaggccgaaggcccggaagctgccccggaggaaacgcaggagcaggacgccccggagggtgccgaggcaatggcggatgaacccgccgaggcgctggccgcttga

SEQ ID NO: 340976 - DNA, 687 bp, Pseudomonas aeruginosa
atgaagatgatgcagattgatgaactgcgtgcaggagatgttctgctttgctacaaagacgaaaaattcgacatcgttggcaaaggcattacccacgtcacgggaagcgaatacactcatgcggcaatttgcattgactcttgcactgctgccgagtcaagaactggcagcggcgtcgctaagataaaaatagaagacctgattaaacgctacgatcatgtcgcagtgtttcgtcaacctgatgcgtggctacatttcgagcgtgttcaagctatgaacgcttttatagaatccattgcggcatcgggagcgaaatataacctgcgcgatgtgatgactttcaagaaaaggagtgaggttcaccagctatctcttactgaccagctcaatgcgtttttcaatggaacttacgctccagcaccaatcgagaaaggtagttatttctgctctgagcttgtcgcaagttgctttgtcgtcaccggcttcatagaccctagcgcggccgtcgtttacaaatcagatgtcacttcgcctggcgcattgggtagagatcccactttcggaacatttttcgggtatgtttcgaccgtgccaaattactccgttccagctacagatgagtttattaaccactcaacatttggtgagatattcggcacaaaaacggggttcggcgtcagtagttga

SEQ ID NO: 340977 - DNA, 717 bp, Pseudomonas aeruginosa
atgcgttccctgtccctccttctcctcctctcgctggcgtcccacctgcgaggccgctgcggtattccgctgcgaagacgccagcggccatgtcagcttcacccaactcggttgccccgccgggcaggccggcgagaccgtcgtggcggacaacccgccgccgggaggcaggagcgtcacgccgagggccgagacgaagacgaaaaaggcgtccatcggccggaaaagcgtgccgctcgcggtgatcggagaaagagaagatcgctgcggaagacgcctggacgagaaggaacgccgcaaggcgatcgtggagcagcgaataatgacgggaatgacccgctccgatgtggagcgggcgctgggcaagccggaccgggtcagcgggaacaatgcggaggtgcgttatcagtacaaggccgacaagcgacggggagcgagaagcgtgagcttcgatcaggagggatgcgtgaagggaaagggaaggtaccgggtggagcgagtcgatcccgggagctaaggccgggccgacctcataccgatgaaagcaggaccggcatcgcctttagcgtgccgggcagggtgtcgccctgcccgcatggaaaagacggacgacagtcttcagcagcctaccgcctacccgccgcgcacgcctctggctggcggttatggtcaggctcaatcctctttctgcggttcgccgggcaacaacgcgcgtga

SEQ ID NO: 340978 - DNA, 1461 bp, Pseudomonas aeruginosa
ttggaccgccgtcgcggcctgaccgatggcgttgccggtaccaccgcgtgcaaccggcagtatcccggtgccgatctgccccacatccagggacgggatatccgcagccgtcaatgccgcgccgcccgtgaccaggcctttggcgttgacgctcactttcgggtacgtgccagcggttacgccggagtccgccagtgtgatggccagggcagtgtctgcgctgccgtcgaatgtgccagaacctgtcgccgcgccgctgatggagatgcgccgaggggtggccagctgggcggccttgcccaccaccgtggcgccactgacgatggcgtcgagggcgccctgcaggatcgaacgcacggcctggaccatcttggtggtggccagcacctggctgttgttgttggtcgggtcgtcgctgatggcgttgggcaggttgcccagacccacatccccctttgtcgttgcctgggcgcgcaggttgggataggtaccgacgcgggcggccaggtagcgcaccaggtcgccggcgatgggctcgacagcgcgccggtcggtgacggcaccattggcggccaggtcagcaagcggcaccaggtaatgcagagcgccggcgctgtcggtgaagtcctgcagggcggcgccccaggcgatggaccaggatgccaccacgtcggactggtcacgctgcaggcgcacgtccagccaggcggtggtcggcagcgccggcgccgccacggacacgtccgccgtgacgttgacgcggatcccttcgacgtaggccagtccggctttcagccgatagttcgtggccgctttctcaagcagcagaccggtgttgaagaaggtcgcccgcccgaagatatccaggttgctccggcgttcgcgttcgtcgatcccggccaggcgcacggtgaaatcgtgctgccaggtgctggcatcgatcgttatcccggtcagttcctgggcgccgtcgaacgccaccagaaagttgcgcgtcacgttgttgccgatctgcagcggcggtctgttcttgcgcttctgctggaccggcacataggcgaccgccagcaggaccttttccgctgtctccaagccgatccagttccagtcgaagtcgcccacgtccgaacccatcatcaggctgtaaaccacctggttggggttgacgtagccggcctgggtaacgggtgcggtgtggacgatctgctgcgcgggcggcaggaccgcgtcgcggtccacagggctggtgggatccagcccagggaccagggcgagcacgaagcggctgacctccagaatcttcttttcgcccagcttctgggcaatcaagcgttcgccggcggcggtaatgcgtgccatgtgttcggctcctacagggtcgcgaccagggtctgttggtcgtcgttgaaatcgacggcgacgacgtgcagcgtcaccggtgtgatggtctggaagtcgtag

SEQ ID NO: 340979 - DNA, 1503 bp, Pseudomonas aeruginosa
gtgcttgaaaataagctctcaacagagttcagttggttcctcgcattacacagcgaaaaatcacttggcctgaatgggaagccagtatcaataccaagtcatgaactccgcaccaaaagctactcgatcgagaaagaaaacttcgaggtcaagataatacgctggaatcagaaacccggcggtgaaaagtcatacaactacctgctcaactcagagaacaagatagtccacaagcagcatagtaaatttaacaagaaaagaaatttctaccctagcatctacataacttcatcttgggccgatacatttgaagatcgaccgcaagacctagtatcagcaagccacaacaataccagctctccaatctggcgaaagcttttaactgaagtgattaaattcaccagggagatatatcatgacttcctgcgacaacaagcagagaagcagattgtttcttttgaagaaaacggcatattccccgactacaaaaacgaaaaccccgaatatgcgaagtggcggctaagcttcctcaaaacagtaataaaagatatctacattgcagacccctctgtatttagcagcctgagccctaagcaaagtaaaattatagtaaggcttctcgataaaattttagtctctaaccaaaacgatagccttctggatgtgctcgacaacattatcgagcttgaccaagattcactcaacactctttcaaatcaacttcagaagaccaagctagagcacataataagcacaatcgacattcttcaaaaacgagagctcgcaatatctcaattaaaagaactaatggagattcattataaggacgtaacagaaacgccagacctccaaggcattatagaaaacaatacttggctatttggaccagcctacgagattctgggggcagaggaagactcgttcactaaggttgcagaagagcttcggcagagaataaatggaattgatgatattgccgttgaagatttggcacccggagcgcctatcgaaggcgcacagcgccaagtagatttacttcttgcccgtaaatcaccacatgtagatgaccaaggccgcaagtacttcaagtgcacaatcatagagataaagcgcccgggaattgctcttaatcataagcacctccagcaacttgacgaatatgctgcaattatcagcaactacccagcctttacgagtgcacttacaaggtttgagctgatattgataggtcgcaatatctcatccaaagactatgcgattaaaagcagaatccaaggaatgcagatgcatggagagccaggtctagttacaaacgacggaaaaataaaagcctacgttaaaaattggttcacgatctttgatgaattcgagctaaataatgaatatttgctcagcaatcttaaaacccaacgcgacaatctcaagttagcaacagcacaggaactagtcgctgacttgcaaggtgcacctttagaagcacctgcagagggtgcagaggcttaa

SEQ ID NO: 340980 - DNA, 261 bp, Pseudomonas aeruginosa; identical to SEQ ID NO: 324728

SEQ ID NO: 340981 - DNA, 681 bp, Pseudomonas aeruginosa
atgggaccaccgaaaaaaggggggattacgattgattcaccgactaggccagctgagacacaacgaaatgaccgttgcgcagaacatcaggaaagccagagaggccaagggtttcacacaagaagaagccgctgcccgatgtggcatttcgctatcaatgctgaagaagtacgagagcggggcgaaccttcccacggcggacaaaattgcgaaccttgcaagcgggctaggcgtgtccgcagacgagataattttcgagacagatcaacgatctgtacccgcagaattggtcgccctcttcaaagaaataacccggctccccgagcaagatcaggccgagataaggcgtgccctgaaaggtcacttgatgatccttcaccagcagcacatgtaaccccggaaagtctcaccatgagacaaaagtccaccattagagatggtggacccggctgcgccgggatcgctcccggcccccctccgcaacacccacccatcaacaccaagggacgctgtcccttgtcatccctgcccttcgccagggggtcagagggcagggggagaaaagcttccccctaccctatgaccggaggctgtctttgtccgatgtggttcaagggttcgctccgcccgggactccgtttgtcaccgcaagcgctgacaagccggggtcgcggcccttga

SEQ ID NO: 340982 - DNA, 1233 bp, Pseudomonas aeruginosa; identical to SEQ ID NO: 325844

SEQ ID NO: 340983 - DNA, 345 bp, Pseudomonas aeruginosa; identical to SEQ ID NO: 325845

SEQ ID NO: 340984 - DNA, 231 bp, Pseudomonas aeruginosa
atgaaacaactgaaacaactgttctccctgggcaagcgtgaagccgttatcggtggctcgttgctgatgacgtccggcctctcgatggccgccgagggcgatatcgacaccactaaggccctggcctatatcgcgggcggtctggctgctgctgcggctgtgactggtgccatgttcggcctggtggccctgatcggtgcggccaagaaagcccagcgcgcagggacctga

SEQ ID NO: 340985 - DNA, 1443 bp, Pseudomonas aeruginosa
atgaggattaagaaatgtatatcagccctgaggatatcgctttttatggcgtgcttattgccctcgctattctttgctcagggcgctaggtctgaaaattattattggcaattaaatggcgcgacctcccctgagaagtttggcagccctggtgcggcttgtgagttcggactgggaatctataaggctcagtatcccgccgtcgaaatggtgataggttcgcgggaaatgaagaactcgaccaactatgtgtgcatggtgtttcgttatttcaatgggggtcgtattgagccaaattttacgatttccgttgttcgtagaggtacggcctgtcctgcgggggctacgtacaatgaacagaaggggacttgtgatgagccgccaccgtctgagtgtgaaaaaggtcagccaaatttatttagaagttcgaactatccgatcattgtcatcaatggaaaaaacacggttcctagctctccgccgtctggctgtttgaatgggtgcgcttatgaggctgatagttctcgaccaaattcttgttatcgcactccaggctctactactgagggattctgtaactacacactcaagagcaacggtcagaattgcgcgacagattccggcaacctgggcggtactggtccttcactcaacgaaccggatcagccgccagtcactgatccgccttcggacccgaacgacccgggctgtccgaaaggctatagctggtccggcactacgtgcgtgaagacgccgactgatcccactgatccgaccgacccgaaagaccctggtggtggcggtggaactggtggtggcgatggtggcgggactggtggcggtacaggcggtggcggtgatggcggaacgggcggcggcgatggcggcagcggcgggggagacaacggtggaactggcggcggtgatggcggcggcacgggtggcggtggcgatggcgggggagacgggcagtgcgatccggcaaaggacccgaacaaatgcggcagtggctcctcgatctccggtgacggtgactgcaaggttgcgattcagtgcaacggcgacgcaatccagtgcgccatcgttcgccaggaaaaggccgcccgctgcgcggatgaagagttccgtacggtcgatgacaagaagattcaggacctgaagaacacgctggccggtgagttctccgggcctgagtacgaacccatcaaggccgccggcgagaacacccatgacctgtcgaagctgctcgacactagcgggcgcttctccaaggcctgcccggttattcctgacgtctcgttcccctggttcggcagtactcagacggtgtcgctcagtagcgtgtcgtctgatctgtgcacgtacctccagtggttcgggtatctgctggtcgcgttcgccatgcgcgccgcggctgaaatcattgcgcgagggttgaactga

SEQ ID NO: 340986 - DNA, 312 bp, Pseudomonas aeruginosa
atgccgttactgatcggggtactactgcgggccatcggctggtcgctgatcccgctgggttggaagctgctgcgcggcttggggttcaccgctgttgctttcgttggcgtcaaggcggtgatggatcaggcaaaggactacgtgttcagcagtctcggtggcgtgcctgcgcagtggcttcaggtcctggggcttctgcaagttgacgtgtgcatcaacatcctgttctccgcgtacatcgctcgcgccgtgctgtggggtatggacaagtctggcggcaagtctggcatgcgctggaccgggccgaagtaa

SEQ ID NO: 340987 - DNA, 1281 bp, Pseudomonas aeruginosa
atgctctatctgcgcaccggcctgccaggcgctggcaagaccctgaacgcgattcgggaaatcgacattgaacaccagccggacccggacgacccgaccaagcggttgcacaaggacccggacaatccagacctgccgcccaggacgatctactactacggcatcccggatatgaaacttgaccggctcaagtcgaagtgggtcgagttcgatacgcccgaagagtggtacagcctgcctgatggctcggtgatcgtgattgacgaagcgcaacgggtgttcggcaatgatggctccagggcgcgcccggagaaagtcacgcgcttcgagacgcaccggcaccagggcctggacattcatctgattactcagcatcccagcctgctgtgcacgccagtgcgcaagttggtcggcaagcacatcaacttcattcggccctatggccgggagaaaggcatcttccggcatgagtacgagttctgcatcgacaacccggagcggcgcagcaacttcaagcaggcccaggaagagcgggtcacgctggataaggcgtatttcggtgtctacaagtcgtcgacggtgcacacgcacaagccgatcacgcccagctacatgaagaaaatcccgctgatcatcgcgctgatgctgattccgatcggcgtgcttgttgggcttgtcgtgaccgcgatgcgtcaggggaatgaggagaaagaagcggctcttgcgagaagccaagcgactgaagcgtcagcgggtgttctgcctggggctggaaatgctgttcaggcagcccccagggcctccagtgcgccgaaatcggctgacgaattcatcggtgatatgtcgcccagggtgcccgatctggtggtctcggcgccgcgctatgacgatctgaacaagcccagggatttccctcggccggtctgtgcggccagcgcggacccgaacttgatcggcaaggctcctgagcgtcggattccgctgggcacgtacaatggccgggtgatggtctgccagtgctacacgcaacaggtcacgcggatgcacacgacgttcgagttctgcatggacgtggtgaacaacggctatttcgacgacacgcggatgccgccgacctatgccagcggcaacagcacgcgaggcttgatcaccagtccgtcagttgacccggcgacggcgattgagcgagggcgcgcagcgacatcgccgacgccgggggatgcgttctcgacacgagtaaccatcgtgccggatagcagcaggatgcccaggacgctatga

SEQ ID NO: 340988 - DNA, 261 bp, Pseudomonas aeruginosa; identical to SEQ ID NO: 324728

SEQ ID NO: 340989 - DNA, 681 bp, Pseudomonas aeruginosa; identical to SEQ ID NO: 340981

SEQ ID NO: 340990 - DNA, 969 bp, Pseudomonas aeruginosa
gtgcgccgactgatcgaggcgccatatcgcgaactggccggcgtgatcgatccggcgaatctccagctcctggacgtgtccgcatcctacctcgctgcgctggccgaggcgccgacaagcttgtcgcagagctacaccttgaccgaccgcgtcggcagttctggcgcgttcgtggatcgcggaaccggcgactggtgcccgaccgggctactcgccgccgagctgccgctggcggccgggccgaacgaggtcacgctgaccaacgccacccggctggaggacgtcactgtcggccaggccgctgtggtggacgacgagatagtccgggtcgatgcggtcaactatgccagtggcaccgtcaccctggcgcgcggctgcgccgataccgttccggccaagcacttggccggggctcgggtctggttctacgacacgttcgaagcggtggacgagacggtctacagccagggcgtgacgcttcaggcccggctgctgaccaacaccagcgagggccagttggccccggcgctggccgctaccgacagcctgacgctgaccgggcgccaaggtaagctatacccgccaggccagtttcgcatcaacggcagcgcgtacccggccaaggtctacggggcgctgtcggtgagctgggcgaagcgcgaccggatcggccaggccgaccagttgatcgataccacggtcggcaacatcgggcccgaagatggggcgacggtgacgctccaggtctacagcggcacgacgctaaagcgcacctatgccggcctcacatccagtaactggtcctatccggtggccgaagacgtcgctgacggcccgctccaggacgtgcgcctggtcctgcgcagcgtccgcgacggcatccaatcctggcagcaacacgacatcaccatcgaacgacacggcctgggcttccgcctcggcgaggaactaggaggcgtttccgcatga

SEQ ID NO: 340991 - DNA, 282 bp, Pseudomonas aeruginosa
atgaaacgagttctactgaaaggcgagttcttcgcggaatgggatggcacgctggacgaggccgccgcactcgctggcgtcccggtcggcgacctggcgttccatcccgacgacctccttgccgaagtccaggagttacgccgccaggcctatcgcgcggagtccgacccgctgcgcctggaggccgagtttgacgccatcgccgctggcaccgagccggacctggcggcatgggtcgcagccgtccaggcgatcaaagagcgctatccactacctgaatag

SEQ ID NO: 340992 - DNA, 225 bp, Pseudomonas aeruginosa
atggacgaggtattgaggcaaaggttgcgggctgaactactggaagtgggttttctcaaccagtgctgccttgatctcatggaaagcatggaggctgagttcagcctcactaaggaccagcgcgagtgcatcgagcagctcagccgattcctgcgggagggcatcggcaagctgacagctctgtctgagcgggtggccgatggcgacatagtcgtcctgtgctga

SEQ ID NO: 340993 - DNA, 837 bp, Pseudomonas aeruginosa
atgccggtttcgttacccttcgagcaagtcgatgtcttctccgaacagcccttcaaaggcaacgccgttgccgtggtgattggcgccgaccgcctgagcagccagcagatgctcgagttcgccgcctggacccagttgagcgagacgaccttcctgctgcggccgaccgttgccgaagccgactatcgcgtgaggatcttcaccccgttgcgggagttgccctttgccgggcatccgacgctggggagctgccaggtctggctgaaccaggggggcggcaatgctgctgacgagatcgtccaggagtgtctggcgggcctgatccgcatccgccgcaagggcgccttgctgtcgttcgcggcgcctcccctgcttcgtggcggagcggtcgaagacgaggtgttgcgacggatcgagagcgggcttggcctgtccccggggcaggtactcggcagccaatgggtggacaacggacccggctgggtcgccgttcggctggccacgcgtgacgaggtcctggccatccgcccggactacgcgaagctcgacgggctcaacgtgggcgtggtcgcgccttggcaaggtccccaggcggaggcggatgtggaagtgcgcgccttcatgggcgaggaactcaatgaagaccccgttaccggcagcctcaacgcgagcctggcgcaatggctgatcggcacgggagtcatgcccgggcgctacacggcgagccagggcacggccttgggtcgccgggggcggataagcgtcgagcagatcggcggcgatatctggatcggcggtgaggtgcagccgggcatgtcggggcaggtcgtgttctga

SEQ ID NO: 340994 - DNA, 144 bp, Pseudomonas aeruginosa; identical to SEQ ID NO: 326700

SEQ ID NO: 340995 - DNA, 507 bp, Pseudomonas aeruginosa
atggggcgcaaggtagaacgtaaggccaagcccggccccgctgctgcgcaaggagcggatgatctgcagatactgcaccccgaacgcgagatcgaggtcgccggccgcaagctgaccgtgcgcgagtacggattcgtcgaagggctgcggctacgccccatgatccagccgttgctcgatgacctgtatgccatcagtcaaggggctgtgcttcccgacctagagcagatcctggtggtgctcggccagcactcggatctcatcccgcacctgatggcagtggcggccgacgtcgacgaagaatgggtgaaaggtttgccgcaccgggatggaaacttcctgctgtacgtctggtggctggtgaacggccctttctttatcggggcggtggtggaccgaattcaaaccgaacgggcagccgaagaggccaggaaggccgttgggcagacatctatgcttgcctcatcgccggaggatacggaaccccaggcaccatcggtcgaatga

SEQ ID NO: 340996 - DNA, 240 bp, Pseudomonas aeruginosa
atggacccgatcacaatcaatctcgtcatcctggcggcgtcgttcatcctatccaaggtcttggcaccgaagccgcagaagcccaagccgaccgcctttgaagacatcgatttcccgcgctgtgacgagggcgacgaacaggtcgccgtcttcggtcagtgctggtcgaagagctggatggtgctgaccgtgggcaactaccgaacgaaggcgatcaagaccaaagggagcaagaaatga

SEQ ID NO: 340997 - DNA, 612 bp, Pseudomonas aeruginosa
atggtcgtccttagcctcctgcgcaccagcacgttctggctcgtgctgagcgcagtgctgtgcggcgcagccgtggtaatccacggctccgcaagctacgaccgtgggtacgccaccggccgcgccgagggtgacgctgcgctgctcaacctgcagctgcggcacaccaacgaacgcgcccaggcccttcaggacagcctggtccagtacaagcagcaggtcgcgcgcgccaaccaggccgaggaacaactgctgcaagtacagcagcaactgaccgacacccgacaccaactccaggagcgaatcgcccatgtatcgaccgcctaccgagcggcacctggtgctgcgcctactgctatccctcgctgtgtcttcactcgcggctgggtgcgcgacttcaacaccgccctcggcgccggtttgcccgccacaggagcgcgcaccgcttcccccggcactcaaacagcgacctggcccgccgccggttctgacgccgagctattggaaagcggcgtcactccggcggacatcctggcctttgcccaggactacggggcctggtctcttcgcaatctcgctcagctcaacgcactactggaacaaggggaatag

SEQ ID NO: 340998 - DNA, 471 bp, Pseudomonas aeruginosa
atgttcggcaaggggtcggcgcgggatctgaacctgcgccaggccgagcagttgctgacggagttcaagcgcctgggctggcaaccacagcccagcaagcgagcagccggcaagccgcataacttcagtcagctgcccgccgaggtccaggtcatcgaggcgcagttggccgagatgaggctgccctggagctatgccgacaagatcgccaagcagatgttcggcgtggccaaggtcgcatggctgaagaagccagatcagctcacggcaatcctggcggcgttgcacgtcgagcaggagaaacggtacctcctcgccgaagtggatcggctctgccagggcctgggcatcgagcatccagaacaggcggccggcctggaacagctgccgaaaggatggcggcggcagcgtccaatcctcaaggccctggtggaaacgctccaggcggccgcagatagcaagcggaggtaa

SEQ ID NO: 340999 - DNA, 153 bp, Pseudomonas aeruginosa
atgagcctgaaggcggagctgccgatccagtacgtccgccgcgaggactatatccgcggccagagcgtgatcgaggcgaagctcgacggtttggccgtgaagctggaaaacgcgcagctgcgcagtctgatgggagcaaaaaatgcaaattga

SEQ ID NO: 341000 - DNA, 153 bp, Pseudomonas aeruginosa
atgagcctgaaggccgagcttccgttccagtacgtgcttcgcgacgactacatccgcggccagagcgtgatcgagatgaagctcgacagcctggccacgaaactggaaaacgcgcagctgcgcggcttggtaggagcaaaccatgcaaactga

SEQ ID NO: 341001 - DNA, 210 bp, Pseudomonas aeruginosa
ttgcgcagcgacgcgccggcactcgggcaactggtcgaacagatcaccctgaccctgctgttctccctggattaccagcgggtactgggcagcaagggcgaggtgcgcacggtggtctaccagatcatgatgctggtcgccccgcatctgcgcagcgaggcccaacgctcggcggaaagcctggcgcagcgctacctgggaccggaatga

SEQ ID NO: 341002 - DNA, 645 bp, Pseudomonas aeruginosa; identical to SEQ ID NO: 323936

SEQ ID NO: 341003 - DNA, 726 bp, Pseudomonas aeruginosa
atgaagccgtcgatcctcctttccgcgctcgtgttggcgtcggtgcagtggcccatctgggcgcagcagcccgcaacggccccggcgcgcaatgcgcaaagccaggagcgcccgctggccgcccgcgtgctggacgatcgggcggccagtgaatggggcctgcaaccgcaggagtggactcgctatcgcgagctgatggacgggccgctgggcatctactcgcccaacctggacccgctgtccgccctgggcatcgaggcacgcactgacgaagagcggcggcgctacgcagagctgcaggtgcaggtcgaagcgcgccgcgtcgagaagctgctcgcctaccagcgcgcctacgacgaagcctggcagcgcctgaaccccggcatgcagcgcgtgaacctgcccgacgacaagcccggcgccggtcccgtgcgtggtagaggccgcaccgcggtgttcgtcaaggatggctgcgctgcctgcgggcagctcgtacagcgtctgcaatcctcaggcgccgatttcgacctgtacatggtcggaagccgccaggacgacgcgcgcatccgcgactgggccaagcgcgcgcagatcgacccggcgcgcgtgcgcgccggcagcatcacgctcaaccacgatggcggccgctggctgtcgctgggcctgcccggtgatttgcccgcagccgtgcgcgaggtgaacggccaatggcagcgccagccgtag

SEQ ID NO: 341004 - DNA, 591 bp, Pseudomonas aeruginosa
atgtcagccatggatgagttggacttcagcggcctgagtgatgaccagctcgtcgagttggccatcgccatcgcaaatgaggcggcccgacgcaatccagcgctgcaggtggctttctccgaagcgctggccacggagaaggagaagatcgaagctcgccttcgtggcgccgaacgggcccgccggtatgaaattcaacaggccgagcgagtagcggaagctgctggcaaggctgtcgcagacgaaaagatgcgctcaaaacgcaccgagttgctgcgccgatatctggagcaggttgccggtctgatcgggaaagcgcctcaggagctgacgttggtctggaaaagcagtgactggacacgagcacccggtccccgtctccaggtgaatctcggctccaccggcactgacgtgaagtggcatctgatcgactacgccgaggccacagatcagatctggacgtcgcctgccctgtccaaactcatcccctccttgctgccctgggctcgcgaggtctgcgtggctgtgcgggcgatcaatatcgataggaccaccgtggcaagaggtgccgaagtatgtccaacgaactga

SEQ ID NO: 341005 - DNA, 324 bp, Pseudomonas aeruginosa
atgagcaatcaacataaaaccatgggtgatgcccagatagccctggtcgccgcatggagaaagcatccggaactacgagagtctttagatggaattgtggctaaggtgctttctgaaatagtctttcacacggagatgctgagcaagcaggcggaagggttagcaggatatgtccgtcgaaatagctcagacgaagatgaaattgttcgtgtcgcctgtcacaacatcgaccttcagatcaagaacatcatctcgatctgcggcgaagttaaccaacatggcatccgtgtatatggtgacgacatcgatagggatgtggactga

SEQ ID NO: 341006 - DNA, 942 bp, Pseudomonas aeruginosa
atgctctactggcgcatcggccagcgcatccatacgcaggtcttggaaggtcggcgggccgactacggcgaagaagtcgtgctgaccttggcggcgcaattggtgaaggagtacggcagcagtttttcggttaaaaatctgcgccggatggtgcagttcgccgccgcctacccggacgagcgaattgtcgtatcactgatacgacaattgagctggacgcacttcatcgccctgatcccgctcaaagacccgctccagcgggactactacgcgcagatggcgagtgccgaacgctggagcgtgaggacgctgcgcgagcgcatcgactcgatgctatacgagcgcacggcgttgtcccaaaagccggaggaaaccatcgcgcaggaactggcgaccctgcgcgatgcccaacgcatgaccccggcgctggtcatgcgcgacccctacatcctcgacttcctgggcctgcgggatagctggcaggaaagcgaccttgaggcggccatcatccgcgagatggaagcctttctgctggaacttggcgcgggcttctgcttcgtcgcgcggcagaaacgcatccagatcgacgacgatgattttcaccttgacctgcttttctacaaccgcaagctgcggcggctggtagcggtggagttgaagatcggcgagttcaaggcggcctacaaagggcagatggagctttacttgcgctggctggacaagcacgaacgggagccggaagaagcctctccgctggggatcatcctttgcaccggcaagaagcgcgagcagatcgaattgctggagctggatagatcgggcatccacgttgccgagtacctgaccagcttgccgccgcgtgcggtgctgggcgagaagttgcagcaggcgaccgagcgggcgcgattgcagatcgagcagcgccagcaagacaccgagtag

SEQ ID NO: 341007 - DNA, 975 bp, Pseudomonas aeruginosa
atgcgcatagctcttgtagtcggcataaaccactacgagcacggcggctctttgtatgggtgtgtcgatgattcccacgcagtgcaagctgtcctcgctcgccatggagatggatcggtcaacttcgattgcaaaatgttcacggggacaggccccacggatcgcgttgcacgatctttattaaaagatcgcgttgaagagcttttcaaagcccatgccgatattgcacttttttatttcgctggccacgggcacatagaggcaaccggaggatatttgctggcaacggattctcgccgtggcgatgaagggctatcgctctccgaagtcttggcaatggcaaataaatcgccagcacgtaacaagataatcatcctcgatagttgccactcaggaatcgccggaactcccccggccactggtgagcttgccagtttatccgagggtttgacgattcttactgcctcagcggccgaccagtatgcaacggaagaaaatggcagaggagtattcacaacgctactggtagatgctcttcacgggggagctgccaatctcactggtgacattaccccaggcagcatctatgcgcatgttgaccaatccctgggagcgtgggagcagcgtccaattttcaaaactaacgtccggcaatttgtgtcgctccggaaggttagcccgcctatttctctcgatgatctcaggcgcataacggagtttttccctcggcggggttatgaatataagctcgatcctacattcgagcctgagttgaagggtcgagacgctggcatgccccctccagatcctgaaaatacgcgaaagttcgcgctgctacagcgatataatcgcctcaacttggtcgcgcctgtggatgccccgcatatgtggcacgccgccatgcaaagcaagtcctgcaaattaacagtgctaggcgaacattatcggctccttgctgaaaagcaacgcttatag

SEQ ID NO: 341008 - DNA, 831 bp, Pseudomonas aeruginosa
atgcaactcgcatcccgtttcgcttcccgctccccctcgctgcgcagcgattacccgctgaccgatgaccagattcaccgcgtagcgccgtccatcttcgccgatgccccgcatgaaagccgttcgcagcggtacgcctatatccccaccgccgccgtgctgaccgagcttcgcaaggaagggttccagcccttcatggtttgccagacccgcgtgcgcgatgaaggcaagcgcgagcacacaaaacacatgctgcgcctgcgccacgccagccagattagcggcgcggaggctaacgaaatcgtgctgctcaactcccacgacggcaccagttcttaccaaatgctcgcgggcatgttccggttcgtgtgcagcaatgggctggtgtgcggcaacaccgtggccgatgtgcgcgtgccccacaaaggcgacgtttccgggcatgtcatcgaaggtgcttacgaagtcttgcgcggcttcgaccgggtgaaggattcccgcgacgccatgcgcgctatcacgctggacgaaggcgaagcagaagtgttcgcccgttccgcgcttgccttgaagtacgaccccaccgacaacaagcccgcacctatcaccgaatcacaaatcctgatgccgcgtcggttcgacgaccgccgcccggacttgtggagcgtgttcaaccgcacccaagaaaacctgaccaaaggcggattgcatggccgcagcgccaacggacgccgccagcagacccgcccggtgcagagcattgattccgatgtgcgcctcaatcgcgccctttggatgctggctgatggcctgcgccagttgaaagcctga

SEQ ID NO: 341009 - DNA, 333 bp, Pseudomonas aeruginosa
atgggctgtcatcttggtttttatggggaaaccaagttagtggcagcgaaacactcattggcagcggcaatacggacagtcaggaaggcgcgaggcttgagccaggaagcgttctccgacgtgtccagccgcacctatatgagtacgctggaacgcgacttgaaaagcccgaccctgcacaagttgaccgagctgtgcgaggtcatggaagtgcatccgctcacgttgctgacgcttgcctacgccggcgccgacacgcacaaggccgacgagctgctggcgcgggtgcgccaggagttcgaggccgtgctgaaagagcgcaacgcgccctag

SEQ ID NO: 341010 - DNA, 276 bp, Pseudomonas aeruginosa
atgcgacctgctcccttgcggcctgccgctgctgcgcccgcgcagccccaacgctacctgaccaacgacgaagccgccgagtacctgcgcctttcgccacgcacgctcgaaaagcagcgcgtgatcggcggcggcccgaagttccgcaagttcggccgccgcgtcatgtacgcggtgtccgacctcgatgcctgggccgaccagcgcagctacgaggcgacttccgacccggaatatgccgaacgccacgcgggcgattactgtgatggccgctga

SEQ ID NO: 341011 - DNA, 804 bp, Pseudomonas aeruginosa
atgaagttcaattcgctagtaggaactgttggaatggcggttgccatgtcggccacgtcagcaatgtctgccgactggagcacaagtaattttgagtatcgccgaggcagcagctataacgacaacggatctacaggcggcccgaagttttcaaaagatatattgcaattcgagaacgtaagtggatttggctggggtcgctcctactactttctttcgatggcaaaatcagacagcaaagacgccgggtatagtgagttgtatagcgaggggagtgtatacctcagtctttccaaggccttgaaaagagatttttcatttggcttcatcaaggatgccaatcttaacgcgggctacaacttcggtagcaaaaacagcgcttttggttcgaatccgaaagtgcttacgtatggacttggagttgaactcgacatgccgaagttctcctacttcaacgtcgacattgctgcctttagagatgtcggaacatacagcggcttcggcggaggcaagttgtgcggcaggaactcaaccacatatcagatcacgccgtattggagcgcccccattcgcatggggaattttcgattcgtttttgatggctacatggatatcattggggctcatggaagctgtagccagcaagttctgacgcagattcagctgaaattggacgttggaaacttctggggaaagcccgacagtgtatacatgggaatcgaatatcaatactggaagaataaatttggtaatagcgccaataccgaaagagttcctcagtttgtgattaactggacgctgtaa

SEQ ID NO: 341012 - DNA, 687 bp, Pseudomonas aeruginosa
atggctttgcagactctggacgaaggatcgaagccagacatcaaggaaggcttctatgccagcgtcgatggcagccagtcctatgtaaccaatggtgcgtatgacagcctcaatcaatggccaaaaagctatccggagatgcgggtgcaagtagaggcctatattcaggcgatgaccggcttgggcaagcatctgctgggcatgttggctctttcgctggagctgcctgaaaactacttcgctgaaggagttgaacggccaatgatcactaaccggttgctgcactatccgccgcagccccgcgttggcgatggcaaccagatcggtgcaggagcccataccgactggggcatgatcaccatgctcctgcaggatgatgtcggtggcctagaggtgcgcaatgcggacggcgaatggattcgtgcgccccatatccccaacaccttcatcatcaacttgggcgacatggtgccggtgctcacccgcgggatctatcgctccaacatgcaccgcgtcctcaacctcaatcccgaacggcaccgttattcggttccaacgttcttcgatcccaattttttctaccgcatcacacctccagacgggttgcctgctgacgaatccttgcccgcagcctctcgtaccgtgggcgagcacatggccgccatgatggaaaaaacatacgcgtga

SEQ ID NO: 341013 - DNA, 972 bp, Pseudomonas aeruginosa
atggaaacattgccaatcattgatatcagcccgctctatcagaatgaccgggcagcctggaaaagggttgcagatcagatcgacgaagcgtgctgcacttggggatttttctacatcaagggccaccccatcgctgaatcgcgcatcgaggaattgttggccgccggccagagtttcttcaagctgcccttggaggagaagctcaagatcgatatcaccaagagcgtcagccatacagggtacggcgctattgctgccgagcagttggatccgagccagccgggcgatcacaaggaaacctttgacatgagtttccacctgccggctgatcatccggacgttgtggccggtaagccgttgcgtggccccaaccgccatcccgacctaccgggctggcaggaattatgggagcagcactatcaggatatgcacgatctgggcctcacgctcttgaaagccattgcgattgcgcttggcacggacgaggatttttttgcgaagcggtttgccgagcccatcagcgccttgcgcatgattcactatccgccacgagaaggcgctgccaacgcaagcaaaggtgcgggcgagcataccgactatgggtgcgtcacattgctctaccaggatccggtcggcggtctgcaagtgcgcaatctggaaggtgagtggctggatgcgccgttcattcctgggacattcgtcgtcaacatcggcgacatgatggcccgttggagcaacgatcgctacaaatccactcctcatcgggtagtcagcccggagggcaaggatcgctattccattccgttcttcgccgagcccaacccgaacactgtcattgattgcctgcctggctgttttgacgagagcaatccgctcaagtacgaaaccacgacgtgcatcgactacatgctctggcgtttttccgaaacctattcgcatcgcggtacggacgagcagacaacggctgcctga

SEQ ID NO: 341014 - DNA, 1110 bp, Pseudomonas aeruginosa
atgaaatcccgtgctgctgttgcctttgaagccggcaaacccctgcaaatcgtcgagatcgacgtcgctccgccccagaggggcgaagtgctggtgaagatcacccacaccggcgtatgccacaccgatgcctttaccctgagcggcgatgaccccgagggcctgtttcccgctgtgctgggccatgaaggcgccggcgtcgtggtcgaggtcggtgaaggcgtgaccagcgtcaagcccggcgaccacgtgatcccgctctacaccgccgaatgcggcgaatgcctgttctgcaagagcggcaagaccaacctctgtgtctcggtgcgcgccacccagggcaagggcgtcatgcccgacggcaccacgcgcttctcctacaacggccagcccatctaccactacatgggctgctccaccttcagcgaatacaccgtggtggccgaggtctcgctggccaagatcagccctgacgccaaccccgagcaggtctgcctgctgggctgcggcgtgaccaccggcctgggggcggtcaagaacactgccaaggtgcaggagggcgatagcgtggctgtgttcggcttgggcggcatcggcctggccgtgatccaaggtgccaggctcgccaaggccggccgcatcatcgccattgacaccaatccgtccaagttcgacctggcgcggactttcggtgcgaccgactgcgtcaaccccaaggattacgacaagcccatccagcaggtgattgtggagatgaccggctggggcgtggatcacagcttcgagtgcattggcaacgtcaacgtgatgcgcgccgcactggagtgcgcgcaccgcggctggggccagagcgtgatcatcggcgtggctggcgcgggccaggaaatctccacgcgtcccttccagttggtgaccggccgcaagtggctcggcacggccttcggcggcgtcaagggccgctcgcagctgcccggcatggtcgaagacgcgatgaccggcaagatccagctggcgcccttcgttactcacaccatgccgctgaccggcatcaacgaggctttcgatctgatgcacgagggcaagtcgatccgcacggtgattcgctactga

SEQ ID NO: 341015 - DNA, 831 bp, Pseudomonas aeruginosa
atggaacggatcgaacaacacgccagcttcggcggccggcaggaagtgtggaagcacgcttcggcaacgctgggtggcgaagcgaagttcggcatctatctgcccgaagccgcgctgcgcggtgaggcgcgcccggtgctctactggctctcgggcctgacttgcaccgagcagaatttcatcaccaaggccggtgcgcaggagcatgccgcgcggcatggcttgatcgtcgtttggcccgacaccagtccgcgcggcaccgatgtcgcggacgatgccgcctacgacctgggccagggtgcgggcttctacgttaacgccacggagcagccctgggccgcgcattaccgcatgcaggattacatcgccgaggagttgcccgccttggtcgaaaaggagttccccgccagcgatgcgcgtggcatcttcggccattcgatgggcggccacggtgcactggtgacggcgctgcgccatcctgggcggtatcgcagcgtttcggcgttctcgcccatcgtggcgccctcgcaagtgccttggggcgaaaaagccctgggcacctacctgggggcaggccgggccgcatggaaggagtgggacgccgtggaattgattggggccgcgcaggagcgtgtgccgctgcttgtggatcaaggcgaggccgacgagttcctcgcgggccagctacggccggaattgctgcaatcggcctgccaggccgtgggccatccgctcacgctgaatctgcggccgggttacgaccacagctattacttcatcgccagctttctggcgaatcatttcgcgcatcatgcggcccggttggcatga

SEQ ID NO: 341016 - DNA, 399 bp, Pseudomonas aeruginosa
atggctaatcccgttatctccggcaacgacgttttctcgcacgtgttcatcggcgctgccaacgtcgcacaatccaccgctttctacgacgccgccctgggcgcgctcggcatcaagaatctcgggccgttcggcagcggctgggttctgtatggtcgtgacaagcccgcgttcatcatcgcgcgccccggcaatggcgaggcgccttcgagcaatggcgcaaccatcggcttcgcagcggccagcccggccgaggtcgatgcgttccatgccgcgggcctggccgccggcggtgccgacgaaggcaagcccggcccgcgcggccacctgcccggtgcttatgccgcctatctgcgcgatccggcgggcaacaaggtcacggcctacgctttcgtctaa

SEQ ID NO: 341017 - DNA, 996 bp, Pseudomonas aeruginosa
atggccaatgatgctccaacaattcatgtagtcgtcgaagccttgagcgcgcaaggccatggcaatctggccgtgcatttagtgccgaccgagacgggttcaaggctgccgccgttcgaggccggtgcccacgttgacctacattttcctaataaccttgtccgtcagtattcaatcgcaagcagcccgctgcagcttgaccactatctgctgtgcatccgccgtgaggcctcctcacgtggcggatcggcctatgtgcacgagcaactgcgggtcgggcaatcattgacgattagcgcgccgcgaaatttgttcgcgctccggcctcacgcccctgccgtgctgttggccggcggcatcggaatcaccccgctgttgagcatggccttggcgctggatgccgaaggccagtccttcgaacttcactactatgttcgccatcgccacgaagttgctttcagtcgtctcctgaaccacggttttcgccatggcactgtccacctgcattgcagcgctgagtgtgacagcttacgggccggcctgcctgtgtgcctgcacacaccggatcggcaaacacacatctatgtatgtggcccgcagggattcatggccgaagtacggcagcgaaccagcgcccagggctggagtgccgagcagattcaccaggaggcgttcgcgccgatggtcgcaggcggagaagctacagccggtgtcttgatgcacgaaatgcccttcgaagttgagatcggctcctccgggcaggtgttctgcattccagttgaacgcagcattgcttcggtgctgctggatgcaggcattgacgtaccgctctcttgcgaaatgggcatttgcggcgcgtgtcttacaccggtgactgccggggaacccgaccatcgcgacagcgtgcaaagcgacgccgagaaatccgtagcccaacccaagatcgcgctatgctgctcacgcagtcactcaccgcgactcgtactcgatctttag

SEQ ID NO: 341018 - DNA, 1065 bp, Pseudomonas aeruginosa
atgaatgtcacagcccctccccaactcagcaagaaagcccttgcattgcctctcggctgcacgtttgaaccggaggattggcgtctgctggcacgtcactggtatcccatcgcgcttgctgaagaaatcggagaggccccataccgagccactctgctggatgaggcactggtggcctatcgcgttcacggcaacgttgtcgtggcgcgagacgtttgtccgcaccggggtgttcctctgagcatgggcatgcacgatggcgaagggctggtttgtccgtatcacggccttcgctttggtactgagggaagatgcaatcgcattcccgccagtcctcaccaagctgcccctgccaaactgaatctgcacagttatccggctatcgagcgctacggattgatctggacatgcttgatggctgaagacggatcgggcgccccggacattccttcgctaccgcactgggatgacccggactttgtgcaggtggtttgcccatctttcgatatcgctggcttcgccggccggcagatagagggcttcatcgacgtggcgcactttgcttgggttcatacggaaacctttgccgatccaaacaaccagcaagtgcccgattaccagaccagtgaaaccccgacgggtttcatggctgactatttcagcagcatgtccaactacgccaaaggttcaggcttcgaagacccggaaggctttatctggttacggcatttcgaggttcatctgccattcactgccacgctcaccattcatttccctggcggaaaagtccaaacgatcatgaatgcggcgtcacccgtttcggcacgtaagacgaagctttttgtgccgatcattcgcaatgtcaacaagcatattccggccgaggatatcaaggcattcaacttgcgcgtctttgaggaggatcgtgcaatggtcgaagctcaaaagcccgaacgccttccactggatctgaccctggaggcacacatacctgcggatcgaagctccatcgcatatcggcgcgggcttaaacggatgggccttggcgagttctttcttgtttga

SEQ ID NO: 341019 - DNA, 939 bp, Pseudomonas aeruginosa
gtgctcacgttctcacgctttactcgctacttcatggaagtggctcgtcttggtagcttgcgtcgcgctgccgaggtgctacacgtctccgcatcggccatcgatcgtcagatccttctggcagagcagaagtacgaaacggccttgtttgagcgcttgcccagtggtatgcggcttacagccgccggcgaactgctgctggccgatctgcgacgctggcaccgggagtacgggcgcacgctggaacgttttgacgaactaagcgggctacgacgggggcaggtgcatctggcctgcataaatgcgttggcaacaggcgtactgccagccacattggcgcgcatggggcaagagcatccaggtatcgcagtggacgttcaggtgctgggtaatgcccagattccactgttagtgggggccggagaaattgacttcggtcttgtgatggatccgccaccgacgactcagttacagatgcaggtgatgcgcagcatcccgataggcgttgccatgcccgccgggcacgctttggctggacatgagcagttgctgcttggacagacgctggattggcgacacatcgtgccagcggaatcattgcttgttggcgatcgcgtaaaggccttgtatgcgcgacatgtagacgcgatacgctatgcgattcgttgcaacaacgtagagatgatgcgcgccctggtgctcagtggagccggcattgcggtgatgagttggctggacgtgttccgcgatgtgcaagaggggcgcttggcctttgtgccgctgtcgcagcgccaagccaagtcgctgagtctgtgcctatgtgttgcaccacagcgccaactatcacgcgccgctcaatgggcaatggaaaaggtacgagaggatctgaaggcgttgagcctgtcaaaagaacagcccgacctgcacgttggcgactag

SEQ ID NO: 341020 - DNA, 954 bp, Pseudomonas aeruginosa
atgaatatcgaactcaaacttgtcgaagccttcgcctccatcgtgagagcaggtagcctcaccaaagcagaagctcagactggcgttgcgaaggctactctgagccggtcacttcagcgcctggaagacgagctgggcgtacaactcctcatccgatctgctcgaaagattgtgccgacagaagcggggctggcgctctactcgcattgtgaggcattgcttgcagacttgagcgggcgatgggcgtctgcgcgccatgaagttcaagaattggtacagggagggcagggtcgcctgaaggtgctttccgacaatcaattcacgacgacattcgtatgccacgtagtcaagctgtttctggaagggcatcccaacatactttgcgaattggatgtagcagaaagagcggattcccccaagcttgatgaagtggattgctacgtctgcgccgcggcaccgaatgttcccgatgtcatagcaaagccagtggggcagctttcattcggactgtatgccagccctcaatatgtggcgagtcatggactaccagtgacgccgaaggaactcacggcgcatgattcgattgtgttgaggcaatctgaattttcagagcgagtcatgcttcactccagagaaacgtcgcagaagtatatttcgcgcatagcggttcgaaccaacgactattggctaatgaagactttctgtttgaatggcttgggtatcgccttgttacccgacttctttgtgcagccagaggtgaaaagcggaggactcgtggccatacttcccgactggaagccagagaaaaagaaaatctactgcgtataccagcgaaaccgctacggctcgaagaagttacgtgcgttcttgaatttgctaaccgagagcatgtcggaactcgaccgtctaaacagctacactgcgtccatactgccccgcaccagaaaaagctag

SEQ ID NO: 341021 - DNA, 399 bp, Pseudomonas aeruginosa
atgtcgctgatccggttcatcatgatggcagctatcctctcggtcacgactatgacggcatctgccgccgatccgctcaaagttgctttcgtctacagtgctcccatcggtgatggtggctggaactttgcacacgaaaaggcaccgcgggaagttcaagccaagtttggcaacaagaccaagaccatgtacgttgaggcagtcgctgatggtgccgactcggagcgcgtcatgcgcgatctgatttcccagggcgccaacgtgctcgtcggaaccagctttggctatatgggcccaatgctgaatctttccggcgaacacagcgctgtcaagttcgagcacgtctcgggctacaagacttcaccgaacacggcgattttcaaggtagttgtcgcgtga

SEQ ID NO: 341022 - DNA, 447 bp, Pseudomonas aeruginosa
atgaaagaactcgtatgtcaacctatgttcaatatattctgccgggacattgatcggcaattggacttctacaaacacctcctaggttgggacgaaatcaaggaggcttcctcgccgatctatcgggtattgacgggcgcaggcgtgcagctcggcttcaatggctggatggcttacgatcttttgtcattggcggacaggattaagcctgagaagacagacttcccgattaacacaatgatcacctttatggtggaggagcctgaactcgtagacggtgcgtcccgtaaaatcacggaatggggtgggcgtgtcgtaaaggctccgttcgccacatactatggccattggcagatcgttttttgtgaccccgagaataacgtagtaagaataacgtcatcggcattgccagaaggcattcaacctcccgccatttcattcgaataa

SEQ ID NO: 341023 - DNA, 984 bp, Pseudomonas aeruginosa
atgattatttacacccccgcctcagcggcaaaatttattcctgtgatcgacttgacgggtagcttctccgaagacttcgccgacaagaaggcggtggcgtgggaaattcacaaggcctgtcgagaaactggtttcttttatatcaagaatcacggcatccctgaaggcatgattcagacgcaacttgaatgtgcccggcaattcttttcgctgcctcaggaagataagatcaagttgaatgtggcgcactcgccgtcaatgcgcggttacgagccaatggcaattcaagcattggatgacggttcgaggccagacttcaaagaagggttcatggccggtatagatggactgcaggcctacaccacaaatggggaattcaacagcctcaatcaatggcccaagagcaatccagagatacgcgtgcaagtggaggcgtatattcaggcgatgaccggcttgggcaagcatctgctgggcatgttggctctttcgctggagctgcctgaaaactacttcgctgaaggagttgaacggccaatgatcactaaccggttgctccactatccgccgcagccccgcgttggcgatggcaaccagatcggtgcaggagcccataccgactggggcatgatcaccatgctcctgcaggatgatgtcggtggcctagaggtgcgcaatgcggacggcgaatggattcgtgcgccccatatccccaacaccttcatcatcaacttgggcgacatggtgccggtgctcacccgcgggatctatcgctccaacatgcaccgcgtcctcaacctcaatcccgaacggcaccgttattcggttccaacgttcttcgatccgagctatcactacaggatcaagccattgacgcatttcgagggcgcacaggaattttcacaagaagagcgtaccgttggagaacacatcgccaaaatgtatgcaaaaacctatggtgaccccgcagcaaaaactgcttaa

SEQ ID NO: 341024 - DNA, 1344 bp, Pseudomonas aeruginosa
atgaagagtatccatatcgagaagaaaatgaacgctccaacactgctgctgcttggcgcgcagcatgtcatggtgatgtacgctggcgctatcgccatcccgcttgttcttggcgcggccctcggacttccaaaagatcaaattgcgtttcttattagtgccgacctgttcgcctgcgggattgccactttgattcaatgcataggcttcaaaggcgttggcatcaggcttcctgtaatgatgggggtaacttttacggccattggccccatgattgcaatcggcagcgatccgcaagcggggttgcctggcgtttttggagcgacaatcgcggcaggcatttttggcgtactggttgccccattggttgggaagatgctgaggttcttccctcctgtcgtaacaggaacagaaatcttggcagttgggctttctctaatgggagttgcggctgcttggtcagcaggtggatatggcaacccggacttcggtagcccgttatatctttcgatcgcaggcttggttctcatatctgttttggccttggtgaggtttaccactggctttctcaacaacattgcaattctgctggggttgatcggcggattcgttgtctctagtgcagtaggtcttgtgtcgttgaatgagctaagcgatgcacccttgtttggcttgattcttccttttcattttgggctgccgaaatttagcttctgggccattgcggcgatgtgcattgtcatgctggtgacgttcatagagtcaactggaatgttccttgccttgggcgagatcgtggataagccagtcagcgaaaaggatctcgttcgaggatttcgcgccgatggggcgggcacggtaattggcggaatattcaatactttcccgtatacctcatatgcacaaaatgtaggcctagtgagtgtgaccggggtaaagagtcgttgggtatgtgtaatggcaggagttatcctgatggttcttgggctttctcccaagatggctgttctagtcgcctcgattcctccttttgtattgggtggagtggggatcgtaatgtttggcatggtcgccgcaactggaattaaagttctggcgcgagtcaatctgaagaatgtttataacttatatgtcattgccattagcataggcttgggcatgattcctgtcgtgatgccgaagttcttctccaagcttcctcatgaactggcccccatcttagagagtccaattctgctaaccgcaatcagtgctattctgctaaacctttttttcaatggattgggtgatgataattccgcgcgaatcgaattgatggaggttgcaaaagattctgagccatga

SEQ ID NO: 341025 - DNA, 339 bp, Pseudomonas aeruginosa
atgcgatgggttcccgttctgtcggtgtcgctgctggctgtgctgctgaccgcgtgcggccagcagcctaccgaagacctacccgccaccttggccgtcgatcccgtgcggctcaaggcgctgcgcgcccagtgtgcaaccgaccggcaagccgcaggagaagacacctgccgcgccgccgccgaagccttccggcggcggttcttcgccggccagaccaggccggacgaataccggacgctggccgaactgccgccgaccccggcgagcttcgacacgcccgacgacgacgcgccggaaggcgatgcgccactcgccgctacggaggacacgccatga

SEQ ID NO: 341026 - DNA, 753 bp, Pseudomonas aeruginosa; identical to SEQ ID NO: 321114

SEQ ID NO: 341027 - DNA, 267 bp, Pseudomonas aeruginosa
gtgcgcatagccgagctgaccgtgatgatgatgcaactggtggcctccggtcgcggcgtctgctgcctgccgaactgggccctgcacgagtacagctcgcgcggctacgtgacggcccggcgcctcggtgaaaagggcctgtactgcacgctcttcgccgccatccgcacggacatgttcgatgcgccattcatgcgcgacttcctgctcaccgccaaggacacctccttcgccaccctcgaaggggtcagcgccgccaagggctga

SEQ ID NO: 341028 - DNA, 1539 bp, Pseudomonas aeruginosa
atgagtcaagcgcacaccccctccgctccactcgccgaagtctacgatgtcgccgtggtcggcggtggcatcaacggtgtagggatcgccgccgacgcagccgggcgcggcctgtccgtgttcctttgcgaacagcacgacctggcccagcacacctcctcggccagcagcaagctgatccacggcggcctgcgctacctcgaacactacgaattccgcctggtccgcgaagccctggccgagcgcgaggtcctgctggccaaggcgccgcacatcgtcaagccgctgcgcttcgtcctgccgcaccgtccgcacctgcgcccggcctggatgatccgcgccggcctgttcctctacgatcacctcggcaagcgcgagaagctgcccgcctcgcgcggcctgcgcttcaccggcagcagcccgctgaaggccgagatccgccgtggcttcgagtactccgactgcgcggtggacgatgcgcgcctggtggtgctcaacgcgatctccgcccgcgagcacggcgcccacgtccatacccgcacccgctgcgtcagcgcccgtcgcagcaagggactctggcacctgcacctggagcgcagcgacggcagcctgtattcgatccgcgcccgcgccctggtgaacgccgccggcccctgggtagcgcgcttcatccaggacgacctgaaacagaagtcgccctacggtatccgcctgatccagggcagccacatcatcgtgccgaagctgtacgaaggcgagcacgcctacatcctgcagaacgaagaccgccgcatcgtcttcgccatcccctatctggaccgtttcaccatgatcggcaccaccgatcgcgagtaccagggcgacccggccaaggtggcgatcagcgaagaggaaaccgcctacctgctgcaagtggtgaacgcccatttcaagcagcaactcgcggccgccgacatcctgcacagcttcgccggcgtgcgtccactgtgcgacgatgagtccgacgagccttcggcgatcacccgcgactacaccctgtcgctctccgccggcaacggcgagccgccgctgctctcggtgttcggcggcaagctgaccacctaccgcaagctggccgaatcggcgctgacgcagctccagccgttcttcgccaatctcggcccggcctggaccgccaaggcaccgctgccgggcggcgagcagatgcagagcgtcgaggcgctcaccgagcaactggccaaccgctacgcctggctcgaccgcgaactggcgctgcgctgggcgcgcacctacggcacccgggtgtggcgcctgctggacggggtcaatggcgaagccgatctcggcgagcacctgggcggcggcctgtatgcccgcgaagtggactacctgtgcaagcacgagtgggcccaggacgccgaggacatcctctggcgccgcagcaagctcggcctgttcctctcgccgagccagcaggtgcgcctcggccagtacctgcagagcgagcatccgcatcgcccgcgggtgcatgcggcctga

SEQ ID NO: 341029 - DNA, 888 bp, Pseudomonas aeruginosa
atgactttcgacgtgatcatcgtgggtggcagctacgccggcatctccgcgggcatgcaactggcgcgggcgcggcgcagggtgctggtgatggatacgggactgcgacgcaaccgcttcgcccgggcctcccacggctttctcggccaggacggccgcgatccggcggccatcgccgatgacgcccgcgcgcagttgctggcctatcccagcgtcgagtggctgtccgaagccgccgtcgcggcgaagaaggaggcggacggtttcgtggtgaaggccgccaacggagaacgtttcaccgcgcgccggctgatcctcgccagcggggtcgccgacgagctgccggagatccccggtcttgccgagcgctggggacggcacgtgttccattgcccgtattgccacggctacgaactggacggcgggccgattggcgtactggcggcctcaccgctggccatccaccacgccctgatgttgcccgactggggagcgaccacctttttcctcaacggcgtcttcgaaccggatgccgagcaaatgtccaggctggaccggcgcggcgtgacgatcgagcgcgaagccgtggtcgcgctgggcggcgcgcgcgccgacgtgaccctggccagtggccgcacgattacgctcgcggggttgttcacccagccgcgtacgcgcatggccagcccgctggcggcgttgctcggctgcgagttcgaggacggcccgagcgggccgttcatcaggaccgacggcatgcgcgaaaccagcgttcccggcgtcttcgcctgcggcgacgcggcgctggcggccggcaacgtcgccatcgcggtgggcgacggcgcgcgcaccggtggcgcggcgcatcattcgctgctgttccgctga

SEQ ID NO: 341030 - DNA, 945 bp, Pseudomonas aeruginosa
atggacccgacccagtgggacccgagctcgactctcaagccgaggctgaacaccagcctgtggggcatgaagctcgaccaggaacagaaaggcgcctacctcaccacccggttgaacctcgccgacccgctgaaagtgatcctcggcgggcgcctggactggtacaaggccgacgccgataccgacagctacaaggtcacccgcaacgtcacccgctatgccggggtgatctacgacctgaaccagacctactcggtctacgccagctataccgacatcttcaagccgcagagcaacttcgacgccggcggcggcctgctcgacccgatcaccggcaagaactacgagatcggcctgaagggcgaacacttcggcggcgcgctcaattcgcagatcgcgctgttccagatcgaccaggaaaaccgcgccaccgaggacgtcggcggcccctcgccatgccccttcagccccacctcgcgctattgctcgcgcgcttcgggcaaggtccgcagccagggcgtcgacctggagctgagcggtgcgctgagcgacgactggcagatgatggccggctatacctacgtcgacgccaagtacaagcacgacagcaacaaggccaacgagggcaagccattcgacgcggccaagccacgccacctgttcaagctcgccaccagctatacgctacccggcgaactgcacaaatggcgcgtcggcggcgacctggccacccagagcaagaccgaggacagcagcaccggtttccagcagggcggctacaccgtggtcaacgccatgctcggctacaaggtcaacgaacggatcgacacgcggctgaacttcaacaacctgttcgacaagtactattacagcggcatcgacttcggcaacctcaactacggcgagccgcgcaacctgatgttcacggtgaagtactcgctctga

SEQ ID NO: 341031 - DNA, 459 bp, Pseudomonas aeruginosa
atgcaatccctgcacacactggtatcggtacgccccgtggcacacgaggacttcgagcagtggctcgaatactggaaggcctaccaggcgttctatgaagtcgaactctcggcacaggccaccgaggccacctggcggcgcttcttcgacgagggcgaaccgatgcactgcgccgtggccagcgacggtagccgcctgcatggcatcgtcaacttcctctaccaccgctcgacctgggctgcacaggacgtctgctacctggaagacctctatgtctcgcccgacgtgcgcggccagcagatcggcaagcagttgatcgagtacgtccgccggcaggccgaggaacgtcgctgcgcgcggctctactggcatacccaggaaagcaaccacagggcacagcgcctgtacgactgggtagcggacaagccgggtgtgatcgaataccgcatcgagctctga

SEQ ID NO: 341032 - DNA, 828 bp, Pseudomonas aeruginosa
atggctcgattcagcaaaagggaatggcttctaacaattttcataatagtaatcttgcagtttattcttcactggctggcgtttcagtacagaggaagctcgaacgcccttggttacatatcatttgccggaactgttgtttctatagttctgggcgtggtagcgataatatactcctttgtgcagtcaatttctcacagcacttcagtagaagaaatgcgcgctcaagttgaagacttgatagctgcaactaaagacataaataagtcgaaagatagtcttcatgagtctacaactaaaataattagcgcggtagagtcattaaatataaatttggttgagaatacaacgaaggcaaacgagttatactcaaagatcacggaaggcagctcaagccctgccaagaaaagctcaagccaggacagaataaagataagcagctaccgcgatgaaattccaccatttctacttaccaccaattttttattaaactgtatgactgctattattggcgaggcagttaaggaagggtggacctcagacaaaataaatagatttattcttccggcctttaagaagtggcacacgattgatacagtttatttttatggcgtgtacacatctttacttatagtccttaaggccgaagggcttgtgaaagggggaaatagtgcctatgaatctctcaaggaaagtgggaattttttagaaaaaataaaaaacatcagagaggtatttgcaaccagtgaagatgaagatatagctgagataaggctcgctattgatatgctaaaggctcaggatgctgagaacaaatctaaggtgtag

SEQ ID NO: 341033 - DNA, 951 bp, Pseudomonas aeruginosa
atgcgcaccacctccctgttgcttttgcttggcagcctgatggcggttcccgccactcaggctgccgacgcttccgactggctgaatcgtctcgccgaggccgatcgccagaacagtttccaaggcaccttcgtctacgagcgcaatggcagcttctccacccatgagatctggcatcgcgtggagagcgatggtgcggttcgcgagcgcctgctccagctcgacggcgcgcgccaggaagtggtccgggtcgacgggcgcacccagtgcatcagcggcggccttgccgaccaactggccgatgcccagctgtggccggtgcgcaagttcgatccctcccagctggcttcctggtacgacctgcgcctggtcggcgaatcccgtgtcgccggccgcccggcagtggtccttgcggtgactccgcgcgaccagcatcgctacggcttcgagctgcacctggaccgcgacaccggcctgccgttgaagtcgctgctgctgaacgagaaggggcaattgctcgagcgcttccagttcacccagttgaataccggtgcggcacctgccgaagaccagttgcaggcgggcgccgaatgccaggtcgtcggcccggccaaggccgacggcgagaagaccgtggcctggcgctcggaatggctgccgccaggtttcaccctgacccgcagtttcatgcgtcgcagtccggtcacccccgatccggtcgcctgcctgacctatggcgatggcctggcacgattctcggtgttcatcgagccgctgcacggtgccatggttggcgacgcgcgcagccagctcggcccgaccgtggtggtttccaagcgcctgcagaccgatgacggcggccagatggtgaccgtcgtcggcgaagtgccgctgggcaccgccgagcgggtggcgctgtccatccggcccgaggccgccgcccagaaatga

SEQ ID NO: 341034 - DNA, 582 bp, Pseudomonas aeruginosa
atgctaacccaggaacaggatcagcaactggttgaacgggtacagcgcggagacaagcgggctttcgatctgctggtactgaaataccagcacaagatactgggattgatcgtgcggttcgtgcacgacgctcaggaagcccaggacgtagcgcaggaagccttcatcaaggcataccgtgcgctcggcaatttccgcggcgatagtgctttttatacctggctgtatcggatcgccatcaacaccgcgaagaaccacctggtcgctcgcgggcgtcggccaccggacagcgatgtgaccgcagaggatgcggagttcttcgagggcgaccacgccctgaaggacatcgagtcgccggaacgggcgatgttgcgggatgagatcgaggccaccgtgcaccagaccatccagcagttgcccgaggatttgcgcacggccctgaccctgcgcgagttcgaaggtttgagttacgaagatatcgccaccgtgatgcagtgtccggtggggacggtacggtcgcggatcttccgcgctcgtgaagcaatcgacaaagctctgcagcctttgttgcgagaagcctga

SEQ ID NO: 341035 - DNA, 912 bp, Pseudomonas aeruginosa
atgggcgaagccaaatacagaaagcaaaacgatcctaactatgggcagccaacaaaaaacagagggcttatactttcctgccccatatcagtgacatccgcaaactcttttgtgatccagcgaagcacgctcgacccacaagaactacgaacatcactactctactgggacaagctttcctggcctaaaaacaatataattggcctagcaggctgccaagacacagaattccttcaaagcagcggggttctttatcgtccaaagttagatgttgccggccacattgaaagtggaaacatgttcctcgaagtacaggaagagcttcttacattctatgaaagcaagacccctggaatgtggtctataggccaaggagttaactcggcaaaagccaccccttcctctttagctgtgaatagctctcatggaatagttatgcaactgctgaactcagtgccgacccctggcccggatgttcctctggcagatattttggattttaaagctaaacgacaagacgagttactccaatttcgtgaacactttgagaagctagtaaaacaggtcacagatcatgagtcatcagaagaggcgctacagcaggcaattcatgaggtcgatactgcatgcgccgacctgctaaaaacagttagagagtggcaggttccggtaaaactctcaagcctgagtgcctccatcaattttgacatactcaaagccttcaaagagggagcttccgcttacggcctcataaagagtttcaatcttggagaaacagctgcatacatatcagctggagcagctgcaattcatagtcaaattaacataaagagagggatcgaatttagcaaaataaagcgaccacgttccccgtataaatacgcatacttagtagagagagacttgaagtag

SEQ ID NO: 341036 - DNA, 285 bp, Pseudomonas aeruginosa
atgcatgtcatcacccagaagcgcatctgggaagccaaggaaaagtcgcctcattcagccaccgcactggatgcctggtaccgtctgataagcaaggtagagcccaaggatttcgccgccatgaagcagctcttccccagcgtggataaggtcggtgacaagcacgtgttcgatatcgggggtaacaagctgcggcttatcgccacagtggattacgtctacaagaaggtcttcatcagggccgtgctcgatcacaaagagtacgaccgcaaccaatggaagtga

SEQ ID NO: 341037 - DNA, 402 bp, Pseudomonas aeruginosa
atgagcgcactcctcaagcaagcaaccgagcactggcgctacgtcgcgccgctactcactccgccggagaccgaggccgattatgacgccttggtcgaagcgctggacgaactgctagacgagatcggcgggcaggaacaccatccgctcgccgctctcgcctcgcaaatgggcgatctgatcgccacctatgacgcgctgcattaccctctgcccgaagcgcctgggcatgaggtgctgcgcttcctgatgaccgagcatcagctcacccagagcgatctgcctgagattggtgcccagtccgtcgtgtccgagattttgggcggcaggcgccagctcaacgtgcgccacatccgggcgctgacccaacgtttcaacgtcccggctgacatatttctctga

SEQ ID NO: 341038 - DNA, 861 bp, Pseudomonas aeruginosa
atgaagatacatgcctttaaggtaaataaagaggacaagacggcggatctcgttgatgtgctcaaattggttcatgctgaagacaagcttgttaaacgcattcggctgatcaatagagcggagctgcgcatcgactccatagagtttagggacggcgtttggcttttggactttgttaagtttaggcagacgcaggggccaggtagagggaagaaaaaagcaaagactgaaggatttgagttcaagcgaggcgaaagctttgcggaagaaaccgctgcactctacgatcctgttactaattatatgttggttcagtataatcactctggcgttcgagcaggctctatcgctcagtatctgagtgattatgatgaggctgctgccaacgtttatagcctcgatcctaaatatgatccggatacagaacgtaagcttcagcagaaagctattaaaaagagcctgagcttccgaattgatgttactcagatgagtgcgcaggacttgaagaatggtgtggctcttgagcaggccattgctttcggacgggattgttcagccggtcagattacggttgagctctcggcgggtggtgcgcgcaataacgggttgaagggtaaggtagacgccacccttaaagctctgcggtcgctggcgggcaacaaccctgctgcggtgcagagtgtaaaaattggtggcaaagcttctgaggatgatgctgtagaagtgctagatttgcttactgagcgcttgcatgtggaacttagagacatcaagcccggtctcgacttacgccttccgctagatgatcgctggaagggactgctcagagcaaggaatagttggaaaaaggtgcttacgtga

SEQ ID NO: 341039 - DNA, 306 bp, Pseudomonas aeruginosa
atgcgcaaaggcgcctacgacagtgaggttttcaaggacgccaggcacctgtctgaggtgccctatctgatccgtgatggggatcgggatgaatatcaggagatggaagatttcattcgtgctgttgccgccgcagggctggcggactgcctgaccagccttttctacgactctcgggcctgtttctgcaatatcgaaacggtcgaaggcttcgatgcggatggcctggaaggccaacgcctgatccaggctgctaccgaacaaatttcccagttttatttgctagatgttattgggtctgcctaa

SEQ ID NO: 341040 - DNA, 1083 bp, Pseudomonas aeruginosa
ttgctggatggcaactaccggcccctgccggtgcgccgcgtccagatcccgaagcccgaaggcggggtgcgcgaactggggattccgacggtgacggatcggctgatccagcaagccctgctgcaagtcttgcagcgcatcattgatccgacgttctccgaacacagctacggctttcgtccgggacgccgtgcgcacgacgcggtgctcgatgcacagcgctacgtgcaggacggttaccgggtggtggtcgatgtggatctggagaggttcttcgaccgggtcaatcacgacatcctgatggaacgcctggcgaggcgaatcgacgacaaggccgtgctacggctgatccgtcgttaccttgtggccgggatcatggatggcggcgtggtcatggcgcgctacgaggggacgccgcaaggcggaccgctgtcgccgctcttggccaacgtgctgctcgacgaggtggatcgggaactggagcgacggggccaccgctttgttcgttacgcggacgactgcaacgtatatgtgcgcagccgccgggtgggcgaacgggtgctggcgggcctgacgaagctctacgaacgactccatctgaaggtcaacgaggtcaagacggcggtagcgcctgcgaccggtcgcaagtttctgggctacgagctgtggcgcagtgcgggtgaccggatcaagtgtgctgtggcccgaaaggccctggcgaccttcaggcaacgtatccggcaactcacacgtcgctcgggcgggcgcaacctgtccgagatcgccgaacggctgcgggcctacatgcccggttggaaggcctacttccagcttgcgcagacacccaaggtgttccgcgaactcgacgagtggatcagacaccggctgcgtgccgtgcagctcaagcactggcggcgaggcacgacgatgtatcgggaattgaaagcgatgggtgcgtcggataccgacgcctatcggattgcaacgaacagccgcaggtggtggcgtaacagccgcttcgcgctgaaccgagtaatgccgatcgcctacttcgaccgactcggcgtgcctcggctctcataa

SEQ ID NO: 341041 - DNA, 717 bp, Pseudomonas aeruginosa; identical to SEQ ID NO: 250912

SEQ ID NO: 341042 - DNA, 1245 bp, Pseudomonas aeruginosa
atgggattattcaatgcagccgcgaacctgttcggccaggtctacgagcgtgcgacgcaggtggccgccaccgccgtcacggcggtggcggacgtggccaggacattggtgggctccaccgtcgacgccgtggagcagcaggtgcacgaagcgcttacatcggtgcatgacgccgttgccagcgtggagcaggcgctggagggtacggtcggcgcggtggccggcacgctcggcgagatcgccggcgacgccctcgacaccgtaggctccgcggtcggcacgctgggcgggctggccggcaactcgctggcgatcgccgacgacttgttgcacgggcgcgtcgagccggaggattacctgaagctggtcggtgacctggggcagggcgtcggtgccaccgtcggccatgcctgggaattcggcagcgacagcctgaaggccgccaacgatctctaccacgccgcctaccagggtggctcgctaagcctcggcaatagcgacggcctgctcggggtcaatgtgatcggctcgctgctcggcggcaatcacgaccagggcgtgattcccgatagccgcggcatcctcggcccgctgccgatcaacgtctccttcaccgagcaaggcctgaccttcggcggcgagacgccgctgactccgctggtcaccgcagccctggcgctgaatccgatcaccgcgccgctggtgccggtgctggcgccgctcaacctcggcggcctgggagtggtcggctcggtcgacaaggaaggcttcagcgccaagttctacggtatcgccggacccagctacaacctcggcgtggccaatctcggcggcaccctggagctgggtagctacaacgaggtcaagctgctgagctggaacgaggtgaccctcaaggacctgcccatcgtcggcggcatcctcggctacgtgccggtggtcaaggacatcggtgtctcgctgccgacgctggacctgcacttcgacagcaagctgtatgcgcaaacgattgccggtgtcgatgtcgccggggtcgggccgaagggccagatcgagctggtgcatgacctcgacaatgacctgtcgatcgtcgccggtatcgccggggataccgcgcacagcgccctggacggtgccggcaaggtgctcgcggcgctgctcggccacggcggcgaagcggcgccgccgacaatccagctgatcggcgccgacccggcgccggagcatcaggccctggccgcctga

SEQ ID NO: 341043 - DNA, 1284 bp, Pseudomonas aeruginosa
atggccgtcgcccctggtgtgttgttgccgccgacgcctgatgtaaagcccaaggccgctgcgccgaagagccagcagaaaacgcctgagcccagtaacgacaagacttccagcttctccgacatgtatgccaaggagaccgcgaagaagcccgccgagcgcgccgacggtcccgcgaagggttcgcgggacaagccgcgggacgccggcaaggaggctgccgaggcgcagccgacggatgccgccgggcaaccggccgttgccgaagacggcaagcctttgccggccgacggccaggccaaggccgacggcgaagataaagtcgaaacgccggtcgatccgctgcaactgctcggcctcggcggcgccgtgccgatgctcgacgagaatacccaggcgactttgctgccgccggccgtgccgacggccagcagtgctccggccagcctgaccgaagccagcagcgacccgaccctggtcaagctcaacggcgttccggcagtgaacatggccctggagcagggtgcccaggacgccgcgcaggcggcgaaaggcgggccggcgaagagcgccgatccgcgccaggcgaacctcggcgatgcccttgccagcctgacttccgactccttgcccaaggccgtcgacggcaaggcgctcgaggcccagttgcagcagaccgccgagccggccatcgccagcgccgcctccgagagcctgctggagagcaaggcggagccgcgcggcgagcctttcgcggccaagctcaacgggctgacccaggccatggcgcagcaggccctgaccaaccgtccggtgaacggtacggtgcccggccagccggtggcgatacagcagaacggctggagcgaggcggtggtggaccgggtgatgtggatgtccagccagaacctgaagtcggcggagatccagctcgaccccgccgagctgggacgcctggacgtgcgcatccacatgaccgccgaccagacccaggtgaccttcgccagtcccaacgccggcgttcgcgacgccctggaaagccagatgcaccggctgcgcgacatgttcagccagcagggcatgaaccagctcgacgtgaacgtctccgaccagtcgctggcgcggggctggcagggccagcagcagggcgagggcggatcggcgcgcggacgcggcttggccggcgaggcctcgggcgatgaggaaaccctcgccggagtcagcgagatccgcagccggccgggtgcgtcggcggcgcgcggtctggtcgactactacgcctga

SEQ ID NO: 341044 - DNA, 630 bp, Pseudomonas aeruginosa
atgcaagtcacctatagccatatcaagcaagtcaaacgtgttgcgaaatcgctgaaagacacctacccctccctcaagctcggtcagcgtcaatacaaggctgccatccaagagctgggggtcaggaattaccatgaagctatccgcctatacgagcaatggctcatgcttcatgtccacacttcacttgactctgatggcgtgagcaaatgctcattctgcgagttcagcttcgcggctgacctcaaagaagatcgcgaagcccaccgagatgttcatgagcgtttccatgaggcgagcgaaacactgggctacagcccgtctcactacgcacagcgtgaacggatgaagcgcgatggtcgtgagcaggcactttcctctgagaatctcgatgtacgcgtggagggtttgctgttgctactgcgtgggtggtttgatcgctccctctccaaagctatcttcggtggttactggcggaagcacccctcgttcgagctctatgtggccatgatccaggataccctctccggaagttatggcgaggtgaaggccgcactgaaagccaagtacggttaccgcccaggagaaatcgcggtcggcgatagcaactggtatccaaagcctcgttaa

SEQ ID NO: 341045 - DNA, 765 bp, Pseudomonas aeruginosa
gtggtagatctaatgctgaggctgaaggagttttccaagagtaccaggagaatgggttgggctagtgaactgattcaggtttttcgcaccgcatctaaggaagcaaatttacttgtagtatttgcaacgaccctgctcttaattaaaatattgatcctcaataagtttcctgcgattttttctggggcgtatgaaattggggtgtgggttgactctattcttgcatctattattgcgagctatgcattctatatcgtagtagttcacataaaagagcggtctgataagatgctactccagccttatgttcataagcacgcagaggctgtcgtgagtcagtgtgtagagcaaatcaaagcgttttcaaaagcgacttccgtggattttgatttgaatagtgttactgaggaaaaagtaaacgaggcgttccaaaagctgaacccttatggggaatccggtcttatcgctgaactcaggcagcctcttgtgtacgcatcctggatgggcagtatgatccattatatgcgtgagactaatgctcgcattgaaaaaatcatttcccaacctttagggctagatgcgagcactgtagaaattctcacaagagtcgaagattgcgaacacttctcatcacttaagattttcgaaaatgtgaagatgggtgctaaagatcttaccaacttttccggtcgattttaccgatactgcttagtgtgccaggagcttcaacgtcacattgacggacgcaagatcgactcgcaataa

SEQ ID NO: 341046 - DNA, 474 bp, Pseudomonas aeruginosa
atggcctcgcactacccagaaatccgctgggacaaacagcacatcgatatcctctgcgctcgtttcgttttgcagccagagcgcttcgacgtggtcgtggcctccaacctgttcggcgatatcctgtccgacctgggcccagcgtgtgccggcactattggcattgccccatcggccaaccttaacccagagcgcaatttcccatcgctgttcgaaccggtgcatggatcggctcccgatatcttcggcaagaacatcgctaacccgatcgccatgatctggtctggcgccctgatgctggagttcttgggcaagcgcgatgaggacgcccgctaccgagccgcccatgatgacattctcaaagccattgaggccgtgattgcacagggaaacacgacccgagacatgggtggcagccattctacccaggaggtaggcgaggccattgtcgcgctattggggcgctctgcctga

SEQ ID NO: 341047 - DNA, 2043 bp, Pseudomonas aeruginosa
gtgtacctttcggctttgaagatcgaaaatttccgccagttcggccatggcgatcacgcgttggacatccagttcaacgaaggcgtgaccgccctcgttggtgaaaacgacgctggcaagacggcggtcatcgacgcgatccgctacgtgctgcaaacccgggatgccgaataccttcgattacagatcgaagacttccacattgccagcgatggtactcaggccgagaccatcacgctcaggtgcaccctggaaggactgagccccgcggaactgggtgctttcgttgagtatgtgacgtacaccggtggcgtggggcgtctttatgtacattggtcagctcgtcgcgttgtcgcctcagcctctacccgcaaatgggtcgacatctcggttcgctcgggtgaaaaaggagaggggccttcgctggacgtgggtgtaaggcagctacttgccactgcgtacctgaagccgctgcgcgatgcggagcgagaaatgtcaccaggccggaattcccgactgtcccaggtattgagcagcttccctaatattgaggcgggtaaagcgtttgatcccgcggcactcccgaccgacctcaccgatgcagaagccctgagcattgccggcatgggtgatttccttcgccacctggtgaatcgccatggcgccatcgtctccgctcagaaagagatcaacgatacgtaccttcggcctctatcgctggctggccagcccctcaccagtcgcatcggctttggggaagcgggaacggatcccgctaagctcaagcagatcctggagcggctagagctcggcctgctggatcatgccactggggaggcgcgcggcatctacggtctgggctccaacaacgtgttgttcatggcctgtgaactcttgctcctaggcaaagagcctgacggacttccgctgctcctcatcgaagagccggaggcccacctgcacccacaacgtcagctccaattgatggagttcctcgaagccgcggctaagccctccacggggttgaggccggttcaggtcatcctcagcacccacagcccgaacctgagttcgaagataccgctgcagaacctggtactgatgcagcggcaacgggcgttctcgctcgccgagagtgaaacttgcctggcacctgatgattatcgcttcctgagccggttccttgatgtgaccaaggcggggctgttcttcgctaaaggcttgctcgtcgtggaaggggatgcagaagcgatcctcctaccgtcactggcacgtcggttgggcaaggatctcaccaagcacggggtttcgataatcaacgtgggcggtgtcggcctgcggcgctattcgaaaatactgcagcgcaaggacgcgtccaagggcgagatcaccgtgcccacggcctgcatcaccgacatggacgtcatgcccgattgcgcgcctgagattcggggtctgaagggggtcaaggggacggtttggccagacatcgccaagcggcgctggcgcgccgaaaaagatttcggttccacaccgggggacattgaaaaaggcctgaaggaacatcgcgagaagcgcggagagagtgacgggcaatgtgtgcggacgttcgtagccgaccactggacgctcgaatacgacctagcgttcaaagggctctcgaaggaagtccatcacgccgcatacctggccatttatgaggaaaagatcgacgacggcacggaaaccaaggctagcctgctgaagaaggcgcagaaagccttcgaaaatatccagacgacccatgcctccgaggaagcccgttgctcagcgatctacaaactgttcaatcgggcgtcaaaagcgatcgcagcccagcacctgatcgacttcattgaccaaggtttcgaaaacggttccttagatgccacgaaattgcggggattgttgccaacctatgttgtccatgcgatcgagtacgcaaccggaggtgcagccctggccaccaccccccggcccggctcacccgctcatggcgacggcagcaccggcaggttctactga

SEQ ID NO: 341048 - DNA, 1989 bp, Pseudomonas aeruginosa
atgacgctcaggcaactggttgcccccattactgacgcagatgtggactgggtcatcgaccttatggggctagataccctggacgagccccgtcgtgatttcttgaagtccatggacacagtcgacgtggcggcctgtcctgggagcgggaagacaaccctggtcgtcgccaagcttgccatcctggctcgccattggaagagtcgtatgcagggtatctgcgtgctttcgcacaccaacgcggccagagaagagatcgagaaacgccttggtggcaccgaggtgggccaacggctgctgcgctttcctcactatatcgacaccatccatggcttcactgcccgatttttggcgtcaccatggttacgctcgcagggcattgcactgcaggccatcgatgatgaggccactcacaaagctcgccgaagggagctgtcatgtcgtgaaaacctaggtgcacaggccgccttcgagaaaaaatttaaaagccttcacaacttgcgagtccggtctgccgacttcgatgatcccctcggaggtgaagacattggttttgcgccacacacggcaacctacaagagcgtggtgaaatcattgagtggcgcggcgaaggccggttacttctgcttcgatgaggtattcgtattagggcacgccttactcgaccaggagccggccgtaggcggtgcattgcgcctgcgcttcccatgcgtgttgatcgatgaaatgcaagacacccaaccagaccaggcggatgttcttcaacgggtctttcctcatgatgacccggatgtccgcgtcattcgtgtcggcgatcccaaccaagagatcttcgagaagaagacgcccttgcaggatcccttccctgatccagggcgtcagttggagattgcaagcagcttccggtttgatcaggccatcgcatcgatcgccaatccgttcgcgtatgtcccaatcacgaatggactgatcggacttcgtgctccacgcgccccgggcagtgtccccaacacgatcatcgtcttccctgataacgatgcaacgggtgtgttggatgaattcggcaagctggtgctggagcaccttccggcggagtcccgaaaggcaggtgtgttcgccgtcggtgctgtacatcggcttgagaacttcaaggcaaaccagtacccgaaagccctggagcattactggccatcctaccggtctgacacgacgaagacatcgttcaagcctcgtacctttgcggaaggcgcacacgttgccagacgtaccgcgatgaaagaagccacagctgctcccgcagttgagttgttggcttcatgcttgttaaaccttggcacactggcgttccccggcagcttgatgcaactgagaggtcgacaccactccgcggtggaggagaagctcaccgcgaagccgcaagcatttgcacagtatcgagagtgcctacagttgatcctattcgggccgtctgaaattaccgagcaggactggctcacgaccattgctccgatagcgctgctggtggcaactgcgcttcatgatgccgaaggcgtgactgtagatctggagggttaccagtatcttgcttggcagacacccccagttgccaatgaggccagcgaaagtggtggctcactgatcaacacctaccggttccaggatggtaccgatggcgtcgacattcgtatgtcatccatccattcggaaaagggcaaaactcacgcggctacgctgatcctggagaccttccgaaagacccactttattcagaagctcatgccgtggctcgaatgccaaaaggcagcggccaagcgaccaccggacagcgccaagaaggacatgatgctgatgtatgtggggatgactcgaccatctcaaatgctgtgcctggctgtccgcaaaagcagcatgggcgaggggccaacgggagaaaaacgaagggctgcgctagaggccgcaggatggtcgattctggaacttgcgacctga

SEQ ID NO: 341049 - DNA, 1110 bp, Pseudomonas aeruginosa
atgctgatcacctccgcaacgccccaagaactcgtagactggttccacaccaggcaagaagaccagcggatcatgtgcgtcatgctggcgccggaattggaagaccagcagaagctgaaggagttgactcttcgctttgcagcggcagacgcttggctcggcagcgaagtagctttcatcttgcttgatcccaacggagattcagctgtggggctcaaccgtggcatgggggaggtaggggcgttttcaggcaccgcctttccgctgcgcgacaccacgggttttcgagatctgacagatgactgggcacaccatagagaacatgtggcgcagacatcagcacgcgggatggcaaggttcgtcccggagttcatggagatttttggggtaaacccccaagacctgccttgcctatcattggtcgttcagggggtggacgagtccattgttctctccttaggaaaggactggactgtcgacgacctaaaagcgcttctgcaaaaaatccgcaagattgtggatgacgccccgaatttcaaaaaagaaatttcgagtatggcaggcttgctaccccaatccttggagcgaatccaagatctcgtcaacagcatcagtgcaaaggtagctcaggcatccaaaatcttggatcaagtgcttcgtcggcatagtgggaacgatgacgatcgtcaaatggtggcatcgtatgtaggtcaaggctgtcaaggacgtgagattcttgaaagcgtcctcgcgcggttctccttcaaggattctgagaaattcctcagggacgaacagatcacgcgcttgttgaagctggcggatgaactggatagccgtcgagcaccactgattgagctgaaacggggtgggctctttatcccatcggtggcggagctggcccagcattgggttgaaagccgtgacaagttgttcgaagagcttcaaggccttttaccagctaagcaggtcgccactacccggatcaaccgcggccagctgacccggctcaagtcagtcctggaatttgtgaacacttcgggagatgtcgtgggtaaggcggttgctgcatatgactggatcaccaagctgatggggaagggcggctag

SEQ ID NO: 341050 - DNA, 408 bp, Pseudomonas aeruginosa
gtgaggaatgagcacttcagtattttcaaatgcatttgggagcaggatctgaatgacctccccgaccaccctgtcatctactatgggtgggcttacatcgaccgcaccagaaaaaacgacgcataccggatcaagttcaagaaatgcttgatgcgcggagccgaaagcctgacgacctcaagcttcgtttcggacaagctcgttgagcgctacaagctcaagaacctcatggcgaccaggctttcaaagatctcccaggagtccaagccgaccgcgttcgtgtttgtgtacgggcagcccaaagtccgtacgtcaaatggaacaagctatgccaatttcgagttgcagaacttggacatgattgacgtcaattacgactgcccattgccctccaagtatgacaagtag

SEQ ID NO: 341051 - DNA, 696 bp, Pseudomonas aeruginosa
atgagccacgatacgctgcgggtaaggctgctcgcattcctcttcctgattcccctggcgctctacgcctggtccgccgtgcaggccttccgggtcgactcgaccctgcgcgacgaacagttcatgcgcgactggagcgcctcggtgcgcaacgacccggacgccgccggcgccattccccgtcacctgttccgtccggcctatggcgtcgaaggtcatcttcaccagttcgccgaagacgccgaggccatccgccgcgaccatccttggctggctctgcgcggctggctggccgctatcggcaagctctgcgcgctggcgtcggcgctggtcgcggccgccttgctggcgagactggaatacgacgggcgccgctcgatgcgctcgcaagcctacctgctcggccacctcgcgccggcctggcggcgcctcggtcgactggtcccgctgcacgccggcctgctggtcgccgccctggccagccagttgctctacgaagcgctgtggagctatagccactggcacagccacggcttcgtcgccctgctcttctcactgccgctgtggctgctgttactcggcggcctgctcatgctgcggcgcctgcgcggcgaactgctgccgctggaggaaccggtgctccacctgctcggccgcgaactcgaccgcgtcgccgcgcccggcctctggcaatga

SEQ ID NO: 341052 - DNA, 600 bp, Pseudomonas aeruginosa
atgagcgaggccgaaagcgccgcgatcatcggccacgaactgggccacttcgccgccggcgacaccgcccacggtgcatccctgtcgctcctgcagcggcaggtgcgcctgcgcatcgaacgcatcgccgcccccgaggatgggcgtgtcggcctgctcggcaagccgggcctgtgggccgcgctgtacttcctcgatcgcttcgagcgcgcctacctgcactggaatcgccgccaggaactggccgccgacaaggtcggggcgcgggtagccggcgcgcgggtcttcgccatcgcgctgctacgcacctgcgcccttgcaggactgatcgaacgcctgctggccagcccgcagacgcgcaacctggtgcatgcgctgaccgaccatctgcgcgggaactccctggaactggacgaacacgacagcgctcgccgcctggaacaccccttcgacagtcacccgccgacctaccagcggatcgcggacctttccctggcgctcgacgacgatctgctgcgacaggcaaggcgcatcgtcagcgccgacgacacgcagtggctcaaccgcctgctcgatgcaggccacggggaaagccggtga

SEQ ID NO: 341053 - DNA, 699 bp, Pseudomonas aeruginosa
atgttcggcggcaaggatgtccgggcgtcgctcgatcagctcggacggcgtgccgggagcgatgtcctgcagcagcttcggccgctgccccggactccgcggaatcgcctgcgcggcatcgtcgctacccagcagcaacaccagcgcgttgaatgcctgctgtttctgccgcaggttgcgctcctgctcggcgcgcgcctgctccaccaggccaagggcttcctggtagtccagcgcggtggcggcgccggccgcgcggcgctggtcgatcagggcgaaggaatactcgcggctgaccagggtctgacgggtcagcgccaggcgccgcagggcgccgtcatagctcaggtaggcctggctgacctcggcgaccagggcgatccgtgccgcgcgcgctgcctcctcgctggccaggtactgttgcagggctgcgtcggtcaggctcttgacccgaccgaagaggtccagttcgtactccggcagggccagcccgacctggtagctgctggccacttccgagcgattgccggcggacaggtcggccggctgccgctggcggttgccggtggcagcggcgttcaggcccggaacccggtcggcgcgctggattcgatactgcgcgcgggccgcctcgatatccaggagggtctggcgcaacgagcggttgttatccagggccacgtccaccaggcggcgtag

SEQ ID NO: 341054 - DNA, 642 bp, Pseudomonas aeruginosa; identical to SEQ ID NO: 324348

SEQ ID NO: 341055 - DNA, 2391 bp, Pseudomonas aeruginosa
atgaataagcagacgctcagcgaacgcgacatctgcaccaagttcatcacgccggctctggaaaaatccggatgggacgtcctgacccaagtacgcgaagagttcctgctgaccaagggacgcatcatcgtgcgcggcaaactgcatactcgtggtcagcacaagcgcgccgactacgtactgttccacaagcccaacctgcccattgccgtcatcgaagccaaggacaacaagcatgctatcggctcgggcatgcaacaggccctcggctatgccgaaatgctgcaagtgcctttcgtgttcagcagcaatggagatggcttcctgttccacaacaagatcgccaaggacggtgtgatcgagcgcgaactgagcctggacgaattccccagtgccgatacgctttggcaatggtgggcagagcatcaggggctgagcacgcagcaacaggccttggtagcccaggactactacagcgatggcagcaacaagacaccccgttactaccaattgctcgccatcaacaagaccatcgaggcgattgccaaagagcagaagcgcattctgctggtgatggccacgggcacaggcaagacctataccgccttccagatcatctggcggttgtggaagtcgcgtgccaagaaacgcatcctgttcctggctgaccgcaacatcctggtcgatcagaccatgaccaacgacttcaagccgtttggcgcagcgatgaccaagatccagaagcggcaggccaacaagtcgtatgagatctatctgtcactttaccaggccgtcaccggtaacgaagaagaacggaacatctacaagcagttcagcccggaattcttcgatctgatcgtgatcgacgaatgccaccgaggcagtgccgccgaagattcggcctggcgcgagatcttgacgtatttccattccgccacacagattggcctgaccgctacgcccaaggaaaccaaggacgtttccaacatcgactacttcggcgagcccatttacacctactcgctacgccagggcatcgatgatggctttcttgcaccctacaaggtagtgcgcatcgacctggacaaagacctgacaggctggcgtcccgacaagggcatgttcgacaagaacggcaacgagatcgaagaccgtatctataaccagcgtgattttgacaagacgctggtactggaacagcgcacgcacatggtggcgcgcaagatcagcgaatacctgaaggccagcaaccgcttcgacaagactatcgtcttctgcgacaacatcgaccatgccgaacgcatgcgccaggcgcttgtcaacgaaaacgccgacctggtggcgcagaaccaccgctatgtcgtgcgcatcaccggcgacaacgaagaaggcaagatggaattggacaacttcatcttcccggaaagcaaataccccgtcatcgcgaccacttcaaagctgatgaccactggcgtcgatgcccagacctgcaagctcatcgtgctggatcaacgcatccagtccatgactgaattcaagcagatcatcggtcgcggaacgcgcatcaacgaggacttcgacaagtactggttcaccatcctcgatttcaaaaaggcgaccgaactgttcgccgatccggctttcgacggcgatcccgtgcaaatttatgagccaggccccggcgagccaccgcttcctccagatgaagaagatggggaggcgtcgcctgacgatgaattcagctatcccacgccggacgacaaccccacgtcccccagcggcgtagccgaaccgcggccaggtgaggaaggcagcaacgtgcgccgttacgttgtcgctaatgtcgaggtcaaggtggtggccgagcgggtgcagtacttcgacgccaacggcaaactgatcaccgagtccctgaaggactacacccgtaacaccctggccaaggagttcgcgtcactcgacgatttcctgcgccattggagcaaggccgagaagaagcaggccatcatcgacgagctggctcatcaaggcatctttttcgaggctttggccgacgaggtggacaagcaatccggcaaggatttcgaccccttcgatctgctgtgccacgtggcctgggaccaacccccactcacgcgcaaggagcgggccgagcaggtcaagaagcgccattatttcgccaagtacggtgagcaagcgcagaaggtgctcgaagccctgctcgacaagtatgccgacgaaggcgtggccgccatcgaggaaacgcaaatcctcgccatcgcccccttcaaccgcctgggcacaccgatcgaactggtgcgtgcctttggcggcaagacccaataccaacaggccgtgggcgagctcgagcgtgagctctaccgtgcctga

SEQ ID NO: 341056 - DNA, 1479 bp, Pseudomonas aeruginosa
atgtcacttgcaactcttatcaaagccatccaggacatcatgcgcaaggatgtcggcgtcgatggcgatgctcagcgaatcagccagatctgctggctgttgttcctgaagattttcgacgacaaggaacaggagtgggaactgacccagtccagctatcgctcgccactgcaaagccgctttcgctggagcaactgggccaaagatccggaaggcatgaccggcgaagagctgatcgacttcgtcaacaacgacctctttccttctttgaaacagcttgccaccaaggcgggcgtgtccgcgcaaggccgggtgatcggctcggtgttcgaggatgcctacaactacatgaagtccggcacgctgctgcgccaggtgatcaacaccattgaagaggacgtggatttcaactcgtccagcgaccggcacctgttcaacgacatctacgagaaaatcctcgccgacctgcagtcggctggcaacgcgggcgagtactacaccccgcgtgcggtcacgcagttcatggtcgatatcctcgacccgaaactcggcgaaagcatcctcgacccagcctgcggcacgggcggcttcctgacctgcgccatcgagcacctcagaaagcaggtcaagacgccagatgacaaccggctgctgcaagaaaacatccacggcgtcgagaagaagcccctgccgcacatgctggccatgaccaacatgatgctgcacggcatcgacgtgcctacccggatccgtcacgacaacacactctctcgccccttcaaggactatggcccgcgcgaccgggtggacatcatcatcaccaacccaccattcggcggcatggaagaagatggcatcgagaagaacttcctcgccaagcatcagacccgcgaaaccgccgacctgttcatggcgttgatcatgcacctgctcaggcacgacactggccgcgctgccgttgtgctgccggatggcttcctgttcggcgagggggtgaaaaccacgctcaagcgcgaactgctggaagagttcaacctgcatactattgtgcgcctgcccaaaggcgtgttcgccccctacaccagcatcgccaccaatatcctgttcttcgagaagggcggccccacacaagacgtatggttcttcgagcatccctacccggcaggctacaagagctattcccgctccaagccgttgaccattgaggaattcgatcttgagaaaatctggtggggcggcccgcagcgtaaggggcgcaagaccaccgagcatgcctggaaggtctctgccaaggatctggctgctcgcaactacaacttggactgcaagaacccgcacgaggtggctgtcgagctgggtgatccggacgaactgatggccgaataccagtacatcacccgccagttgcaggctgcccagcaagcgctgaaaacagaactgctgaccgcgctcaaggccaccagcggggaggcggaatga

SEQ ID NO: 341057 - DNA, 1041 bp, Pseudomonas aeruginosa
atgagcgacaaacccgtgtctctcgttacggccccggaaggctacgccaactggttgggcgagctgaagaaccgcatccacagtgcccagcagcgggccgcgctggccgtcaaccgggaactggtgctgctctactggcagatcggccgtgacatcctgcaacggcaggccgagcaaggctgggggggcaaggtcatcgagcggctggcgcacgatctcaggacagcctttcccgagatgaagggcttttcccgcgccaacctgatgtacatgcgctccttcgccgacgcctggccggacgcggcaattgtccaacaggctgttggacaattgccctggggccacaacctggtgctgctggccaggctgaagcagccagaacaacgcctggcctatgcccagcgtgccgtggaacacggctggtcgcgcgccacgctggaaatccatatcgaatcccgcttgctggagcgggaaggccaggcgatcaccaacttcgccgaccgtctccctgcgccgggaaccgatctggctcggcaagccctcaaggatccctacctgttcgacttcctggatgtcggccaggaagccaacgagcgggaaatcgagtcagcgctggtcaagcacatcacccagttcttgttggaactgggtgcgggcttcgccttcgtcggccgccaggttcatctggaagtgggcggtgacgacttctacatcgacctgttgttctaccacctcaagctgcgctgctatgtggtcattgaactgaaagccgagaagttcaaaccagagcacctcggccagttgagcttctacctcactgccgtcgatatgcagattaaggccgaacaggacaaccccaccatcggcctgttgctctgcaagagcaagaacaccgtggtggccgaatacgcattgcgcgacaagacccagcccatcggtgtggcggaataccaattgatcgaatccctgccggaagaactgcaaaccagcctgcccagcatcgaacagatcgagcgtgaactgggaggcgagcatgaataa

SEQ ID NO: 341058 - DNA, 1683 bp, Pseudomonas aeruginosa
atgaataagcacaccatcgaactgctggaaaagcacttcgacactgcctttgtcgcactcgaaggcatcaagaaactgcgtgagctgattttgacgctggccatgcagggcaagctggtgcctcaagacccgaacgagcagcctgctagcgaactgctgcaagaaatcgaagccgaaaaacaacgattggtgaaggaaggcaagatcaagaagccaaagcctttaccgccgatacgggaagaagaaaagccttattcgttgccgcagggatgggagtgggcacgcctgcaatccttctctgactacaacggtaggcccaatattgatccgagcgaaatcgccgaggatacttggctgcttgacttggaggacattgaaaaggaaacctcccggcttatctgccgagcaaggtatttccagcgtgaatcgaaatcgaccaaatcaacctttaaagagggagatgttctttatggaaagctccgaccatatttggacaaagtgttggttgcagactcggctggtgtctgcactactgagatagttccgattgttccatccaaagcagtcatccctgattttctacggtggttgttgaagcgcccagatttcctttcccacgtaaatacgctgatgtatggcgtgaaaatgcctcgcttgggaacggaggatgccatccatagtgttcatccgattccaccagtaaatgagcaacaccgcatcatcgccaaaatcaacgagctgatggcacgttgcgatgaactggaaaaactgtgcgccgcccagcagaaggcacgtctgaccgtccataccgctgccatcaagcaactgctgaacatcgccgaacccgaccaacaccagcgcgctcaggccttcctcgccgaacacttcggcgagctctacatcgtcaaagaaaacgtcgccgaactgcgcaaggccatcctgcaactggcagtcatgggaaaactcgtcctgcaaggtccgaacgaccagcctgccagtgaactactgaaagagatcgaagccgagaaacagcggctagtgaaggaaggcaagatcaagaaacccaaacccttaccaccggtcaaaccggaagaagtaccgtatgcgctgccccaaggttgggaatgggtgaggttgggtgatattggttatacaaacattggcttaacctactcacctgcggatgtttcagaggcaggtattccagtccttcggtcaaacaatatcaaaaatggaaagctcgacctgtctgatttgaaacgtgtccagatgcaagttagggaatcgacgctggttcatgataatgatctactgatctgcgcgcgaaatggcagcaaggcactggtcggaaagacagcactaattgccgatcttactgagccaacggcttttggtgcctttatggcaatttttcgaagccgcttcaatcagtacttgcttcacttcatcaactcaccgttatttcggaatatgattgatgaggtcaatacgatgaccatcaaccaaatcacacaggataatcttcgctctactattttcccattgcctccacttgctgcgcagcgccgcatcgtcgcccaaatcgagcaactgatgaaatcatgtgattcattggatcaaaagatcgatgccaccaccaccaagcaagctgaactgctgagcgcagtgatagcgcaggcgtag

SEQ ID NO: 341059 - DNA, 1872 bp, Pseudomonas aeruginosa
atgcgcctgacatcgctcactatcagccaatacaaaaacctccaggatttttccctgagcttcgacagcagcagctttattgacgtcttcgttggcaagaacggcagcggcaagtcgaatcttttcgaggcactggttgaaatcttccgccacatctacgagttcgatagggagaagggcgatatcagtttcgactactccatcaaatacgaaatcgatagcaaagaaactgaaatcgcttggagggcaggtaagctcagcatcaacggcaaggagcgcgctactatcggcaggacgccattgccagacaatgtgctgatctactattccggtcacaacaccaccgtggccgatctggtgcagcggtacgagggtggcttccgcaagcgcatcaaaggcgcaaatctcgatgaaagtcgccgctttattggcgttggccaggagtacaaggcacttctgctatccgttttgctgacacaaccagcgaataacagggcgcggcattttgtttcccggaagctgggaatagaaagtattggcactgatttagagctggtgttgcagcggccatcatttgccgctggcgcactcaaggcacttggcgcggacagcatcgagaactttgatcctcgtacccactattggggtgcggacggcatcacgcgtgactttttggagaaattggtcacctgtgtcaagggtgagtttaatcatggcgacgtgtttgatgcagacaaagacggctatcagatacccgtcaacatcgaactgtttcaacagcgctttgctgatgagtcgatgtcggacatcttccgccaattcgataatttaaagacactgggcatgctggcggatatctcgatcccgctcacgctgaccagcggattgaacgccactattactcatttcagcgatggccagtttcagtctatctacatttattcgatcgttgagttattcaaagaccgcaattgcctgatcctactggatgagccggatgcttttcttcacccagaatggcagtttggttttctgcggcaaattttcgacatcacggatgcagcagcaaaaactagccatatcttgatgagcagccacagtgctgtaacgctcatccctcacgacaagaaaaagatcaaattttttgacatcaagggcagtcagacgaactgctatgacttgccgaaaacaattgcaatcaaaaaactgagtgcagatttaataaagtattccgagcaagagcagctgctaagtatcatcaatgcgattcaaatagaacgaaagcctgtgctatttaccgagggtagcactgatccgatcatcctcaaggaggcttggtacaagctatacgaagaggagatgcccttcattcctttctatgcgttcagctgcacatacatcaaccagctgataaccgataatcgtattcacggcgaaatgggtggcttgccaatatttgcgctatttgacttcgacaaggcctataaccaatggaatggtttggatggcgaggtgctgataactgatccaacacaaggtttgatcaaaaagtggaaaaatggtgaatcctacgcactcatgctacccgttccgccacatgtagatattcagaggcaggtcatcaaaaacgcggaaacaggtgaaacctttggtggtgaatcgtgttgcgagatcgagcatcttttctatggacatgatattgctgcggattattatcaccaagagccgtgccctggaggtagcaaagtggcattcaagtcggacaaagataagactatttttgcaaaaacggtcgtgccgcagttgcctgtagcattttttgagccacttagacccgtcttcgatttcgtcgccagaaaatgtcgagcataa

SEQ ID NO: 341060 - DNA, 1944 bp, Pseudomonas aeruginosa
atgattctgacggacaacgaaactaaagtcgatctgctcaataacgaggctattgccacgacgatcattgagttgcttcgcaccagacctgatcacccagtcacgattggcgttcatggcgattggggcgcaggcaaatccagtgtgctcgaaatgatcgagtccgggctggacggcaaggatgatgtgctatgcctcaagttcaatggttggcgattccagggctttgaggacgccaagatcgccctgatcgaaggcatcgtgaccgcgctgatcgagaagcggcctgcgctgacgaaggccgcaggtgcggtaaagaacgtgtttcgccgcatcgattggttgaaggtcgccaaacgagccggtggtttggctgtcaccgctttcactgggattccaacacctgatcagctccagtccattgtcggctctcttgaagccgtattggctgaccctgccaaactcgccacgaaagagaatctctcggcagcagtggaggaagtgaaagggatattgaagccgagcgaagcaacgaatgtccccgaggaggtagaggcatttcgcaaagccttcgacaaactgctcgaagaggctggcgtcaagcagcttatcgtattgatcgacgacctggatcgctgcttgccggataccgccatcgagacacttgaggcgattcgattgttcgtcttcaccgcgcgtactgcttttgtggtggcggctgatgaggccatgatcgagtatgcggtacgcaagcattttcccgacctgccagatagtaccggcccgagagactatgcgcgcaactacttggaaaagcttatccaggtgccgttccgcattccggcgctaggtgaagccgaaacacgaatttatgtgaccttgctgctggcaggggtcgaattcgacgagacggatgcaggatatgcaaggctcatcgaagccgcacgcgagaaactcaaacgcccttggatgagtggcggcctggacgcggcaaccttcaaggccgcactgggcgaacaagctggaaaagccaataacgcactcgtattgagcgaccagattggccctattcttgccagtggaacgaaaggaaacccaaggcagatcaaacgcttcctcaataccctgttgctacgcgagcgcacagcaatagctcgaggcttcggtgaagacatccaactgccgatgctcgcaaagctcatgctcgcagaacgcttcctcccgaagctgttcgagcagattgcctatgtggctgcagttcatccgcaaggtcagtgtgaagatcttcggttcctggaagagaatctgaataccgctttgcccagcgattcgcctgatgatgacgaaggcaagaagcaggcgaaagaatcatcgccggcatcagaaaccgccatgctcgcagaatggaaggcatcggatgtggtgtgcaattggtctcggttggtacctgcgctcgcgagtgtcgatttgagaccctatctattcgtcaccaaggataagaaggactacttcgggccggtctctgtcttgggacatttggcgggcgtagtggataagctgttcggcggcaagatgaccgtacaaggctatgagacagagttgaagcaattggctcagccggaagctgacaaggtatttgaggccgtgcgtagtcgaatcatgagcaccggcgcttttgataccaagccggacggtattgatggacttatcgtgctcgtgaaggctcaaccgagcctgcaaggacctttgctggattttctggaagcactgcctcgagaaaaatgcggagcctgggtagtcgggggctggcaaggagtcgtcaaggatacagagtgcagtgctcgtttgctcaagctattgggtgaatggagcaaggtgacgaagaatcctttcttgaaggccgcagcagagaatgcactgaaaccaccgaagggagtccgataa

SEQ ID NO: 341061 - DNA, 873 bp, Pseudomonas aeruginosa
atggggacgtcaacagcatatggtggcccaggtggagacactccattggttccctcgtggttgggggacccaccagcatcaccgccagcgaatcccgatggagccccagacagcatgccaccacttgatgcagccaacccaccctcgcctccggaaaagcccccaataccaaaggtcgcggatccgcagcgcttttcaggcgcacgcaacaaccttacgagattcgcaggatctggcggtagtgatcgaaccaatcttggccgagccatctcgcggtatgtctccacatcctctggcggcgctcgccaagcagcacaacggatgggcgcatcacgcagtgccggcgcaagactgcttggattccttaccgatgcgaatgcgcgagggatgcgtgaagcgctgcgtgagttcaatctcgactccatggcgggacgacccgtctcggaagtgttcattgcgctggccgatcacatctgtccgggagcgggtaccgtcgatgaaggcattgcgcgcgaagcgtatatcgaaacaatcatcgatctggcgaacgaaggattggccaatctgacggccttcacgccggagcagatggatacggtttttgagttgtacgccacccatgcgatcgaggcgcgtatttgcaatgacattggcacgaaggtggtcacgatgccatcggatgcacaggctgcacatcgagttgaaaagcaattgagggacttcatacgtggaggcgtgagcgatgctttggcgcgggcgcgggagaactcgccaaatctttctcatgatcgtattcagtcattcgtagacagcgtttacgagtccgcatttgccattctgcagtctctgggagaagcggaggccgaccaatga

SEQ ID NO: 341062 - DNA, 1368 bp, Pseudomonas aeruginosa
atgaagcgacaactgttggctggccgcttcggcccagatgaccaattggatattccagcaggcagggatgagcagcgtacctatctgcagctcgtggctggagagaaatcgctggatcatggcattgctggcgcgttgatcagtctgaaaaatcttggcattacgccatccgaaatcggtgtggatttgctggtgttggcagcccatgtacatgccgcagatacccgtatttctcgtgccgaacagtctcaggactcttggacacgagagatccgcctggtcgtaccggtcagcgatccgcctcgatggatagccacggcacccatactgaaaagtttgctgaatttcttaacaggagatcgttgggagctaggcttcagggctcgcccttctcggtttgaatcagtcgtcgagccagcagctcccagcctgattgcccatcccttcgacaccctcagcctattctcaggtggtctggatagtctgattggcgcaatagatctcctgcacagcgggaagactcctttgctgatcagccattcaggagatggtgcagccagtgatgcccagaacaaactgttctctggcttgaaagcatactataagcagtcgtcgtttgaacggctgcgtgtggggatgacctttaagcaggatttgataaaaggcgtcggcccagaagacagcacgcggggaagatcttttctcttcttcgcactcggagtccttgccggaaccgggttgggacggagctttaccctacgcgtaccagaaaatggattgattgccttaaatgtaccgttggatccgttgcgcctcggatccaacagcacacggacaactcatccctactacatggcgcgctggaacgacttgctgagcgcacttagcatagatggaaaggtgtggaatccgttctgggacaagacgaaaggagaaatggcgtccggctgtcttgatcccggcttgctaaagcaattggccggggactcgttatcttgctcatcacccaccaaaggtcgctggcaaggcttgggtattgagcattgtggctactgcttaccctgtctcatccgacgtgccgctttggaagccgcatggggagcagggagcgacgacacccggtacacggtttccgatctgcacgcacagattctggatactcgcaaagcggaaggcgtgcagatcaggtcattccaatatgcaattgcgcgactcaagaggcagccccagcttgcggccctgttgatccataaacctggttctctcgccgatgagactgcacatctcgatcagctcgccgatgtctataaacgtgggcttgcggaggtcggaaagttagtcgcaggcgtgcaaaccaaaccgagttga

SEQ ID NO: 341063 - DNA, 762 bp, Pseudomonas aeruginosa
atgtggagagatgtgagcgtgacggcaggattggtggacttccattgccatctggatctttatccagaccacgaaatggctgtccgtgaggccgacgaggctggcgttttcacacttgcggtaactacaaccccaagggcatggcctcgcaatcatgagttggcacaacgcacgaaacatgtgcgcgcggcactagggctgcatccgcaactggtggcagagcgtgaggcagaaatcgcgctgtgggatgactacctatccgaaacccgctatgtgggcgaggttggcctggatgcagggccgcgttattacaagtcaatggaggcccaacagcgcgtttttcagcatgtcctccgacgctgtgcgggagcaggcgacaagatcattacggttcacagtgtgagagctgtaagagtcgttctggagcatgtcgaagcgttcctgcctcgtggcaggggtaaagtagtcatgcactggttcacaggtacgaaaagcgaagctaggcgagccatggagttaggatgctacttttccatcaacgcagctatgctggccagtgagcggcatctgaccatggttcaggcgattccgttggataggctactgacagagacagacgggccattcactcgaacaggggacaggccatctaagccgtccgatgtagcgtgggtcgtggaggaactgggccggctgcatcgactacctacagcacatgttgctaagatcgttcgcgacaacctgcggaaccttgtcagctga

SEQ ID NO: 341064 - DNA, 1608 bp, Pseudomonas aeruginosa
atgcccagactactaagcaatagcgcagtgcggttgctagaagccagccaggagtcactcaccttagctttgatttccataggtacaccaagccgtggcgagctacgagtagagagcgctcgatacgcatccgcaattggactaataggggctgccgcagagcaagcattggcagcgatcatcgtgcaagttcgaggtgaacaagcgatgaggctttcccccacgcaattcaaaagcgcgcgacaaatattaagcgacgtgagagaccttcttcgcgcccctgtaccagcagcctcgtttctaactgctgggatcgcaaatgcggcgagacatagggagcttgtgatcgacgcaacacagggcttttcactcttatttacgcagcgagctgctggtcttcatgctggagcaggagtgtctcgggctgtcacactgatgcaagctcttaaggtgcatggatttatgaagctcctagggcactcaactcgtatacgcccctacctagatcagatccccacaccattagaagatgtaatcgaccagaacgtgttggtggatgacctcatacaaaaattccaaaatgcgcaggcacctgccgaacgggtaagtgccttgcgctcattatttctagttctgccagagacgccaccagaagctcccgaatggcttgaagcatttgatcgatcagtcgtcacccctacggccgcagatatcgccctgctcttaggtacattgcaaaatgctgcgcctgtccgatttcagcgtattaatgcaggcggcgatgggttgaatgtagtggtgcggccgaatgaccccaacgctctggcgattgctcctcagtacttgcgtcgtgccttcgccgacatcccagaccagtttggagccgacgtcggcattgcgaatggccgactgaatgaaggacgactagatgttcctccagagtccttccttctcgacctttgccttctcggtgccaaccagatatctcatattttagggcggcctgtccttacctcccaggaggtttggccatttgtggctactgcgctgagtcaacaaggaactgaacgtccgttttggttcctcatttcattagtcgacgacatcggtcgtctgaaaggccagctgcgccttgctgctaacgcatcccctcatgcccagttcagacaaagagtcgaaacaacaatagacgctctagaggctaaaaggcatgggcgcccgatagctccagaccatgaaatagctcttttcactaccaatctacttcgactatctgatcaagctcttgaggacctgccggcagcaatagagcgctccagagatactgaacgggagccagccccccctgtcttagcggctttaactcgcgtcagagaacgtgaaattaatcctgggcaggcatatggtgcgatcctcgagatcgcctctgacatctcgcgcgtatattgggctaaacgactcgctgaatgctctactgaagtggaggatcgagagatgctagtaggaattttgcgtaacgaggatttgacaacagcaaagaccgcagcgagaaaggctctacggctggcggacattatgacttatggccctcaaattgagcttgattaa

SEQ ID NO: 341065 - DNA, 696 bp, Pseudomonas aeruginosa
atgaaagcagacagggacgatgcgccggaacacttgaagagaaagcgggaccagagcattggtaaatggacgcttgcaattgctctagggctaggactttcaggattggctttacacatggcaggaaacaaactctctttccttccaaaaccacaacccagccaaccacctaaccttgaaaaacctgccccctcccctaacgagaacacccccaagaatcagccccaaaagacatcagaagagcttttttgggaaagcgttaatgcacgcaaccagcagaaccagcctaagcaaaacttttacgatgatagcaattacacgcctaaaaaaccggccaacacctacacaccaccagcaacccatcgggctacatcctcaccccagcaaacacaacaacgtcaaaccagacaggtaagccgcgaacgaacttccaaatggatcaagagctggaacggcggcacgaactatctggcagaatggttatcggtgaacaactacatcgacagcaccagtgtctgcgccaatcatcgacgcgggtcaatcgactaccgcgaatgccgtaaggctgccaagcagcacttccatgagcagtgcagaatctggcgtgcccgttacgacaatgaccgcaaaacaaatagtgaccgaatgaagacacgttactgcactgcggcgagcagcttcagaccaatggggtaa

SEQ ID NO: 341066 - DNA, 201 bp, Pseudomonas aeruginosa; identical to SEQ ID NO: 320107

SEQ ID NO: 341067 - DNA, 450 bp, Pseudomonas aeruginosa
atgcacttcatcggagccatgcccatcatcggcatgcccatccccatgcccatcgtcggcatcatcgccatgcaggcctgggacatgcccatcatcgccaggttgccgcactgcatcatcatgggcatgccgcagttcatcatcatcgccatcatctcggcgccgttgcggaactggcccatgtccatacccatcgccggcatcatcttgcacagcatgccgtcgtccatcgtttcgcactgcatggtcgccatcatcatcggcatgcccatcatgggcatcatcggtatggcggcattcatgttcatcggcatctgcatggcattcatcatggcggtaactcctgtaggcgaagcgggggtaggtgcgaatggggccgattctaggcagcgccgacgcaccggcaagatgccggtgcaacagccgagccgggcgctgcatggtggctag

SEQ ID NO: 341068 - DNA, 840 bp, Pseudomonas aeruginosa
ttggagttatggctggaaaagactgaccgtgatgccggcctaccgaagtccgatccccatgatgaggaaagccccacttactggggcaacatcctcgaaccgatcgtcgcaacacactacacccgccgcagcggacaccgagtacggcgcatcaacgccgtactgcagcaccctgatccgaaactgaaatggatgctggccaacatcgatcgcgaagtcattggcgccagcgatgtgcagattctcgaatgcaagaccgcgggcatcaacggtgcgcggctctggaaagaaggcgtgccggtgtatgtgcaactgcaggtgatgcatcagttggcggtgaccggtaagcaggcggcagatgtagccgtgctgctcggcggccagcagttggagatccaccggatcgagcgggacaacgaactgatcacccggctgatcgaactggagcagaacttctggaactacgtgcagcgcgacactccgccgccggccgatggttccgagtcagcagagcaggcgctgcgctgtctctacccagaagacaatggcaacacccgggacttttcccaggatcccattctctgcgccgccttcgatgagctgaaggaagcgcgagccattctcgaggtccacagccagcgcgaggctgagctcaagcagtttctgcagcaggccatgggtgaagccagtcgagcggtgtttgccaacggttcggtgacctggcgcaaggccaaggacagtctggcactggatgtgccgcagttgctgaaagaaaagccgtacctcctcacacgcttctccaccaccaaaccgggaagccgtcgcttcctggtcacctga

SEQ ID NO: 341069 - DNA, 924 bp, Pseudomonas aeruginosa
atgctcaaaggcttggctattacgccgcccgtactcgggcggatttccatcggcaaggtcgtcgagaaaaacggcaaacgcctgccggagaaggacgatcaattcaccatcacctcgcaggtgcaactgcgtgatggctggatccatcaccccatcgacgaggagctacgcaaagcccagggaggcaagattcgcagcatcccgatccgcctgctgttcaattcgcccgacctgaattttcgtgccgagtactgcctgtttgatcggcaatccggccgaccgatctgcgttggcaatggcgagacctgcaagcgccgcggcaaagacaccatcgactcactgccctgcccttcacccgacggttgcccgctagcgaaaggtggcgcctgcaagccctatggccgactcaacgtggtcatcggcgatgaagatgcattgggcagcttcgtgtttcggaccacgggtttcaacagcatccgcaccctggccgctcgcctgcagtacctccaagcgatctcgggcgaccgtctggcgtgcctgccgctggagctacgtctgcgcggaaagtccacccgacaaagccatggctcaccgatcttctacgtcgatatcaccgtacgcagcgggctgtcgatcgaagctgcgctgcagcatgcccgagagaccgatgaggtacgccaagcatccggcttcgaccagcaagccctcgatgctgcagcgcgccagggcttcgccaatggagccttcgaggaaagtgaagaagaaggcggcgcgatcgttgatgagttctttcccgagcctgcggccaccacggcgacttctcccgctctagcaaacgaacaaatcaccgccagcacgcgcccgacgctatcgacgctgctgcgcgaacgcgctgaagcgcgcaatcagcaaccaatcaattag

SEQ ID NO: 341070 - DNA, 180 bp, Pseudomonas aeruginosa
atgctcatcctcacccgcagcgtcggtaaaaccatccgcattggcgacgatatcgagatcgtcatacttcgagtcaacggcaatcaggtgcgcgttggtgtttccgcgccgtcccacatcacagtgcatcgcgatgaggtctaccagcggatccaagcaaaccaacattgcccgtcctga

SEQ ID NO: 341071 - DNA, 180 bp, Pseudomonas aeruginosa
atggggctactgcgctttctgggcctactctttgtatttttcagcatcttcgccggtacggcagccgtggttggactagcagtcctggctatgcgcctctggccattgttgccgacactcatcgtggcgctcgccattttccacttctccatccgacgacgctcgtctatccggcgttag

SEQ ID NO: 341072 - DNA, 603 bp, Pseudomonas aeruginosa
ttgaagtattcgtcacccttacccctcctcggggctgctgttgctcttctcctagctttgctggccctggcaaatggtaactggcctagcgccggacttttcttcattgccggtattctcttagcaatccgtggcgtcctccgcgtgccattgttccaccaaacgccggtgctcgaactcggcgccggcctgttaaccgtagtttcaattatcgcggtactagctggaggcagagcgtttcaccccgagaatgccgcagctcatgccgagttgctagagagattttccgaggcagggactcaacaaaattcttgcccgagccagcaccgtgatatctccgcgatccttcaggtcggtattaaaagctgcggacttcaggacactacagacatgatgtcctttgtttctgaactgaagaaagcccaaagcttcggccctaccttgagcgtgatagacgggcttaccagctcatccagctctggccgtaccgatgcttgctatgaaagttacatcaggacgacggagctctgtccagaagcgcttggatcaatctccaagcgagctgcggacgccatttatagttataaagaatcccaactctaa

SEQ ID NO: 341073 - DNA, 801 bp, Pseudomonas aeruginosa
atgccaatttgtgagttctgccaaaagcaagccgttctaacgaaagagcatctatggccggcagctttgcataagcgtctatacacaattaatcagcagtccaggaagatcttttggttatctaaaatacaacgtgaaatacctagcgaaccacaaatacgtgacgtttgcgcagagtgcaataatgttgtgctttctaagttggatgattatatatgcaggctctttgattccacttttaaaaatgtcgtgagacgattcgacgaagtagtattcgagtacgattaccacctgctcaaaaggtggcttcttaaaattagcttcaactccgcaagagtgcataattctccggatcgcttggcgctggaacgcgtcctgccttatatcttgggtgctgatctcaagatggggagatcgattcagctatttgttcagctatctcatcctcaagatatttatgagactgagttcaaggaggatggcgatcctaataagaaagtcttagtcgagccattaatgcacaggttgggacatgtgatatttcgcgctcacggaatcggagagaagatcctcagagcggtctaccttcgctcttatgttttttatcttgcatactggctgcctggtggcgggaatgcagagcaaagtgattttgcagagatttttggccaaggaatgcgagggatacgacttctgcgtccttccgaggaaagagtgaaattactctgcgatggagtcggtgcatgggattcgcttaaagattctcgcagcaatcaattctcctcagatgttgaggcctga

SEQ ID NO: 341074 - DNA, 1221 bp, Pseudomonas aeruginosa
atgcctcttgatgtattactactggaagacgatcccgcaaaaaagggaaagctgctatcgctactgcaagaaaagggattatttggtcgaattgattttgccatttgcacaagccaagctctcgagctaatttctgatcgccctcaatatgacttgctgatagcagatgtagtagttccggcagacctctctggcgaaaaagacgaacgcaactgcatagacttctttaatagcattgatgagcagatagcgccaaacaaaaagccactatattccctacctattagcgcatctaccagccttacctcagcggctcatgactttttcagatgtcgcccatggggtattttaccgtactctgaaaacaacgcagactgtcttagcgcacttcaaagcatcgcagagtggattctgaaagacaaattacagcgcgatcagcgagatgactgtgatgtatttattttgactgctctcgcccatccagaatacagtgcgcttgaacagctagacttcaactggggcccatttgaacctttagaccgtacgcaacttattcgctatggtagccttaaggtaggtgaaagaaccatcaaaattggagcggccttctgtgcaagaatgggaactgttgcggcagcaatacttaccactaaagccgctctaaggctaaacccaaaaatcatcatcatggccgggatctgtgcaggcatagaagggaaagcaaatattggtgatgttgtcgccgccgatgtgtcctgggactggcaaagtggtaaatatattgacaaaaacggtgacgagacatttgaatcctcaccccatcacatcaatatcgatgatgaattaagaaataaaattttcatgctgaagcgtgatgaagagttctggagttcactttcaattcatgccaaagagttcgacctagcatcaccaaaattagtgactggtcctatggccactggctcctccgtgctggctgatgttcgagtggcggagcgaattcgttccgttcaacatcgaaatgtcacaggattagatatggaaacgtatggtgtatacgcatccgtgtcagccacacttacggactcagacttcgtatcgctcaagtctgtatgtgacaatggcgataaaaagaaggatgataagtatcaacaatatgcctctctaatctcggcaaaagtggttgagcactttcttcggaaatactatcaattcaagtaa

SEQ ID NO: 341075 - DNA, 3303 bp, Pseudomonas aeruginosa
  misc_feature (3051)..(3060): n is a, c, g, or t
atgaaatcgaataaaaacatcaatctagtcgccgcacagaacctagtcagggggggcctggcaattctaaaggagccgagcactcccgaacgaaaaagtcacgcaaggaagcaggctcaaaaatgccagaagcaaattaacaaagcgatctcactggccaaatctcaacttggaccaaaggcattaagtgatttttttgaatggcttacactacaggttcagtccgctggcgcgattcaatcctctttaggagttcctataacctctatcggaatttttcctaaccagattgactctcgtgatcttgcatcagaactggatacagccctttctaaagtcttgcgctttgaggcagctttggaaaaattcgccgacatttctagcaatattgcaacctgcatcaggcaatttgattggagcgcagcatcacgccatcttgaagaatttgaaaaagccgagggggtttcatactggtcattagaaacgacccttgcgctcctgcagcagactgatggcttagaagaaatgaagagtagaagcgcaagcctatccttgtctgcctacggtctaactcgattctatctatattattttggcgtgcgaaatgagccagcgcagaattcagtccgctatagatcaaatacaactcgcaggatagacgacgcagagataagtgaggcactgagtgtttattcaaaatatagactttacggacatcttggctccaccgagcaagaccttaggctgatcttagcaacagaacagttcactactcctattgatctattcttcacattaataaaaatatgcaaaaaaatcgcttcaaatgaaaacgactacgctaccggagtactcgaacgagttaaaactgctgtccaagcgctttcagggattctacatagagttggaattaccacattaagcagcaacctcaacaaatcctcggaagaagagcttaatataagtaggctttctaaaacggctgtcctacttgccttcgagaaagaatcagataggcctgccattaaattagaagaaattcttgagcgcggattagcatctcagatttcaactcaaagcaatggtcttcatgctgaagagctagcaaaattcgcccttaacttcaactggctccccgaacttatagatataggagatatatactcactacctacactgcctaaaattttcgacagttgcacatcttcggcggcggcacagccgtcatcgatttcctctgcacttcaaattgaagcagctaaattagtgaacgacccctccgaactaggacctgagctcagaaaaatctgcaatacgttgaccaagaatgaaaagcatgaactctcagaaattgataacccattaactcgagactgtatcggagtaatagctagcaatcgatatttccacgcaggtgagcaagacaccgcagtagagatatgcgcaaagtccggaatatacaatccaaaaatcatatcctccctaccaattgtagacatgtactacggctacaagtggtcaaccataaaaagatcgggagatatgcttcatatagcaatcgcccttgatcatttactaaaaataatagacgagcgcacctataaaacctacaagcgctatgcgattgaggagttactaaaagaatacaaatgctctacaattgtcgacttacccaggaatctatctatctcaggccactccatagacttagtcgcgcatctgtgcgcaatcacatgcaatctaattacaattgagctacttcctggcatgagcagttctaaaaagtccaggcagacaaggagtgacttacttcgagctcttgcgaagttaaagccaccttttgaagaattgtatgttcaagaggctatgcacatagaagatagtctgcgcgttgatgatggccttgaggtcttggacgatagcaaggtttatgtggatgagcaatccatcatgaacgcgcttagtgtagaagcatctgcggatttccaacggtataaaaagttagtcgaaagcggcgttggggaaacggaggatctcgttgaggtcatgaaaagcttccgtactctttctgcgaaaaactttcaagtacctaagaatgaggctgacgatctcttgggggaactggttggttcaattagagagaaatttctatgggacccagtctctggattagatgtcctaatcggtcgtcggataagacatggcactattgcaagcgaattacgcggagtacttgaaccagtagagttgatatgtcaacgccctaccttaggtgctgattatcaactaccgactaagctagaaagcttctccgcaagattagaccccaaaaagcggaagatattaaaatccgcgttctcgagattttctgaatctatagattcgatcatcggcactcttcgcgacgaatacttctacgttaagtcaaaaaccaaagcacgaggcgtattcgacctaatagttacaacctcttacttaatgcttctgcgtgcagtggcacaagcttgcacctctgcagatcagtttctgaaagagtgcataggagtattttggtacgacatatccgccagatgcgaaattgctcgaccaactgtcgagaatgaaacaaagaagaatttgcaggcagcattctccaagctgaccaatgagcttagaagcaatggaattgaagatgaagtattactttcggatattgttcatcattctgaggaacttcagcgaagggcttctattattgcaagttggattagggttccaaacgcagaactaaatggtgaaacatataacctgaagtacatagtagatgttgcagttgcattcgtcacggggcaacatactaaattcgacccgaaaataaaagtttgcgtaccggaagacgtatatctagatcttcatggattttcaataattcaagacgctctttatctagcgcttgttaatatacatgagcattccggcgtcaaaggcgaaaatcaagtatccattaatatcaccttcgaccactccacttccttgcttcactttacaatagcgaatgacataggtcctggnnnnnnnnnnagacaagacataaagaagcgcgcttatggggaaagagccaagcaaaatagagactctggccttagcaaattggctacaatcgtaatgcaatatcaaggtaccaatataaattttggctttgaagataatagatcctttagattagaatttcagcttctattcttgggagtcctcccctctaggaacagcggtcttgcgtctaccgaagaccagaaagttattgaggaagaattaagtgtctaa

SEQ ID NO: 341076 - DNA, 783 bp, Pseudomonas aeruginosa
atggaaacccggactgcattgattaccggagcctcgagcggtatcggactggaactggcgcgcatccatgccggcaagggtggcgatgtcgtgctggtggcgcgttcgcgcgacaagctggaggcgataaagcgggaactccaggcgcagcatggcgtgaaggcttacgtgattgcggaggatctggccgatccgggcgcagcggatcgcatcttcggagccaccgagtccctgggattagccatcgatgtcctgatcaacaacgccggcttcggcgggcacgggaagttcgtcgagcgcgatctgggcgccgaccaggccatgatacaggtgaacatggcgacccttacttcgctgacgcatcattacctcaagggcatgattgcgcgcaggcgcgggcgcatcctgaatgtctcgtcgaccgcatcgttcatgcccggcccgctgcaggcggtgtactacgcaaccaaggcctacgtcacctccttcacccaggccatcgccgaggaggtaagggagtacggcgtgacggccacggtgttgtgtccgggggcggtagcgaccgggttcgtcgcggcgggtgacctgcagggcgtcgatgtctggaagaatgccaggacggcggagtccgtggcgcagtgcggataccaggcgatggaacgaggtgagctggtagccttcaatgagtgcaagctgcggctcatgctcgactggatcgttcctctgttgcctcgcagaacggtgctcaaggtgtcgcgtcaggcgatggagaagacatcctga

SEQ ID NO: 341077 - DNA, 999 bp, Pseudomonas aeruginosa
atgaagcaagccaggcattttgccgtgcatcccggatggaaactgatcatcgccgatctgggaatcgccgccggagatctgctgaccctggccgagctacccgccgacctgttcagccgcaaggatgcaacgttatccccgcccgaatacttccggctttttgttggcctcgaacagctggtcggcgaatcgcagctgcctctgcgtcttggcggcgccatttcggtcgaggctttcgatccgtcacttttcgcctgcctgtgcagcccgaatctcaatgtcgccctcactcggcttgccgaatacaagcgactttgcggccccctggcgctggaggtcttcgtccgcgacacgcatacggaggtcttcatcgaatgctacggttatgaccgcccgttgccgcgcagcctctgcgccatggagctggtattcctgacccacctggcgcgtcttgccacgcggcaggacattgttccaatagaggcggagctggtggcgctaccgggccaagctcggccttgcgaagagttcctcggttgccgtctgcagcgaggcagccgcaaccggattcgcttctcggcagaagatgccgcccgcccgtttctcaccgagaacgtctccatgtggcagttcttcgagccggaactgcagacgaggctgtcgatgctggagaccgtagccagcactcgcgagcgagtgcgcagtgcactgctggacatgttgcccagcggccggagcagtatccaggatatttccgcgcgtctggcgatgagcaaacgctcactgcaacgccacctggcggacgaggccctgagctatcaggaggtgcttgacgacactcgagcaagcctggcccgtcattacctctcccgctcgaccatttctccaggagaaatctctttcctcattggctttcaggatgccaattcattcctgcgggccttcaagtcctggacgggcatgacccccggggaataccgaaaccagcattgccattga

SEQ ID NO: 341078 - DNA, 813 bp, Pseudomonas aeruginosa
atggagcggcggaaaatcagagtgcaacgatctggccagaagacgaaagtctacaccttccttctggctactttgagcttgtttccattggtgctactggccgaagaacaccccatgaatgaaacggaggagcaactcctagatgttgtccgaaccatcatcggtcacgagaagattcgccgatttgaatacgagtatcgccagaaaaacagtactgccccgtcatgcgacgtcatgctggatgacttgctgaacaatagggagcttcaaccgatcgagccggtagcggtactcaaccatcagtatccgctcagcttgaatgaggatctttcggaggaagaggaggcgctaaagaaatcaatagacgagcaaatgggccccatgctcgttaaaaccttgaatcgatgctggaaagcagaggccgagggtgatgaagagcgtgcccgtgtgctattcacggcatttcacgagccggggttagagcctccgatccggttgtacgtgctgccggacgcaatcagcccttttcctgactctaagttgctgtttctggcctacacctcgaaaagactgggctactcctgggtaaacttgaacaagtgcgaaaatagttggggtataagttatcctcccatatcaagtttagaacgcgacccagaaaaagttacgagtgctttggctatttatcgcggccgactagtggcatgggtggtggcgaaaaatttcttgttcaaggtggaacactatgagccggattaccatggcaacgtcaaggcggggaccctatgcgaatgggcggcgtatcccaagtag

SEQ ID NO: 341079 - DNA, 1356 bp, Pseudomonas aeruginosa
gtggaaaggctccctcggctacatggccaaggtgctgcgcgacgaggaagtgcccgacgacactggcctggccatcgagctgcatatcccccagacctccaagcgcatcgacatcaccctcaccgggcgcgacgagtcgggaggcaaaaacgcggtgctggtcgaactgaagcagtggagcaaggccagcgccaccggcaaggacgccatcgtccgcaccgccctgggcaatggcctgcgcgaggtcgtccatccctcctaccaggcctggtcctacgctaccctgctggagggcttcaacgaggcggtctacgaggcaagcatttccgtccgcccctgcgcctacctgcacaactacccgcgcgacggtgtgatcgactccccgcactaccgcgactacatggaaaaggccccgctgttcctcaagggcaaggacgaactggcgcgcctgcgcagcttcatcaagcagcacatcaggaccggcgacgccaaggaagtgctctacgagctggccaacggccggatccgcccgtccaaggccctggccgactcgctcaagggcctgctcgccgcccaaccggagttcgtactgatcgacgaccagaaggaaatctacgagtccgccatcgccgcggccaggtcagcctccgagacgcatccccgtgtactgatcatcgagggcggcccgggcaccggcaagacggtggtggcgatcaacctgctggtccacctcaccgggctcggcctggtcggcaagtacgtgtccaagaacgccgcgccacgcaaggtctacgaatccaggctggtgggttccatcacccgcagccgcttctcccacatgttcaccggctccggcggtttcatcgagaccgagcccaacaccttcgacatgctgatcgtcgacgaggcccaccgcctgaacgagaagagcgggctctacggcaacctcggcgaaaaccagatcaaggaactgatcgaagcctccaagtgcgccatcttcttcatcgacgaagaccaacgcgtcaccctcagcgacatcggcagcaagcaggccatccacgagttcgccaaggcgaaaggcgccacggtcgaggaatacagcctcgcctcgcagttccgctgcaatggctcggacggctacctcgcctggctcgacgacgtgctcgacatccgcccgaccgccaaccagcaactcgacgccagccagtacgaattcaaggtcttcgacacccccgaggccctgcacgccgccatcgccgcccggaaccaggacaacaaggcccgcgtcgtggccggctactgctggccgtggcgcagcaagaaggatccccggcaacaggacatcgtcatcggtga

SEQ ID NO: 341080 - DNA, 1920 bp, Pseudomonas aeruginosa
atgtttcaactcctttcctggatatccaggaagccgtcccccaccccaccaaccaaagctgccccagggggattcctccctcctctgagcagtatggaactgctcggcacgcctcgccgccggcagctactggagaacatctggcaacgtgcctcgctatccaagcagcaattcgaggagatctaccagcggccattggccaactatgccgagctggtccagcagctccctgcttcggaaaaccatcaccatgctcatccaggcgggatgatcgatcacggcctggagatcgtggcctacgcactgaaggtgcggcagacctacctgctcccagtgggcgcggcaccagagtcacagtcagcccaggctgaagcctggtcggccgccgcggcttatggtgccctggcacatgacataggcaagatcgtcgtcgacctgcaggttgagctgcaggacggcagcacctggcacccttggaacggaccgatcaaccagccctaccgcttcaagtacgagaagtcccgcgaataccagctccacggcgctgcatcagcgctactcatccaccaactgcttccgcgcactgcactcgactggctcagtcgctttccagagctgtgggctcaattgatctacctgttcgcggggcagtacgagcacgccgggatcctcggcgaaatcatcgtgaaggcagaccaagcctccgtagcgcaggagttgggaggtaatcctgatcgagcgctggctgcaccgaagcagtcgctgcagcggcagttggcagacgggctgcgcttcctggtgaaggacaagttcaagctgaatcagccgggcggcccgtccgacgggtggctgactcaggacgcactttggctggtgagcaagcccgcggccgatcagttgagggcctacctgctggctcagggaatcgaaggggtcccctcctccaacacgtcattcctcaacatgctccaggaccaggctgtcatccagaccaacgccgaggacaaggccatctggacggccacgatagacaatggtgctgggtggagaaacaagttaacgctcctcaagatcgctccagccttgatctggacagcccctaccgagcgccccgcgccctacggcggatcactcgtcgttgaggatggaaacacctccacggataagccggaaacgacctgcgaaatccccaacgatccgattgaacagcagcaagcaccagaaacgaagatgacgctccaccaaccttcgccgagcgttgcgaaaccggcaaacgagacgcgggcgattgcgaagccctcaactgaggatcaggaagaaacagacgatttgtacgcgcttcttggtaatatcaattcgccaccagaagagctagacactagccacgactcaccggctgcttctcctacgaacactcggggggaggagaacctacagcagccactagggaacaaggagccaacagattgcgctcctgaagcagttgaagatgtatttatgcctagcagaagcactgatctgggacagggattcgttggctggatgaaatctggtatcgcgacccgtcgcctgttcatcaacgacaccaaagccttggtgcataccgtcgacgggaccgccatgctggtcacgccaggaatcttcaagcgttatgtccaggagcatccagagctcgaaaagctggcccaggccaaggatacgaccggctggaagctggtgcagcgcgcattcgagaaacaagggcttcaccggaagaccagtaaaaacctgaacatctggaccatcaaggtttctggtcctcgcaagacgaaagagctcaaggcttacctgctccaggatcccaaactactgttccctgagcagcctctggacaacccaagcctcacggtcatcaccgacaccgaagggggtgtcgaatga

SEQ ID NO: 341081 - DNA, 663 bp, Pseudomonas aeruginosa
atgcctcgtcacccctttaacaccaacctccacttgcatcacgccagcgcctttcagggcctacctgtcatggcagagaagggacccttcatcgagcagtacctatctcgcttgcacaccaccattgagcgctccctgaaacagtacgccagggtatttgccttcagagtggatctacgtctgccactgggtgttgagttgcctgactacgtgtacaccaacgaggtcatcagtcggttcctggagtccttcaacgccaagatcgagcatgaccggcagagggctcgcactcggcatcgatacgctcatgactgcaaggtccgatacgtctggactagagaggtgagcaggggggagagaccgcattaccacctactgatcctgctcaacggtgatgcttacttcactgttggcaggaagacttcatctgaacagaacatcttccatcgcttgcaggaggcttgggccagtgcgctggggctcagcgtggaggaggtgagtggtctggtggagataccccgagcggctggatacctagttagtcgagctgctggtgatcatggagagctagctgatcttttccatcgagcgagttacctctgtaaggcagctacgaagagctatggggatggccagcatggcttcggatgcagccgatactga

SEQ ID NO: 341082 - DNA, 756 bp, Pseudomonas aeruginosa
atgttctggagcaaggaaaggacagtgcgagtcgagctgttgagcccgccagtagtggtgacttctaccgcaccaacgccaccgaatacgactcaagagctgaaaggttccacttctccgctcagccttgatcagtttcttaagctcgcagccattatggtggcggtggtgaacaccgcactcgttgtgatgggttacatgcggtacgtcggcctgatgcagcaatttggtatcagcagaactgaagttgcattcagcctccccgacctactttccttcggctacgttagcttcctgaacatgacgctgtccggccaagtggccgtcgcaaccgtgacctcagtcatcacccttcccgttatgcccatcgtggttcgcttcaagaagaacatgcatgcagttcttcagtaccttcttgtgtgggccatcgctacagggctgttctttctggttacaggaccctactggtttgcgttcaatccaggaaaggaagccgccttgaaggcggcagcagaatcacttggcgtagacgcagagctgcagggtctggaaaaggagcaagaagtcacgacagagaacggatctctagcaggcgagatcattctagccatgccggacattacctaccttctcaaggaaggcgtgctctacaagatccgcgcatcagatggaaaggttctgcgcaggactcatctcaaagccaaactggctgagactccaaaagcagagccaaagccagcgggctcgtcgaactag

SEQ ID NO: 341083 - DNA, 1560 bp, Pseudomonas aeruginosa
atgtctatcgaagcggaaaaaaattcaaactatcgatattcaccacttgctattccggatgtgctggatgcgatcggtgagctagaggatatcccagatgtcatttgtgctggcggatggtggcctcgtgatcataatgagtatctatttggctcgaaaacgaatgtcggatatcgtggcgtatccaataacgatgtcatcataagccaaagacgtttcctaaagcgagatgtgaagtacttttcatcctcacatgaacgcgcgcacttactttgtgcctttggcatgtcggctctccccaaaggaaccccgtgctacgcattagtgtgggagggcagcatcggtgctttttacgagattgattcagaactgaatatcacactcgttgccgaggttttaggtcagccggggaatcgctatggcctgctctatggcttagccgatccgacctttccaaaaaatggagcgtatccccggaactcagatgcggggaaactcatggcgctggcatcatattcgaatcggagcacgccttcctctgaagagaagaggttgcttaactttctactaagtggcccgtaccaagcactgaatcattacgaaggtattgaaggcgcgcctcacttcaatgtgggtctggaaaaccatgagtttcgaaactttgcgggtatttatagcgatgcaatattcgatatcttctattgcttcgcaaaaaaacatttgaagaagaagcttccactggttatttccggtggatgtgggttgaattgcgattggaacacgaaatggatagagactggtcttttttcggagatcttcgtgcctccagtcgccaatgactccggctccgccataggcacggccgtcgatgcgcagttccgctttactggcaatccgaagatcgagtgggatgtctatgccgggttgacgtttgatgcgctcggtgcattcagcgctgagagatatgacacccgagatgtcgattccgctgcaattgccgatatgcttgcgagcgacctcatcctcggatgggtaagcggtcgatacgaaatcggcccacgcgcacttggtaacaggtctatcttggctgcaccattccgagatagcactcgaatccgactgaacgagatcaagcagcgcgagcagttccgtccaatcgctcctgtatgcctccaggatgatgcagagagatggttcggatgcgcacacgaaagtccacacatgcttttcacccatcgcgcaacgacgaacgccctagcagccgtcacgcacgtgaacggtacagcccgaatccagaccgtcacctctaaaaccaacaaaagactttatgacctacttgtcgcgtttaaaaatcgcactggctacggagtgttgtgcaacacgtccctgaacttcaacgggaaaggcttcatcaacaacattgctgatctcgatgcctacagcgtggagcacggattggacgggttcgtggttgaagggcgggcatatctgctaaaggcttcccagcgatatcaaacatacaaggcggtcgcggattcttcagctatggcgacccgctaa

SEQ ID NO: 341084 - DNA, 834 bp, Pseudomonas aeruginosa
atggattcatacccacagggattcgaggaggatgatcgtctgcgatccgccttcattcgaaacctcacactaaagcagctggaccgctcggtaacttcgaatattgccggatcgaacctggtttcgagcattccgaagacactcgtacagtactggcacgatccgcttgatgtgccggaagacgttcaagcctgtatcaacagttggaaaaggcttagcgcggagggctttgagttccggatgttcaacgacgtatccgctgccgagtacattactgagcggtatggagcgccggagcaaaaggcattcgcgcgatgccggcatccggcaatgcgttgcgactatttgcggatgtgcttcttggttgcagaaggtggactttatgtcgatgcagatgacgtactgcttggagacaactggagataccttttccatgacagcgcacttaaggtgcagccgctatgctacgacatcccatcttgtgggatggtgccagcatccgagatctggcgaagggatctaccgacagacgaacgcatcttttatgtcaacaatgatccaatagctgcgcctgctcatcaccccgtactgcagcgagcgttgtctcgctcgaccgataagcttttaggcaatggtcgcttcccagagatccaagagacgactggccccggaaatctctccgcatcgttagccgcgcacgcacgtgatctgatggttaggggagctcccctcgactttgaattgttacatgactgggaggccattgcggaaacacgctgggagctttcctaccgcaatgacgcccgcaactggcgcaacatgggctcccactga

SEQ ID NO: 341085 - DNA, 2115 bp, Pseudomonas aeruginosa
atgaacctcagggatgcctcgggcatattgcgtgggatagcatttcggttgttacgtgccatagcgagcatttttccgggggggaaaatctcagcctttggtacgggtgaaggactgatcaactcgattctaatcgtcaaccttgaccggcaaccgcgtagatggcgccgtgtggtccgagaactccggcggttccgcacggccgacgatgtttccctcgcctctatagctcgacgattcgcggcagtggacgctcgcgacggccgtgccgtcgccgcaactgccgatgtcgactcgacataccgcatcggcgaccaactctacgtccagccggatgcaaggcttgaggagtgctttcccatcagcgagccgataaaaatgacgcggcaggaggtagctgtagcgaggtcgcacgtggaggtttggaagaccatcgcatgcggggcagacaaatatgtgctggtgctcgaggacgacgtttggttcaagagaggcgcagcggcagcaatctcccttggctggcgtgccgccattcaacactgttgtgctgaaggagggccgcgtttgttgtacctgtcgtatgcagatgccgggggaacagcagaacgtgttgacctctgtgattctcttttccgaccggtgcggggactttggtttctctccggctacgtcttgtcacgtgagggggcggcggcgctgctacgggcaatgcccgtgattggccctgtcgacatgtggataaactatcgctttggtgagctcggtgcacttgccctcgcctcgccggtgatattacagcgacaggacagcggctcggacaattcctattccgtacttccttacctggcgcgagcggggattattgatgccggctcaggccctatggcacccaaacggacgggggctgtgtcggtgttggcctggactacccgcggcgagcatgaagggctcgcgatggctctgtcgatgctggggttgcgagtgcgggtgttcgatggtgatgaaggcgcaattcaaccgcaagacttgttggagcttttcgagatattcgacgctcttgttgacgctccactaacgccggcggcggtgaaagccgcaatcgcaaggaatgacataaggtttctcatggaggcgaagacggtgcttcggtccgagacatggcagggatctctaccgccttcgcgcaccgcaattctgtcatatgacgagtcagacagtcgattatgggagccgctgtgcagtcttctcagcctcaccgagccagtgcagtctttccctgttggaacacctcggtgcctgaggatgtttcgagacggtaaagcagacggcgcacaccgagttgctccgtcgcatccccagcagatttcagtgctagatgagtcaccttgggtcctcccagcaaaatatgggtggcagcccagagtaccctcgaatcatcccataccccccgtaggggaactgctcgttttctccgaaatgactacagcgacctcatcttttcccgcgctcatggaaactttcccggggaatttggtctcgttttcgcaggatgctctcgttcatgataaggacggtgcccatctcatcgttagcaaggttgccactgcaaccaggcagtaccgttcgggagccttcgcgtcaaaacaactgttcggatatggtcgctttgaggcccagataaaagccgccagcggctctggtcttattactggctttttccttcaccgagatgcaccaaggcaagagattgatatagaactagcaggagatgatcctcgaagcatgttggtcaacgtctacttcaacccaggtgacgatggcgcagcaataaatttcggttataggggttcaccttgccgtatcgacctcggcttcgatgctactttggacttccatgtttacacgattgactggcgaccggaccgtatcacgtggtcagtggacggccacatcgtgcatgagcgcgcagggtgggaccctactccaattccacatcttccaatgcgactacacgcaaacctctgggctcctcggtccgaagagctcgccggacggctcgatccgcatgtcctgccagcgacagcgagcttcaaaaaggtatcagtgtgggcgtga

SEQ ID NO: 341086 - DNA, 285 bp, Pseudomonas aeruginosa
ttgctgaccaccaaacgagacgaggtaaagaaaaagctaagccccgaggcgtccgccagagaagtggatttctacatggagccttgcaagcagcgcgttatccagcgtggcttcagaggagatgagtactacgcagaggttgaacgtgtatgcccaggggaagctctgcaagcctacctggagccggtcaaagtagaactggcaaaagcggagaaagacctcgaggacaaacaggccgaagtggctaccgcaaagcttaaagcttcccctatccctcagagttaa

SEQ ID NO: 341087 - DNA, 519 bp, Pseudomonas aeruginosa; identical to SEQ ID NO: 340766

SEQ ID NO: 341088 - DNA, 612 bp, Pseudomonas aeruginosa
ttgattattccagtcgatgtcgcgcttgcggatgcacaacagcgcattcaaccggatgccggtgaagtagaagacctcaaacgtgcaaagccagaaccaggcgggcgtgatccgtgcgcgttcgccggtgccgcgctcggcgccgacctgcatgttgagccaatggcgggcgcgcaggatggcttcggcggcgacggttttgcttgctcgcctgggggggatgacggtggtctttctgaacgggttgacttgggagtgcgtcaccaactcgtgcacgatggcatagccccagatcgtccgcagatgattcgagtatgtgttccagctccgcttcgacaggccttgctccagtactttgcgccgccatcccagtacagccctgtggtccacgttctgtacggttgccgtaggaccgaagtgcttgagcagcgccttggtcgcggcgcggtagatcttcgcgctggcttcccggagatcgtgcgcgaagatgtactcctcggtgagctgctgcggcgtcattccacacctccttcggcatcggtgatgaccgtgaggcttgggttgtccagaggctgctcagggaacagcaatttgggatcctggagcaggtag

SEQ ID NO: 341089 - DNA, 258 bp, Pseudomonas aeruginosa
atggcccagctacgtatgatcaatgaacctggactggtcgagcaggtgcaatccagcctttacgaggccggaatgatctccctgacagaagtcagagactgcatctcgaaccccaggatccgggacttctacgtgagggatctcgacgcatcgggtcttccgctcgccggtatcagtgccctgagtgaaatctgtagtggtctactgatcccggacaccgatttaggcgaaaatcctcgccgtgagagaggtgtctga

SEQ ID NO: 341090 - DNA, 693 bp, Pseudomonas aeruginosa
atggttaagtttaagcaaactcctcagcttaaagtggttaagtctaatactgccgtgggtgagcttgaatcagctgagctagtattaagtcaaataaaagttggggatgttgagtcgggggctggagactacgcaattggtttggaggctggcctggacgcatatgttcgagaagtggagcgagaacagttaaggcttctagcaaaaaagcgggttgttgagagggcaaagatcagggaacatcgtgctcaaaatcgcaagagggtacttggccgtcctgaacagaaagcaggcaccgaaaagtcagtgtatagtgatcctatgagtgatctgaatcgtgacgaactgaaagcccaccttgagaaccaagagctcaaggtagatgcgcgtctgaaggagtttgaagggcgtgtagcggatggtctgggcgaaatgaaccacacccttcaactgcttgaccgtgacctggcgggggtgcggggcatcaagggtacgatcatcatcaattccattgtgtctgtgattgctatcgttggtatcgtgattggcgtgatggcttacggtgttgccagcttcgactcagggcgagacacgtcccagttgctgcaagaggttcggcaacagtcgtttgagaataagcaactgcttgagcagatcaaggcatcccagcaaattcagaaaaattcgcagtaa

SEQ ID NO: 341091 - DNA, 456 bp, Pseudomonas aeruginosa
atggaatttggacgtttcagcgaagagcaaatcaaccaggtacgttacgctgttgatgatgccgccaaactcaagaggcgagctgaaggggtgattcaggggatcaagaaggttttcgatgaccctttcccaaaagaatcttggggcgtttcatttgagccttccccgcagggttggattgcaatcgacactccttatggcgctggtcgtgggcgtcttgaactttcggtgggcccaaaaggcagtgttggaaagttcatcatcgagaaacagatgcggaacccattcgatcaagcagagtgggtcaaggtttggcatttccgcatggatgagaacggcaccttcggtggagacgagacaagcaacccatacctcgtctcgggtttcaatactgataatggatacgcaatgttggctctttcgattctctatgcgatcgcaagagggcctgaatag

SEQ ID NO: 341092 - DNA, 348 bp, Pseudomonas aeruginosa
atgatcgagatggccggaatggttgatccgtggtccctgatcgccgcagtgatctgcagcgcgatctgcgttcgcatcgccagctaccgccggcagggcgcgcgctaccgtgctggcgtttcgctactggcatacctattgtccgttggctcgggctgctactccctcacgttcttcctcgacaccctgcgcgggaactaccacccagcgctgtccccatggctgctgatcatcctggtcgtgctggccgttctggtcttcaaggcgcgcggcaacgttgcgcgaatcatccgcatcgactggagcgaacattgggacggggctgagcggcgcaagctgaagcactaa

SEQ ID NO: 341093 - DNA, 381 bp, Pseudomonas aeruginosa
atgtccgaagccggagccatcgcagttgctggcgccgtcggattcggcggcggctacctgctgggcgtcgacatcaacgccatcatcggcgcctttgctggcgccatgttcttcgtagtccaggcgaaagacctctcggtcttctcccgcgtcgggtacttcctggtgtcctggatcttcggctactacatcgccggcgagttcgtcggtaagcaatgggttgagacctccggcctggtggctggggtcggcgccctgttgtgcgtctatttgggcatcagcttgctggagtgggtgcagggggggaagacgccgggttggttccgcttcatcgcgggccgctttggaggtcgagatgatcgagatggccggaatggttga

SEQ ID NO: 341094 - DNA, 300 bp, Pseudomonas aeruginosa
atgaaaaccaacctaagtgacaccgcccgcaacttgatcgatatgtacgaaaccatgcgaacggtgtgtcccatcaccgtgggcgcttacatcgatcgccaactgcctaagcgccatactgacaccgagcaggcgcagtacgctgagatactcctcaataccttcgtggaagtatcacaggatgatctcttcgatattgattttcctgtcacggaggcctcagttgttcgtggtttctctcagaatggagccgtcgccataaagacgctaatgcgctgggctgaggctggcaaaatctga

SEQ ID NO: 341095 - DNA, 882 bp, Pseudomonas aeruginosa
atgattcacactctaagcagtgacgcatttgcaggggtgctgaaggcgccaaaggttaccggtctcagcccccttttccgcgcaaagatccgcgtgaatggcgatagcgtaaggtgctatgtcaagccccttccggacatgctcgactgcccggtacggcgcacgccagtcgataaccaggaagtgatcagcgaggcgcttggctacgttcttgcgaaggcatgcgggttcaaagtgccaacggttgccggcatcatcttgcttgaacaggagcagatcccggagtcagcgcttgctggactaagaagcctcgggcgaggacgcctgcagccaaactacttctgctggttcacaaaggatatggtctatccgaacctggtccagaagcacatgcaaggcgtgcaactcgaatttctgaaacaacgacggttgcggcgactcgttaagcatctggcagaggcagaggatacgccgaaggtcgtcgccttcgacgattggcttctgaactcggataggcaccctggcaatctactcgccagcaacgccagcttgatgctgattgaccatggacgcatctttgtttatccgaactggcagcctggcaccataggctcgctggggtccggccatcagcccggtaatcggttgaggaacttcatcgattcctacgagccgaactggagtgcgaagctacccaagaaaagccaaatgatcatggcatacaacgcgtttgccgttggctttagaaaccacggagaaggagctgcgcgcgccgtgctggctgagttcttcgacaacatcgatatcgacgctatcatccagctgctgcaatcgcggcatgacccagtagcatacgccaaagaatccggcatggtcctatga

SEQ ID NO: 341096 - DNA, 876 bp, Pseudomonas aeruginosa
atgagcaatcttgcaagactacgtgatcgcctgagcggggccgaacagtcggttgtcaagggtgtgtggcgtcccatcagcgtgtgcctggatgaagacaccggcgaatacctcaatgtcggggtgttgttccagtatgctggcaaggtcgaggtacgaatgcttgatacgttcgagcgcatcaagtgcctctatggcaaccgcatcgacctcgccagcctcagccatctgatggtcgatatcgaagacacgatccggcttcaccatgccgacctaccagatgagttgagcgatactatacgcctaggccagtcgctgtatgcagccggcactgatgctgaaagcgtggtcgacgagttcttcttcgatgtcgttaccttgggcatgcccaccgagaagcaacgcaatcataacttccgctatcgctccaatcacaaggtgcgtgagactctcttcgagatcatgcgcgagaagatggcgctcgatgctgaacgcattatctgctcagaaccgtatcggctgaagttaaacaataacgcgacgatcgacgtagacatccctcttctgagcgagcgcgcggccggcgcggtggtgtccgcctggtacaaaagccctctggtggtagagaacaaccttctgcaagcagcatctgacctgctactgattaccagcaattcggatcgaaagctgtcctcaatgtccgtgttgatgccccaggagtctagtgggatgacgcgtagcgaattcactaagcaccaagatgcgacgcggcgtcagcttgatcgatttcagcgatccggtatcgacgtgatcgaggcgccgtcaagcgatatccttgcgaatcgcaccatcgagtggtggaaggctgtggcctaa

SEQ ID NO: 341097 - DNA, 294 bp, Pseudomonas aeruginosa
atgcaggtgcggagaaacaccgatttcactggctggccctccaccgagggccagacgggaagtcaatacgccctggaggagcagaaaatgaatgaaaaatcctcacgtgctgtacgccaggcccttcggatcctccgaaaggagaaagacgatcgcgaggcgcgcattgagtaccacgaaacggttggaatgctgcgcggcctgtactacggcggtgagatcgattcgatggagctagttgcgctcacgcaactcgcaggaagcgcatacatcaacgctgggaaaccctggtaa

SEQ ID NO: 341098 - DNA, 207 bp, Pseudomonas aeruginosa
atggctcaattcaatgtcgatgcgcacctgagcaacggcaaacgcctggattggattgccctgccggacggaaacgagacaccggatgacgtgctgatcaaggtacgccaggccgccatgaagaagttcggcgacctcatctggttcaaccgctgggaccacgttgttgcaagcaacggctacatcaccgtgcggatgcacgcgtga

SEQ ID NO: 341099 - DNA, 675 bp, Pseudomonas aeruginosa
atgtccgcagaaaacaacaactccgccatgacgacgaaccagaaccaccccgacgatcaccttgccattgaagcgctccacagccgctatctcgatgtcctgaccggatgcaccagcgatcacctcatgatgttccaggacgaggcctacgcgcttggccgtgcccgggggcgcctggacgtgttccgtttcgacctgcacctggagcgccagcgccggttcagcgaacgcacgttcgggccaggatcgcgcgccgccggcgtcatcgaccacatccgcaaggaactgcgcgagatcgaggaagcccctggcgacctggccgagtggatcgacgttgtgattctcgctctggacggggcttggcgtaccggcgccactccggcgcagataatcgacgccctggtcgcaaagcagacgaagaacgaggcgcgcacctggccggactggcgcacggcgccggccgacaaagcgatcgaacacgtccgagcggacgagccggtcgacgacaacacctacttcgtcatgcgcaacgccggcaaaaaggtgttcgtgaagcacgggccgttcttccgggatcagggcggcctgacggaggactggggcaagaactggacgcgcatcagggccggcagcctcaagcatgcccgccagatcggggaggggttgctgccgtaa

SEQ ID NO: 341100 - DNA, 387 bp, Pseudomonas aeruginosa
atgaagcagaaaccaggcatcgcacttccccgctggctccttcgcacaaccacgatgcagatgcacagcgtcgacgtggtactggtcatggccctggtgctccagcaccacggtacggccgacgctgttcgccgcgccgccggtcagcttcgcgacagagtatgtgccgagcaccggcccaagatgaccgcgctcatgcgcatgcaagacgacgtggcggcgctgcaggtggcgctcaacatcgtccagcgcgccaccgacgccctcggcatcctggcgggaaagccgtttccggccagaccttcgcccagcgaaagcccaccggatcaggggcacatgcccgccaaggctggtcccgtcaccggtgagccggtgcatcctacctga

SEQ ID NO: 341101 - DNA, 234 bp, Pseudomonas aeruginosa
atgtccctttcagagtttctatcccctgacgaactcactgaattagttggaaagaaggtcgtgagcaaacagatcgaatggctcgaaaatcaccattggaactatgaaaccaacgcagcgggccgccccatagtcggacgggtgtatgcacggttgcgtctggcaggcgttcatcccacaagaaccacagtttccgaccccgcctggtcgctcgacctgtcgaacgtgtcctga

SEQ ID NO: 341102 - DNA, 576 bp, Pseudomonas aeruginosa
atgcctgataacgattcgcgagcggagccctctgcaaaagagtggatgattatcgtgatcctcatctatctgatgggattgctgatttttgcaacctactcaataggagccatggcattaggttggttgccagcgccttatgcgccgctacgcgtgccacttatgtgtggggctatcgcatatgtaggtggcgcgttgtactgcttccgggcgatctatctgaacaagtgcgtctacaagcgctgggatcccgactggcatgtctggtatttcattcgccccatcagcagcacgattgcaggtgcggttagctatctgttccttaaggctggcctgcttgtgctggagtcaagctcaaacgccggcgcaagcgagataggcttcttcgcactcgcattcatagcaggtttcaacgtcgacaaattcgttgcgaaaatcgaagaggtggcgaaggccgtttgggggatcgacaaatcaaggagttcccaggtacgaactgatggtcccccgcagaacagctcagatagcaatacacttcagcccgcaaaaaaccatctgactgaagaccggcactaa

SEQ ID NO: 341103 - DNA, 882 bp, Pseudomonas aeruginosa
atgactaatccaacagcccgtaccggacgctgggggcaggaccggcgtctggaatttatcgatttcagactgttttgggaggggcggctcaaccgcgctgatctgacgacgttcttccgaatatctgttcctcaagcatcgctggacttggcggcttaccaagagctagccccgggtaacatggtctatgaccggacacaaaagacttacgtggcgaccccaacatttgcccccgtcctgactagctccgatagcagtcactacctcaacgaactgctgtggcgggagattggtaccgttgccgccagcgatagcttcatcggctgggctccacctatcgcaagcctgccttcgcctacccgccaagttgatgcgcacattctcatcagcctaatcagagcccttcagaagggtgaggcgcttaccgtcgactatcgctcgatgacccatttcgacgaaccaacgttgcgaaccatctatcctgcatcatttgcacatgatggcttccggtggcatatccgggccttctgcttcaaatcgcagatcttcaaggatttcgttctggggcgaattgcgtccgtggtgggctcactacccccaccctcatcggtacccgaggatgcagagtgggagacctacatcgacgtggtaattgggcctaatcccgcctacccagcgaataagcgccgcgcgatagagcacgactaccagatggtgaatggggaggccacaatccgagcgcgcaagccgcagctcttttacctcaatcggcgccttaacttgaacctcaacccgggcgatcctgttgatgagaaccagcagattgtcatgcttcgtgtcgaagaacatttgcctgcaggggagtcagagccagatgcctga

SEQ ID NO: 341104 - DNA, 1191 bp, Pseudomonas aeruginosa
atggcggcgaagatcacgtttttccaagtcggcaatggtgacatgaccttggtgcggctcgctgacacgcgcgtcacgaccatcctgatcgatagcaatatccgcgtggcggccgatgatccggacgacgacaccccggacgtagcgactgcgctgcgcaagcgggtgctgaaggatcacaatttgcgcccgtatgtggacgcttttctccttagccatccagaccaagatcactgtcgtgggctggccaagcatttctggctcggcgatcctgccgactatccagacgacaatctggcccaggacgacaagcgcatcctgatccgtgagctctggtcgtcaccgctgattttccgccgtcgttcttctaaccacacgctatgtgatgacgcggccgctttcgacaaggaggcacgccggcgagtcgagtattggcgtacctatcgcagcgcaggtagcggcaaccgcatcctcatcatgggcgaggataccaagggcaaaacggatgaccttagccctatcgtcatcaagtctggcgaaaaattcagccgcattgatggccaggactatcccttgtttttcaaagcgcacctcctggctcctgcgccacacgatgatgatgccgatctcgaagagcagctcagcaagaacgagtccagtgttgtcatgaacatggagatctctccgtcggcgtactccaatatcaaaactcggtttctggtaggcggcgatgcggcagtgctcatctgggagcgcatgtgggaacgcttcaaagagtcccctgaggttctggagtacgacttgttgctcgcgccgcaccactgctcgtggcgaaccttgtcttatgagagctggtccgagaagcgcgaaaatgcccagcttaatcagggagcccgaaatgcccttggccaggctcggagcggcgcaaccattgtcgcgagcagcaaagcgattctcgacgatgacattgatccgccgaacattcgtgcgaagcgagagtacaaagacattttggatggggtggatggctggtttggctgcaccggagatctcaaggacgaggccgtactggagttcaccgtcgaatctgatgggaagattaagcgggccgctgtcgctgctgcattggcaggttccacgacaacgtcagtagcggcagccgcagctccgcgggccggtagtggaaaatga

SEQ ID NO: 341105 - DNA, 2226 bp, Pseudomonas aeruginosa
atgattgagtattttgcacccggcgaagtgttagaggcgtctcgggaggatgagctgtaccccgagacggctgcactgctgagagcttgccatgcaagtccctacgttgaggttcgcgagctgcgctgtgaagcgtcgggaatgtctcgcacggagtacatcgtcatcgatgcgggggatggctccgttgacgctgggaatcctggtggaattcgtcgccaggaacgccttgcgataggtatcaatcctcagtatcgcgtgccgattctggttcatgcgctgcgtaaggattttccgccgctttcacatcagcacccgagggcaccagggcatccgcgaacactatgtttgttcgatcacgactggtcagcagtacagataagctggacccccgagcgtttcatcgccaggatgttctggtggctccgtgagtcagcgcagctgaaactgcaccgagatgatcagccgctggagcagcttttctacatgagcccttgtcagctgatactgcctgccaattacgccgactacgcagcagctagtggaaaaactctcacctttttaagggtgggagaaggacagtcgctcatcctgcgtgccgtgcctttcactccctccgctcagtctagagctatacaggtggtctccatcgccgtcccaccagtggactcaactaccgtggtcgagttgccagacacgctgggtgcactccaggaccagctggaggtgtggggcagtgacctgtcaaagccactctacgacagcgtgtttgaagccatcgctgagggagtttcatcctcagagggggtaggtgaagggctgctgatcctgctgtgggtgcctcgcacaaggcagggcgagcctgaacggatcgatatcttgggcttcttgatgacgtcctcgttgttcgaacttgctaaagctttcgacatgctaggccctccagatgcagatggtcgttgtttgcgcatagcgctggtgggcggacaaacagggactgattggcgatctctggaaccagtacctgtagaagtacgttctgcactcaccgccaatatggcgcgagacttgtcagcagtgtcgacggagaatgctcagttcgaaggcgtcttggcaggtttaggtgcacttggaggtgcattagcagacctctggattcgccaggggtggggacactggacattcatagatcctgaccgactgatgccacacaatctaagtcggcatgtagcgtttgactatgacattggccaagagaaagttgatgtcatgcaaggtcatgcggcgcgcatctaccccgacgagccactgccaggtgccatcgcaaaaagcatcctgtcgcaggatgcggatgttctcaacgcattgggacaagcccaactagtcgtagatgtgactactaccctgcacgcaccccgagagttagcgcgcacggctaatgctccacgtacggcgagtctattcctgacgccgtcggggctttcaagcgtgatgattcttgaggatcaggctcgacagcagcgcgtcgatggaatggagggccaatattatcgagcgatcctcaataatgaatgggggcgggagcacttagcgaatcatctcggtgatcgctgggtcgggggcggctgtcgggacatatcggtacgaatatccgatgagtgcatccacgttcatgccggcattctttcgcgtcagttacgccagtcagtggcaaaacctgaagcgcgcctctgtgtctgggcttatgacgagcagtcgggagccatcgcctctcatgaggtttctttgtccgaggttttcacaacgacctcgaacggttggaccatcaaatacgatgcagcgctcgtggataagctcaagcaagcacgcctcgccgcgcttcctaatgaaattggtggctccatcataggaattaccgatttgaaagctgggactctcgtcattgtcgatgtgctgcccacaccgcccgacagtcaatccagtcccagccacttcatcagaggtgagaaggggcaacaggaggcgctcgaagaggtgcaaggtagaactgcccgagtggtcgactacctaggcgagtggcattcacatccagatggagttccggcacgcccaagtcagaatgacgagagcctattaaacacggttcatcgcaaaatgagtgttgaggggctgccagcattgatggtcattgtcgccagcaacgaagtgtcattcattgtgcgctag

SEQ ID NO: 341106 - DNA, 810 bp, Pseudomonas aeruginosa
atgaagcgcaagtcaaccctcgcacagaatgaagtaatgacaagtaagaagcagtccccttgggaagatacgctgattttagcattcagggatatgcaatggattcggaagattcaggccgccactaatagagatacactttcgttagctgagccgccatctctgttggccaagcttgatggcaatgccgaaaccgtatccggggatgtcctgacagggtaccgagggcgatttttgttattagagttcaagtcatctaaatcgctttgcgtcacagaaaagggaaacaagtcggtttacgctattcttactcggtctgatctccctgaattatgtagaggtctatcaatacgtgggcattttcttgtttatcctgaaataaagtcaggtcatcgccaggctcatcagtctatgctgccgatccactttgtggatttaatgtgcatgccatatctgaccttggcggaggatgaatctagtcagcaactcaagactgagagattagatagtgtttattacgattctgagcgtggcttggacttgttggagatggggcactatctgaatagcctggcaaggatggctcagaaagatggcgatggggcaccttttaaggctgtgatttcgagctcagatggaatgttttggccagtcggtgacttgtcagatcttatgcattttgtaagtgttatcgctcaacatagtcctaggttccggttggagtctggtcttctgattatggaggagaagactatgcggggcagcgactcgagccaaaagtggaagagcgagccaggcctggacatgtga

SEQ ID NO: 341107 - DNA, 3177 bp, Pseudomonas aeruginosa
atgacacggagggcaatcagctcctggcaggacttgaccctggaggatctgttttttgcgttcaggaaggccaaggctgattgtttctttgagcgttccatttgcattgccagccagtttgccgagtatgagcaggacttggcatgcaagctgacctccttgctcgccggcttgcaggccgagagggtggttgagctgctaatacagaaccttgggcaaactcgggtggtagccaagaaactgggtactgcccccaagccgacgaagaagggcgctgcacctgacggccacggctttttctctgatcctgcccgtgcttttgatcgcttgtgtgcctctcatgagctgacgccggaatttcggctggtgggcgattttccagtagaaatgcacgtcttgtcggcgctgtggatcaacttggtcggccacagattcgacgcggtactgcccaaatcagcctacggttcgcggcttcgccgctatcgtccagagccgggcgcccccaaaggcagtatgggggagtaccacatggaggcagtgggctccttccagccttacttcggcccttacaaggaatggcgcagtcggggactgaaggctctacgcacggagctggaagccggcaacgcggtggttgccatttcgatggacctgaccagctattaccatcgggtcgatcctgctttcatagccgatattcgtttccttgctgagggcggtatcgagctgtcggagtgggaacttgatttcaccaaggcgttcacagtcatgctggtggagtggtccaagcgtgtcgcggcccagatgcacgggctgggttgcagcaaacgagaggtcacggtaggcggtctgcccattggtttgtccatctcgcgtgttgtagctaatgctctgctggttggcctagaccgtgacatcgaacaaggtctgactccggtctattacgggcgttatgtggatgacctttttttggttttgcgcgaccccggcgatttggtgacggccgagcatttgcttgcctactttgctgcgcgcacacgctgctttccggccactggcatggtcaagaacggcgagatctttttgagcctgcccggagggtttcagggcaagaccaagttgctgctgcagcagagtaagcagaaggcctttttcttgcaggggcaaggtggtatcgacttgctgagcaacatcgagtcgcaaatccgcagtgtttccagcgagcgcaggctgatgccgtcaccggatcggctggagtccatggcctctgccaaggtgctgaccgctgctggccacgcagccgaggaggccgatacgctgcgacgtgcagatggtttgtctgtgcgtcggctaggttggtctgtacagctgcgggcggtcgagaccctggcccgcgacctacgcgaggacgattggcaacatgagcgcaagcagttctacgcatttgcgcacagccatatcctgcgcccggacaagatccttgaccacctggactatctaccacgcttgctatctctggctgttgcgctcatggactggccggatgcgcggcggcttattgagtcaactatgggcgcccttaatgctctgcaagccagagccgagtccggggtggtcagggtcaacgggtttgaggccagcaaagacaccggaagcctgtggagcaatcttcggcaaaccactttggacttggcgcgagatgctgctcttcgatcgttgcggtggagccacagtaagggcgagttgcggccgctcggcgacactgcacttgctgtctgcgagctggttggccttggaaaagacgtcgaagctattgcgatgcaagcactcatgctgcgtgaagccgactgggcaaaaaccgcttacaaagaccatttgcgtcgccacgcgaaacgccagcgccctgctattcagcaggagcagctgctgcacagcctttatccgcacgaagctgatctgcgtgaattcctgaagaagtcggttcgtgcgggaagtggcacaggcgccccgcgtgtttctttgcgttgccttgctactacagacgaaaccttggcgccttcactattgccctatctgttgcccacccggccctataccacgcaggaagtgtcgttattcttgccggaagagtgcatcttcgacgggctgagcaacgcgccggcacgagcatgggcaagatatgtccgcgcggtgcgcggggtatgggtgtggggctctttggtacagttcgaccacgctgataatgctctggaggcggatgaggaagccctagaggcgccccgcctcgcaagaattggggtgggaaaagcaataccaaaagtgaggctgggcatcagtagtttgctgaccactgacgagagcttcagcgcgggggcgagtggccggcccgatctgtctcgaagccgttaccagcgcatcgaacgactggtcaatcaaaccattgatgcttatccgcgaccaacgcacctgctgttgcctgaattggccttgcctgaacgctggatcgaaaccgtgtccaggttgcttcaggacgccggaatcagtctgatagccgggcttgattaccaccgtggcgctcgtccaaatgtccacagcgaggcggtgttggtacttgcggatgatcgccttgggtttatgtcttctgtacagatccgacaagcgaaatccttgcccgcagcgggtgaggaggcaaccttgtcgcatctgtttgggctgcaatggcccgcgcatttagccggtgaacgcaagcctgtgtacaaccacggcggcttttgctttggtgtactggtctgctccgagctgcagaatattgcgcatcgccagcagttccagggcaatgtggattgcatgatggtgctttcctggaatcaggatctggagacctttgccgctctgatcgagtcggcgagcctggatgttcatgcgcacatcgcccttgtaaacaataggcgatatggcgatagccgagtcagaagtcccgccaagaaggattacatgcgcgatgcctgcagactccgcggtgggcagaacgagcatgtggtgatcgttgagctggatatagccaaccttcgagccttccaaagtcgtgaaaagcgctggccacatgaggatgacccatacaagccggtacccgagggatatgcgattgccaaattccggaaggtgacgcccaagtga

SEQ ID NO: 341108 - DNA, 327 bp, Pseudomonas aeruginosa
atgcgcgagtttcatgacttgatcctttcagattgggacgtgaacctcctagacattatttatgcccacgaatcggatccgacggacgtttttgcgacgatagagcgcattcacagtgggcgggagaccgccctcaagagctttggcggcactgacctgccccccgatttcagtaccatgtcaaacttagtagagtccgttttccgagcaggagacggcagtgaaaaagcgttttaccgaagatttggcggtatgaccgtggcggacgccaaacggttgaaggatgacgatgacggcgctgctgcagcaagcgccgtcctgcattga

SEQ ID NO: 341109 - DNA, 633 bp, Pseudomonas aeruginosa
atggcggccttcattgctgaggagtcaaaaggcagacccgcaggagcgccagaatttttggcttacagccccaaaacagcctgcccagtacgcctgtattgtcgccccagcttctggcgctgggccacaatcgagtttgacccctacgccaccggcgtatcagtgaatcagctcgtgctgaacgtgcaggcacgaaagagctcagtagcccttcggtacgagacagccgactccacatatctcatattttctaaacgagaagtgaatacagatgtcgagactgaaatcctagaatatgccgagaagaacggctttcagtgccagttcttggatttcagatgcaagcaggaggaagtggtccatgctgaaaatctgctctgcatgctatcatatattaataagttcagagactccttgagcaacaaaaatttagactgtgcgctccgacttgttgatcgaagccaaaacacaatacagggcgctattgcaggtttgaatgaaagattcacggagaactctggcgctctactgttcgagcttgtgaggcgtggaaggctagtcattcctgatattaagggaaagagattaagcggaacaacacatatcaagccaggcggggtggggtatgagtag

SEQ ID NO: 341110 - DNA, 1887 bp, Pseudomonas aeruginosa
atgagtagctcaactcgcttctctcgaaaagaatatctggccagcggaaatgattgtgatgcgtggagaagtatagatgtcgagctaattccggaataccttagggagcggacagaaaaccggatcaaggcaatacgtgctttcctaaaagaaggtgcatctctcggcgagatcgaagataagtacggaatcaatcgtgtctctttgtaccggattattgataaatgtctgtccttagacagtgatggtatcgccaccggctacaagggggctattccatatcggcggacgagtcctcaaaagtatcgccgtgaaaagcaactggggagttcgttgtcatcagagaggaaaggcgatgcgggcgcgtttagcaagttcatagatgatcatcccgacataaaggtctggctggataaggccgcaagaaagtacaagcctagaaagcaaggcggcgatagtttcgatgttttacatgctgcctttctgaaacaatgtaccttgctgaatattggcgacacagaatacccttataatcgaaagtccatggcgcgttctgcactgcgagaacatttaagatccaagaacagagaactgaaagccgctgaagaaaaagagcggcatgaatgcgacaccagagacattatgccgccaagtgatgtgctccagcaggtggaatgtgatgggcacatgattgatgtacgtctcgtaatcgaggaagttgatagctttggaaagccactgcggtatgagattttgagagtatggttgatccttctaattgacgtgttttcgcgctgtgtactgggctattcgatcgccctcggtcaaaattacgatcaaattgatttgctcaaggcagtatttaatagtttggcgcctcatcagaggccgcttgaggtgcttcccaatatccactacgcaagctccggcggatttccaagtgagcatggctgcgcatgggaaacttgggcgacactaaagtttgacaatgcatgggcgcacaaagccaagcatgtggtacgggttcttcatgatcgtgtcggttgtgttgctgaatttgggcgaccttatacacctaacgataggcccatcattgaacgattttttctttttattgtgcagcactattctcatcgcataattgggacgaccggcagtgatagtcgagacaggataattgaacgactatctccaagttcaaaaaagccactacagatgctactaactttggatgagctaaaaagtaccattgacaaggtggtctcggactacaatggtcggcctcactcgtcgttgcaggcgcattcgccactcgagatattctgtctaagacatagtgaagcagcactcccgcccaacaagctttctgagtgttatagagacgctggactgtttactatggcgagagaggccgttattgtaaagtcttcttcaaagtacggcggagcctacataaatttcgcatacttgaagtatagaaatcctgacattttgaggagcgactccgcgggcaggcatatgttcattgagtattcccgggaggatgtttcgttcgttcggcttttggacgaggatggaacatatatcggaatcttaagtccgcctcacccctggtgtctgcaacaacatagtctgaaggtgcgcagcgagttatggacggagactaaggcgggccaatttcaattttcccgcgatgaaatgccatgtgaggctattcgacgatataaaacctcgacgggaaatacatcacgaaggatcgctacctcgctgtataaagaggttgggcgggtcaccgaggcatcgcctcccgtcaaggctgttgacgacgatacaaagacgacgccgtccgtagagcgtgtaaagctgacgaaagtattcaccctctga

SEQ ID NO: 341111 - DNA, 993 bp, Pseudomonas aeruginosa
atggacattcagcacatgcggccaattgatacggatctgcatccagtgtgcaatcggacatacctgatgcccacgtactctattggcgagacctatgccatggtgctgaagacgatcagacggcgcgattccggactgatgatctatgggcggcctcgctatggaaagaccagcgcgatgctgtattgccgacactgtctcaatgccgattttcctgacttgcccgtagcgatctacaatgccaaacgcgaagtttcccctcataaaggaaatttctacatctctttattagaggtggtgggacacaaacgctgggaagatcatagcagtgtcgtcgtgaagcatgctcggctagtgaattttatggctgacgcagcttcacgcgacccacgaaaactcttcatattgtttcttgatgaagcgcagcgtttacttcacgcacattttgattggattaaggatatatataacgacttactgtttcgcggagtgaccctgcttcctatattggtcggacaacgccagttactcgaccaaaaaaaatctttcttgcgcgccggagaggagggcgaggctatcgtgaatcgttttatgctttatgaacatccttttcgcggcatcaaggcgaaagaggattttttggactgtctgggtcactacgatgccaccgtttatccggaggcaagcggttggacctatactcgattcttcctccccgaggcgttttcagccggcttccgtctacaaacttatggagatatactttgggaggcgttcaatgattcgtataatgcattgggcatcaaagagaatatggaagtgcccatgaagtatttcaccaagaccgtggaaatgttgctaatcgagaatgccgatcgtgacggattagatttttccctgtcgacggaagcgtgcatgcgattgatacaggaatcatggtttcaagccgccaccgccaactctaaagccgcgcatgggcttagcgagcgatga

SEQ ID NO: 341112 - DNA, 1461 bp, Pseudomonas aeruginosa
atgattgtcactctggatgacgcactactcaatcctcagcctaggtattgcggattgaaaccaaagcatattccttacgagtcagcttactcaatcttctgcaggttctctctcttcaatgtcgttatgggtgggtcgctggtgaagattcttcgccatcattgtggtccaagtcctgcccagcggcgccagttcaggaacctctcacacctcgggtcggtgcgggtggacggattgcaggagctgcttggtctgcatgcttggcaagccgaatctatgttcctgacgccaactttcgttaggcccgatcggcacgtggcatcagtgctgcgattctgcccggcctgtctcgctcaaggacggcattacacgttgttccaatacgaactgatcggtacctgcccagtgcacgggggcggcttgctcagccaatgcccccactgcggggcttcgacaacttacaagctgcacgcgaatttgctcaagcatccgtacggctgctggcattgtgggcggcagttgggggctcctcgggaccggcagtccttgcatttcactagtcctttgggagcggaacgcttgcgccaagcccaccagttgctgaagcttggaaaagctggacgcgtcgtcttcgatatcgccggtgccgaggattttcaatgcgacaatatcctgcagttatcgcagtccattgagcagtttgcacgagtggaagcggatctctttcgggaactgcaggtgatggcttgtaatccttcgttgtctgtcgtgctgactcgctacccaacgtttcaccccgacaatcgatcggagaagagagcccctgaggaggctgatgaggctcttgcgaacgaactggccgctattacaaaatccatcttccggaatttcaagaagcggtattttccagccttacggctgacggacagagtgctagcgatgctgtggcgcgatattcaaggtgtctcgctccccgttgaatattacagcggcatggcttttctcgactggctgagctattggcgcaatgccaaggtgcctagtgggctgagatactcggctgcagggtgtcagaagaggatgcgcgcatggatagcggagaagaaaaggcatggcgtgttccggcgggctaataccctctcgagcgagcgctggttgcttcgtcagatgctggcttgcgaaattacgacccttctgcagcgccaatcggagcaagggctagctctggcggaaaagggcacgcctgcgcagacggatgtccgctatcaccgcctcatccatcccgtatgctgggcagtgtatttttccgaagagaacagagggatgtcgagcctgacatttatctcagcgctctcctggcaagctagttgtagcggcgaacatgatgggaggtcagtagtcgactgcaaacttgtccacagtcatgattgggaggcggtgctccattcgctgaatgcttga

SEQ ID NO: 341113 - DNA, 1122 bp, Pseudomonas aeruginosa
atggtgaagcgcctaatagtgagtggtcgatatatgagctatcaagcaaaagactcgcaaagtgcaagcgccgctgaacactatgcattgcgattctcctatcgtaagtcagtcaggatacgtcgcgacctaaaacactttgatacatggttacgggttagctttgatagctccattgatggcccagtgacagacctcacgctctacaaatggttcttccttagccacatcgcgctttatccgactacgatgaggcgcgatcgactgatgtcgaaagacttggattgtgagtttcagagattaggaatgactgatgccaatgcgctcagctgtcggcaagtattttcccgccttctatcggtcattcgctggcagcaccaccattttaatgccgataaacacgctcttatccgcgaattagttctcttctatcgtcgacttagagagacgacgcggagcacggagttgacctataagtcggcgctacagtccgagacaggcttaaaggtgttcagagtcggcgatacgccgggggctcatcctgaacgcgacttggtcatcctcttgatgacttggatcgtgggctgcacacccagagagttaactcatctgacttttagcgatctcgacgctttgggacctcttaagtggacgtattaccgccatggtgtaccggtaaagctgaatcactttacggcactgagcatactgagccttgtagacgctgatagttttttgaacaaatctgatactgacccgctgttggtgtgccatgacggaaatgcatggaaaaacttaaccgaaaacgagattgaggtaattatcgagcagcattatcgatttgaagtggcgctgtgggatttcgatcaatataccacactggcccctgctctagcgccttgggaagaggccttttacaccgatgagctaaaacggttggcgaagaagactctggctaatcgccgccactctcactctatcagggataaagaagaacatgatgactgggatgccgccgtccaaaaaatggcaggacgatccagctctgttgaacatgaaatcaaggaggctaacgagggcgagcaggttgattgggatgctgtcatcacgatgtccaagtag

SEQ ID NO: 341114 - DNA, 1170 bp, Pseudomonas aeruginosa
atgaccccagaagatatcgccaataaactgctactcaagcttttgaaaatgggtaatcaagccggcgccggggtgcgtcgacgcgctcctgccttgacggcgagacagattaaaccgtacagcgcgatcagaaactggcatcaaaagcagcaatgcgaggaggtgttcgtgagtgcccaggatgccggggccatcagcttcgtgcgcgacaagctgaacccggacgatgggttgattgaacgcatcgacctgatcgataccgtcgccctcgcccgatttctccggcaaaccacccacactgatgtgttggctgcagccatatcgctcttgacgccttacctgacgcagcatgatgtactcgaactggtggttgaacgatgggcacggatggcaagcgtccgaggatgggggccggccgatgctgctgcttgggtagacgcaatcacagtcattgagcaatgcgctcgcgcccaagctacagccttgtctcccctgcgcgaagtcagcgcgcgtctgtttcgaaacagcaagcggatcgagcagttgactgtcccgttggatgtcttgctacagggctcactggaggttgcggctaggacaccgtcagaggtatggcaggaactcggattgtttaaagaggagcagccagtattacttgcaggcaatgtggaaatcgtcagaggtcgagtcaccgcagtgcttgatgagccctataccggacttcccgccagcgccatttatgccatctcagggacggtcgaaagcgtactcactatcgaaaacttgacgacgttccacagtgaagccaaacggtacttcgaccaaccgaagctgctgatttatacagctggaatgccgtcaccggcctggagagcaatgtaccaacgcgtactggccggcattgcgatcggtaccccaatccagcactggggggatatcgatgaaggtggatttcgcatagcggccatgctggccaaaacttcagcgctcgcgggacattgcctgaaacctcatgcaatgcatcctgataacgtgcccttggatcttagaaagccggcttccaagcgcacgttacagcgaatgcagcgtttcgctgaacaggccgggtggcacgaactcggcgcggctgtgctgagctccggttttacagtggagcaggaggccctgtaa

SEQ ID NO: 341115 - DNA, 1152 bp, Pseudomonas aeruginosa
atggattacgatgccgattttgttgccaatacatgggataagcttcttgagcgcttcgacacgcctggccccatggccagccactgtctcgcagagttcgataggagcgagaaagacggacaacgggaagctaatatcgcacataagcttctctggacgtacctgcaggagcatcatgaaatcctgcctgaaaacgagctcgaagattggcgtgcggccaaagtctggatcgaccgtcatgtccagaaactggagaacactgaactgccagagcacaaggcgcatgcggaggatgcctatagggcttctcaggaaaccttccgtcgggacgtggcgatcgccctaaacaccaatcttgaattccttcgccagaccttcgaacggctgaacgcagcgctgcgcagcacgccaccgttcactaacggtgaacgctatcaattcatgtacaaggttcgccctcacctcaaacccttgctcgacttcatcaaaaatgtggccgatttcggcgtcgatggcggactctttggcgaggcaggggttattcctccgcaattcgaggaactcctgcgcgacaaaaccgccgtcggtaatgcgggcggcaagagtccattggatgattaccgggagttttatgaattcgatattcgtatcgagcaagtggacccggatggtgtgacggcgaaaaccattggccacctgagcaaacggatcggacccggttcgggaggggagcaccgcgccccactgtatgtcatcgccggtgcgggtctgtggtctgcttatcgcatggatcacggcgccaacgacggtttgaggctgatcatgctggacgaagcgttcgacaagatggacacctcgaacattgtgtcgacgatgaagtacttgcagcagctcggcctgcaggtcttgctcgccagtccaggggagaacctcggcatcctcaacgcgtttctcgacagctacttcgagattcaaaaggatcccgtacgtcatgctgttcaggtcgaccgcgtcgaagtgacggaagcgatgcgcgagcagttccgtgaggatctctgggaatttcatcccgagttgatcgagcaggaaatcgcgtcgatgcgctcgcaggcatcgcaaacttcagatcgcatcagcggcgttacgccatga

SEQ ID NO: 341116 - DNA, 177 bp, Pseudomonas aeruginosa
atggcccgcggcggcatcaacaaggcgctggttcagaaagcccgccaggccatcctggcgcggggtgagaatcccagcatcgacgcaatacgggtcgagctgggcaataccggctcgaaaaccaccatccatcgctacctggggagcccgcagaactcggaaaaaatcgtacgctaa

SEQ ID NO: 341117 - DNA, 672 bp, Pseudomonas aeruginosa
atgaatttcccccttatctcggcatgcccccggcagcaggcgatcctgctggcgcaaggcgtcgccgagcaagcgctggcggagcgtcgcgcgctgctggaaaccgaacgtttgcgcgtggccgcggtcgaggaagaggttcgccaagcgacgaaccaggcccgccagcaggtggcggccgcgcaggcggcgcagcaggccgcggagactcgcctggccgacctggagcagttgctcgcgcagcgtcaggcgcaattgggcgacctgcagagccgctgcgccgaactcgccgaggaacgcaaggcggcgctgcaggaggccagtacgctgcgccaggaactacaggctgcgcagcagcaatgggcgctggagcgtgaggacacggcgacctatgtgcgcggggtggaggagcgtgcgcaccgcgaagtcgatcgcgcccgcgaggagagcagggcggtgactgcacagctgaaggctgccgggaagcagcaggagcagctgcgtcagcggctggatacggcactggcgcaactcagcgaggcgcagcaactcgccgctgccgagaaggctcgggcgaacaccctcgagcaacagctcgcccagccgctgcgggccaagcgcccccgcgccacgccggcgaaacgaccgcgaaaaccgacagtcccgggctag

SEQ ID NO: 341118 - DNA, 402 bp, Pseudomonas aeruginosa
atgaaccagggagcacgtcagccagcggcgctatcggtcgccgcgctgagcgattgcctgcgtcccgcgaacggagcgccctattcggttgagcgctatgtcgaaatctttggcctcagccccgccgcgtttgccgcgcagattgatacctatcgtcaccagcagccaggcgcggccagcgcatccgatgccgaagcggcgcaacgctttatcgcggatgtcctgcaggtgattttggccgtggccgagagcggggtcaccgtcgagcgggcgatcgcctggtttcgccgcgagcccttaccgatcttcgaacagcggaccgcggagcaattggtcagccatggccaggtcgcgcaggtattgcagtttctggcctcctggcaagccgggagccagggatga

SEQ ID NO: 341119 - DNA, 384 bp, Pseudomonas aeruginosa
atgagtcaggatgcccagcggcagatcggtccgccaccgagctaccacgcctgctaccgcaccgtcctgcgcgccgtggatgcgcgttacgacgttcgcggttctgtactggcggagatggtgaaggcctgcctggcgcagcgcgccaccctgcctgcggcgctacgggcgcatttcgcgcagtacgcgccagcagaagcgatggcctacctggaaagggtcacggccacgctgctgtttggtcccaaggggcgcttttcgccgcaagagtaccgctactcaggcgcgaccgctctcggcaagtcatggctggcctgttcagaccgcactcgcgtcgcctggccggggccgcgcctgcaatgtaatcacgtgactaggacctga

SEQ ID NO: 341120 - DNA, 192 bp, Pseudomonas aeruginosa
atggttgaacccaacacctggcgagtggcctgccaggaccccggggacggcagcggcgacgccatcatcgagctgccttccgagttgctcgataggctgggatggaccgtgggggatgagttgatccttgagcgtgtcgagggtgtgctgtccttgaagcttaagccgccgcccggtgagcccaccgactag

SEQ ID NO: 341121 - DNA, 144 bp, Pseudomonas aeruginosa
atgcaagacgaggccggcgagcgaggcctgctgttcaaggtggagaatgacgtccgctattcgctgcacccacaatgcaacctggagcacctgcgcgtgatcaaggtattgttctcggccgagtcggatctgcagcgacactga

SEQ ID NO: 341122 - DNA, 1605 bp, Pseudomonas aeruginosa
gtgatcaccaaaatccgaatccgtggttatcgcatttacaaggactttcttctgacgccaaaccctggcgtgaacatcctgataggagacaacgacgccggtaagtccactctaatggaggcgatttctctggcgctcaacggtcgaattggagggcgtggaatcctagaggagctaaatcctcactggttcaacaccgaggtggtggccgagttccttgctctaaggcaagccgggaagaagccatctcttccggagattcttatcgagctatacctgcaagacatagatgaactgcaggggctactcggggcagtgaatgctgacgtcccaactaatgcctgtccaggtgtattcctctctatctttcccagcgaagagtaccaagaggagctagatgaatggctcaaacatccatcctcgctgctccctgtcgaatattacacctacgaatggcggtcattcgcagacagtgaactcacacggcggccacgggctctatcggtggccaccatagactcccgaacggttaaatcagccgccggcgttgactaccaccttcgccagatcctaagcgaccacttggagtcatccgagaaggcacagatctcgctggcctaccgcaccaccaaagcatctatgacggatggcgcgctggcgcctgtgaataaacgactctccggtattggtgccgcgttgcagcaggagccaatggccctagcgatggatcagacatcccgaacgtcatgggaaagcgtggtcactccacatgtcgacggccttccatttgcaatggcaggccaaggccaacaggctgctatcaagatttcactcgcgatgaagcgccattcctcgaaggcaaaagtcgtaatgatcgaagagccggagaaccatctctcgcacactagcctgaccaccttgcttgatcgcatcgaggcccttaagacggaagagcaacaactcttcatttcaactcacagcacctatgtgctcaaccgtctgggcctggacgctttgctcttactgcatcgcaatagcgctgccaaaattacagagcttgacccaaccacagtgagctacttccagagactaccgggctatgacactttgcgtctggtactcgccaagaaagtcgtgctggttgaaggcccatcagatgaaattatcttcgaacgcatctacaaggattgcttcggtcaacgtccaatgggccacggtatagatgtcatcagcatgcgtgggttggctctggctcgatgtctggagctttgtgcggcgatcgataagcctgtagctgtgatgcgcgacaatgacggtgttgatcctagggaactgtctaaatcggttgaaaaatggctggatgagaaacgtcgagcacttttcatcggtgccgtcgccgatgggcgaactcttgagccgcaacttataaccgcaaatggcgagcctcatttgcgcaagatgctcggcatcaccgcagacgctaccctagaaacatggatggctcgtgagaaaacggaaggggcaattcggcttgctgaatcagctgagaaactcagcccgcccgtttatatgaaagcagcagcggatttcatccacaatgtctaa

SEQ ID NO: 341123 - DNA, 1068 bp, Pseudomonas aeruginosa
atgtctaaccatttaactctggctgttgctggtggtagaaaaactcaaggactagtcgatcattgcaaagcgttgcctacagatcggcgagtgcttgtcgtcacgttcactcagaccaatcaacaggagttgattcgtcgcctcggctctcaggtcggtaatctccacaatctggaggtcctgggctggtacactttcttgctgcgccacttcgcaaagccgttcttgccgtttaaattttctggcgaacgggtaggggggttcaacttcgaaggccgtcctggacagtacgcgaaaggcaggcacagatttatggacggcagcaatcatctgtatgcctgcgagctcggccgtctcgcaagtgagctgatggccacaaccccggcattactacgtaggctggaatgcctctacgacgagatcctaatcgacgaagtccaggatctcagtggctatgactgggatatcttgcgagagttattgcggtcaagaatcgacatccgcatggttggggatgtccgccaggcagtgctttcgaccaatcctcgcggccagaaaaacaagcaatacgggtacgcggatgcacttgagtggttccgcaagcaggaagcggaagggtatctaagcatcagctttgcccgcaagacatatcgctgccgtacggaaatcgccggtttctctgactctatctttcattccgcttggggattcccagagacagagtccgaaaataaccacgttacagggcatgatggcgtgttcctcgtacatagccagcatgtgagtcaatacgttgatcgctttcgtccccagtgcctgagatattcggcgacgtcggccaaagcattctcgctggagtttatgaacttcaaggcgtcgaagggagccacctttgagcgcgtgctcatcgcgcccacagccaagattgaggctttcataaaaaagaatgttcatctcgaagcgacctcagcggcggcgttctatgtcgccgtgactcgggcagagcagagcgttgccatcatcctcgacaatcccgccgcttcggcattgcccgtgtggactccgtga

SEQ ID NO: 341124 - DNA, 384 bp, Pseudomonas aeruginosa
atgttcaaatcggccacagagattgtcaccgacatagaggagtacgacccgtacgccctggtggcgaaagcaattctcgaagaacatggcgttgacgatcttgaagtgacgaaaaggcttgagttcgccgcctccatggtcatccaaagagttggacatccgctagttgactataagctcttcgccatgcgcggcgaaggaattctctatcagatcgtcgcaaaaggcagcatagaggagctaggcaaacttggagtagagctgtcggatgcattggtcgataacttcgatggcgtattgaacgagattctttgcatcgatgtaatcccatttgttcctggcaaccagtcgaggcagatggaggtgtttcgtgtcagtgtctag

SEQ ID NO: 341125 - DNA, 270 bp, Pseudomonas aeruginosa
atgaccttgcaaccgatcagtgatgagcagttggcggaactggccgatggctgcatggattcgattccgtgcccgatctctgcgctttaccagcttgcagagcgtcttcgggctgctgaggctgagctttccttatggcgcccaataatggacgaggttgagcgccgcgcagagaaagaatggtgcctgcaagacaagcgcgacttcacggtaactattcagtacgacgactatgtggccatcgattccgccatggagagcacgccatga

SEQ ID NO: 341126 - DNA, 138 bp, Pseudomonas aeruginosa
atgaacacccgccgcacagcaatctggctaggcagcctcttcggcggcctgctgtacctgttcatcctggcagccggcccgatctggggcggcatcatcaccgcagaagctacgcacctgtccgcagcaggcccatag

SEQ ID NO: 341127 - DNA, 207 bp, Pseudomonas aeruginosa
atgccattcgacgaaagccccgcagtccgccgcataaacgccctctgctctcccgcgccagcacgctacctgcacattcccaccggcattcactgggtcgtcatcgacagcctgggcaatgtcctgcaactcgaaaacatcgagcgccggcgccgactgataactgtttctgacctcgaaaccgaggcctggagaaagctcccatga

SEQ ID NO: 341128 - DNA, 645 bp, Pseudomonas aeruginosa
atgagtgaggtgaagcgtttcgacgtgccgagcatgcgttctttgatccatggcgagcaggcagtaatggggcacgaggtcgtcctagcctcagactacgacgccctagctgccgaggcccaggcgctaagggagcagaatacgaagttccagcacatgctggctgacatcacagtcaaacacttctccgacaacatcaagcggagcaccgctcagaagagcatggacgtttacctgtcggacggcatccgactgctggaggaagagcgcgaccgtatcgagcggaatcgcgatatgtggaaggggcaatgtgagcgacaggccgaacagctcgcagccctgcgcgcaagggtggtggttgtgccggagccgttgaacgaaggcgatgctcgacgagaatgcggggagtacggagcggccatgcagcgtggatacaacgcatgcctgcgcaaactggcgcgcctcaacggcctgacggtcagcgaatcagcgctcgacacgctgcgccggttcgctaccgggaaagtcatgcacctgaacaacggactgtgccctgatgacattgacgggcacgaagcgcgcgatccggactgcccggtatgcagagcgctgatcgagacgggaaaggagagcgacaatgtctga

SEQ ID NO: 341129 - DNA, 444 bp, Pseudomonas aeruginosa
gtgcctgacattcaagcaacctacatcgaagtaagcgccgaagtgcgctattgggaagacgccaagatcaacgggcaggaggacagtgacggctctctggtgccgttccgtcgtgacgacctctggtgtccagtgatccgcctggaagatggcatggtgatggactggccggccggcatgatcgccgacatccactacaaggtctgcgacgcaggccagtactggctgctcgacgacaaccggcaacgtgtcgcccagtgggccggctactacgtaccggacgacttcctctgcccgaccgagaacggctatggcgactacatcatcttcaaggtgggcgtcgatggcctgatcaagagttggagcaagcccgagatcgaatggggtggccgcgaggatgatcaggaaggctggaagcgccttgaggagaacgaccgtgcctga

SEQ ID NO: 341130 - DNA, 270 bp, Pseudomonas aeruginosa
gtgcctgacgaaatttcctatgaatccgaactggccagcaagtgccagggtgccgcccagtgccttagctacaacggcccgaagcatgaggccgaggcgaagcacgtcctgcatgaagcatcgcacgcgctcgacaaacatgctgtgcgcgtgtccgaggacttccctggtcttctgataaccaatgctcgcggcgagtctcggtatatgacatggcgtgagcgtctggcccgctggctgctcaagggtgccctggagattcggccatga

SEQ ID NO: 341131 - DNA, 273 bp, Pseudomonas aeruginosa
atgaccgacattcgagaagagtttgaagcgtggcaccacgctgagttcggctactgcatctctgaggaagatgatgcttggaacgccggggaatgcgccaagcgctgggaaacctggcaagccagccgcgcggctctgagggtggagctgccggataaggcgaagttcgtggagtactacgaagacctagagggcgggacattcaactggcagcgatacatggtcgccattcaagaagccctccagcaagccggaatagaggtgaagccatga

SEQ ID NO: 341132 - DNA, 336 bp, Pseudomonas aeruginosa
atgaagcaagccctcaccagcaccgtggtcagcctgctgatcagcgcgtgcctgtacttcggacatggctccatccaccagttcgccttctatgtgtcggcggcactaaacgtcctctgctggctgctgatattcgccggcggcatcaaggggcaaggagccgcgaacatgctcgcccacccttggctctccatcccaaccggcgctctgcacgtggcagccctggccctcacggatcaccccgcactcgcggcttcgagcctgctggtgcaaatggcttgctacgccctcgcctaccaggcagtgcgcagcgccgagcaagggggtgatctatga

SEQ ID NO: 341133 - DNA, 324 bp, Pseudomonas aeruginosa
ttgaagctcctgggccagagaactgatctccccaatcgcttcatcaagtggcatcgggcggtaggtcgaatcgtgccttccgcccatccagccagaaatgacgacgaggccatcctcgcgaagctcaagaacgatcgaaggccggatggcacggcggagctcggtagcctgctgcaacatgatctgagcattccgctccaggtcatccgccagcagcaaattcattccaaggtcaacgctcagatcacgctgaacatccagcccgaggaagcgagccatcttcgaaaggaaagtcacggtgccacctcggcactggatgcctga

SEQ ID NO: 341134 - DNA, 1698 bp, Pseudomonas aeruginosa
atgctcaacggtggaccgctcaatagcgctgagctgaactcggccgctcaatccgttgtgcctggtcctgagccgatcatcccaggctacgctttcacatggcgagcaatcgtgcgtgttggcgatgacgacgttacaccgctcctgaccggggagatcgaggtcgatcgtgaagagggtgcggctggcgtcgcttccttttcgatctatctcggcgacggccctgttgtccctacggactggattggtcgagccgtaaccatcgactacgcaacggagaccgccggcgagctgagtcagggccggcggtttacgggaagggttacgcagccagcctggaatcctgttcggcgcgtcctggacgtcagttgcacggaccagttgcagcagcgtgtagaggccatggagattgcggccgtcgacgccctggtcggcggcgcctggtccgccgatgtgttcgagccggtcgatggacgctcgcggtgggactacgcccaggagcgtttgaccagcgttaccgggagcttggactgttcgccatacggcgctctccgcgtcacgtcatggctttcggtggttcctgccttcgagttcggccaaggctctacggtatacggatcgcttacggtcgagttggccgacctgagttcgcagacgaacaggatcgagatcgagtgcgactaccgattcagccggctctggcagttgaacgcctcgtatggttggcagcaccccggcacgggtaacgcggtcggcgaggcggggttctgtaattggcgcggcgacgacaccgagttaccggatgtcgagatgatcacctcggcgaccgagagcagcggccagacgttgttctatgcgacctggtatccactgccgcccacgggcgtctactgcaatccgccggcggcatgggtaaacaacttcaccgagctgctgctcggcggaaattggattgctggccggcgctgggtgcagtccgttacagagcgctatcggttggtcattgaggttcagccgagcgtggcggcgaccggtccgattgtcggtcggcagcgtgcctcgttcgagatcgagtcggacagggccgagcgctgggaaagcgacccgatcaccggcggcagcaccggctacgacgacgagaaggatggcggccggcgtttgtccgcgctgaactgcttgttggcccagggagcaacgacactcatcgccgcgcaccgtgggacgactgtgacgtgggacgtgcccaccagcatggttctaccgatcgacctagtgcatacgctccgcctcgatgatcagggggcgcgcgcggtgggcaagtgtcgacgcattgtcgaccggctcgacctcgcatccggaagcgccctgaccacgatctctatcgcggtgatgcgaggcgggggcggcgcagcagacccccttgttcctcctgctggctcgtccgatcccgtcagtccaccgtcgggcggcggacaactcacgacgcagctcgggggccgcaacggcagtcccgcgtatgacgatgaggcggatggtttctcgggaaactggagcaaccgcgatcccggcgctgagttgttcccgcggcgcttctcgttgaccgcaaacgacattccggagacctaccgggacgagcatgcgccggagctcgcggccacctaccgggtatccgtgcctgacgacttactggagatgtag

SEQ ID NO: 341135 - DNA, 546 bp, Pseudomonas aeruginosa
atggcaactgttacgcacgtcctgtccggcgccggggagccgctcgatccgccccccagcatcggcgctcactacgtgaacacgaacaacggcgcgctatacatggcgaagggcaccgcgagcggtgccgattgggtgaagctgggtagtggcggtggcagcgctccgagcgaggtgctgcatgtcaataccgatggccagttccttctcgagcctcaacactcatttgttgaggcccgtctgttcgcaattcccgagctcggcactgcagcaattggaatcgatcccagcacatcccgacagttcgacctgaatctcagaaccgcggctccgagcgggcaacaactgcagatcagagttacatcgggtgaattgcccggaggtatgtcgatcgtgggcacctcgaggcagtgggcggttcaggagtcgtatggattcgtgatcaatgcaaatgacctcaacggcgaagtgtgggcgcgcgtctatttcgatgctgacgagctcaccctatcgatgcttgtgttcagcgatgtgccgaacgcgtag

SEQ ID NO: 341136 - DNA, 561 bp, Pseudomonas aeruginosa
atggctcagattcgatttttcaaagtggcaaccctgccgggtacgctggaacccgattcgttctacttcgtcgagaacggcagctactcggagtcctacctgacgaacagcgccggcgtggcgcgctcgatcggtaacagcgcgatgatcaacgcgctgatcaacgaggcgttggccagcttgcccggcaccggcgcgccgatcctgttcgttgcggatatcgctgcacgcgatgccctggagcctgagggcgcaatcttcgttctggttcaagacgcttccgccgacccgacagtcgaatccggcgctgcgctgtacgcatggaacccggcgaccagcgcgtggctgaaggtggccgagtatgagtcgatggacgtcgagctcaactgggacgcgatcaacgggcggccgacctcgactccggcgcagatcgacactgccgtttcccaggcgcacacgcacgcgaacaagtcgacgctcgacaagttcagcgaggacggcggcctggttcgattcggcgggcagcctattccggctgagtggaacggggcggcctggtaa

SEQ ID NO: 341137 - DNA, 264 bp, Pseudomonas aeruginosa
atgctggtgattcgattcaagggctggtcggtgaaactcgaccaccaggtgggcagcgctgggaaacatggcatctggtcgttccacggctcggagagcagctacgtgccggacatgcagacgattctccggcatgctgctattcggcctgcggagccgaaagaaggcggggaggtcgaggtattcatctgtgatgcacggatggcgcaggacgaatggcgggcggtagggaccggcgttgcggcctatgagtcggaccgctga

SEQ ID NO: 341138 - DNA, 417 bp, Pseudomonas aeruginosa
gtggtcgccgcgggtcgctcgatcggcatcgaggcagcggataccgcagtgatcgccaagatggtccgggtaatgatgttggcgcccttcctgatcctgctctcggcctggctggcacgcgacaaggcgcaccgccggcagcacagcggcgcgaccaagatcaccattccctggttcgccgtcggcttcgtactggtcgccgggctcaactcgctggtcagcctgccgccggcgctggtcagccacgtcaacgacctcgacaccttcctcctggccatggcaatggccggcctcggcctcggcacgcacctctcggcgatccgccgcgccggcctcaagccgctgctgctggccgccctgctattcgcctggctggtgctcggcggtggattactcacccgcctggcgctcgcctga

SEQ ID NO: 341139 - DNA, 270 bp, Pseudomonas aeruginosa
atggctcgcacgctccgcctccatttcagtagcgatacgttgctccaggtcgctctctgcagccttgatttcagcccactcacgatccagcctgctacgtgcacgatcaagctctatcttccgctgctggatttcatgctcacgctgatccaactgcctggtgcgttcggcctccgcctcagtacagttgaacttgacctcggccaagcgccgagcgacctgactgagctcgccatcaagttggcgtttttcatcctgcaactgctgtag

SEQ ID NO: 341140 - DNA, 1662 bp, Pseudomonas aeruginosa
atgatcatcaatgtcgataaaaccaacctgaacaaactgctgggcgtgcccaatcgtcagctgaccatcccggcctatcagcgcccctatgcctgggaggcggagcaggtggatgagttgtggcacgacattgtcgaaacgctgggcagcaatcacttcatgggttcggtggtgctgtgttcgcccgatcaggcccgccccgaggtcatcgacggtcagcagcgcctgaccaccatcattctgttgctggcgctgatccgcgatgagtatcagctgcgcaagcccgatctggtcgggcgcattcagcagtttttgcagaacgcctatgccgagccggacctgcgcttcaagttccgccccggcaatgcaaatgcgcgggtgtttaccgatttcatcctgtgcgccccggacgatgactcacggcgcgactgggcgaccgtacggcagctcgccagccatgagctgaaccgcaacctacgcatgattgaaaatgtcgaacgtctgaagggctatctcgtcccctggctggcggctagcgacaaccccttgcaggcgctggagcagatcgaacgcaagatcatgaccgggctggaattcgtggtcatcgatgtgccggacattgccaatgccttcatcatcttcgagaccctgaatgatcgcggcctggcgctgtcggccggcgatctgttgaagaaccacctgcttgcggcggctgccaagtccagcgagtcggtcgaggccctggccgccgactgggacatgatcatcgacagcctggaaggcggcgacattacccgctttctgcgtcactacttgctgacgcagcatgcccaggtacagaaagacgatgtgtttgccttgttcaagaaggaggttggcagccggggcgttaagccactggtcaaggatctcaagctgatggcgcgcttctacggccagttcatcaagcctgaactggtggcggacaaggccgtgcgtgaggtctaccagaacctcaataccttgcgtgccaccatgtgctactccgcgctgctggcggcctcggcaacgctggacaacgacgcgctgcgcgatttcgcgcgcctgtgtgaagtgctgaccttccgctacagcaccatttgcagcaaggactccaaggagctggagcgcttctatcatcaggcggccaaggtgctggcagccaagggcctagaggggctggaggaggcgcgcaagattctcgaagcggcatcgcccggtagtgaagagtttgtgctggccttccggcagcagtcgatggggcggcagtacatcgtcaactacatcttccgcggcatcgagaatcacctttcgccggaggaaaagacactgctgaacacccagcaggtgcatatcgaacacatcatgccgcagaccctgtcgctcgcttggcgagaggccatgggcgaggctgccgatcagcatgagctgttcgtcaatcgctggggcaacctgacactgctgggcggcaagctgaatatcaccgcttccaatcagccgtttgccgagaagctggcgctctatcggcagtccaagatcgccctgtcccaggcgctggctgcctatgaggattggggcctgccggaaatcgaggcgcgacaggcgcaactggcggaaatcgcggaaggaatctggcgcatctga

SEQ ID NO: 341141 - DNA, 1395 bp, Pseudomonas aeruginosa
atgagttttccgacgtatccggcttacaaggattccggggttgagtggctgggctcggttcccgagcattgggcaatcttttccctgaagcgttcggttgatggctgtaccaacggcctatggggtgacgagccagatggggaaaatgacctggcagtgattcgtgtggcggactttgatcgcgccacctgccgtgtcgggctcgacaagctcacgtatcgcagcattacgcagaaggagcgtgcttcacgtcttcttcagtctggtgatttgctgatcgaaaagtctggtggtggcgagaagacattggttggatgcgttgttctgttcgaacatgaattcgaggctgtcacttcgaattttgttgcgcggatgcgaccgttgccttcgtttgatagtggttttctttgctacgcattcgatagcctttatcaggggaaagttaattttccggcgattaaacagaccaccggcattcagaatcttgactcggaatcctacctgcaagagcgattctgctttccaaccttggcagagcaaacccaaatcgcccgcttcctcgaccacgaaactgcccgcatcgacgcgctgatcgaagagcagcagcgcctgatcgagctgctcaaggaaaagcgccaggccgtgatctcccacgccgtcaccaaaggcctcgacccgacggtgccgatgaaagactccggcgtggagtggctaggcgaggtgccggcgcattgggaggtcagatcaatctcatcgataagcaacaaaattaccaacgggtttgtaggacctacacgtgacatattggtcgatgagccaggcgtccgttacttacagtcgcttcacataaaatccaataagataaagtttgaagtgccgtattacgtgtcagagcaatggagcgctgagcatgcaaagtcaatccttgcctccggcgatgtgctaattgttcaaactggtgatattgggcaggtcgccgttgttacagaagagcacgctggatgtaattgtcatgcattgattattgtctcgcctgttcgagggattgttctaggtgagtggatgtcatgggctctaaactcaacttatggatatcacagcttgctttctattcaaacgggcgccatgcacccgcatttgaactgcggcaacgtgaaatttttgaacctccctattccccctcttgaggagcaggctcgcatagtctctttcattgaaagtggtgaattagagatggactcgcttatgtccgagaccaaacgaagcttgctcttgctccaagaacgccgctccgccctgatctccgccgccgtcaccggcaagatcgatgtgcgcggctggcagccaccggcgagcgctaaagcgcccgaacacaccacacagatgaccgtctga

SEQ ID NO: 341142 - DNA, 636 bp, Pseudomonas aeruginosa
gtgagtgaccaacttatttcactgcaggacacctatgggcggctgatgagagaggccagcgatagccgccgtaagcgcagcctggaagccatcaacgaagcgtgccggctgctgcatgagcggcattccttggatttctcctacaaggccatcgtcacccttggcaaagaccgtgggctaccggttcccggcgagaagtccatcgtcaatacgaccggcgcgcattaccgggaactgatccaggcttggaaactcgcgtcgctgcccaaggccagtaagacaaaggctgatccaaatgattggatcgaacacatccaagacccagtgctgcgcatgagcgtgatcctgctcgccaaagagttgcgggcgctcaaggccaaggagtcgcggaaggctaagcacagcggcgcaccgatcatcctgggaagcgcagcggggcaagccgtttccactcggccgctcttgaatgatgctgagttggcagcgttgaaagctgcgattgatccggcgtcgcttggcctagtggggctgtcgattggcagcaggggcgaattggtggatgtgaaaggaaggacgatccacaagcctggcttccgcgatgcgcttgagaaaattctagccgtgcaggtgaagtga

SEQ ID NO: 341143 - DNA, 2859 bp, Pseudomonas aeruginosa
  misc_feature (7)..(13): n is a, c, g, or t
atgaacnnnnnnnatgccgacgccggctggatcgactggtacgacttcctcggcaatgaacggcgagacgcctacccgacctacgtcgaggcccaggcggcagcccaggcgctgggcattaagaactatcctgactacaacaagcgctaccgcgaagacccgaggctgccggcccaacctaataaggcctatgccgacgccggctggatcgactggtacgacttcctcggcaatgaacggccagatctctacccgacgtacgccgaggcccaggtggcagcccaggcgctgggcattaagaaccagtctgactacaacaagcgctaccgcaaagacccgaggctgccggccaccccccacacagtctatgccgtcgccggctggatcgactggtacgacttcctcggcaatgaaaaccctagcgctgcgctagcggactacccgctcatgtgggcaaatgttaagcggtggctaaagacccaaacgaacatcaccgcaaagaagtctgcgatcaaggcttttctgggcggtttctatcaggttcagaggttgaccgacgaacccaggcacctgctgctgcgtgccaatccatttcccaccgaggcctatcagcagttcatcgaggctcaagccgagtccctaaaaaggccttatcacgctgctatcacggcttttttcggctggcttttggatgaacactgcaccgatgtcgacgcagacgagcgcattgtgcttgctgagttccggaacccctttcatacgttgctggccggctttgcagatagcttgcaggcctaccggcccagccagtccaccaaaccgccgcttggttatgaatacattctccgtgcgcgcaatttccttgtgccgaacggcgaacaggtgttgcagacacggcccggcctgacggatttgccgcacctacaagacttctttgcgacccgcgccgactggatttatgtggacgagtcggtgatcgaccgcgacgatccgaactgcatctggcgcgtggtcaaggctgaccgcaaaatgaaagacaagcgcgaagtggtgaacagctatcagatttggtcgcctgctcgctttgtggcgctctacacgctgctgcgttttccgctgcgcggccaacagattctctggctggacagcggcgaggcggatgacgagattgcagttcttgatgctgagcatggcggtgttcgctgggagaagaacactggccccctggctgggaaagggagcaagaaacgtcgcccgcaagctgctgtgcagcgcggcgagaacgacgccccgaagctatatgtgactaccaacaagaccggacgccaggagggtggctacgaagttccgtggattcctgatgatctgctgtattggttcctattgctgcgcgactggcaagccaagtacaacccgctgaaagagccgactcgctggtctgatatcaagcttcgtgctgaaaccaatgagaagattttgcaggcacgtggcacccaatgctttctgttccgcgcggacgcctcgggtcagccggcgttcaccacaacggctttcactcacactttgccggcgttgctctacgcgattcagcgccccggcgaaaaccttgccagcgaaagccccaacttcaaagtcaacaatcagcgctatatcagcccctacacaccgcacagcctgcgtgtcagtctgattacggcgttcatcgcagacggcgaagcgcctattcacctgatctccaagcttgttggtcatgcctcgctagtgatgacgatctactacatcaggctaaacaacgatcagatgcgccgcaccatgggcgagactgagaagcgcgccgcacagatctcaactcagcgccatgccgaagcggtaagaacgcagggattacagccgcttcgacatcaactgattgcaacggacggaaatcgcttgctgctcgaatctgacgtgccgaactcggcctgcgtggtgttcgaccacggcatctgtcccatgtcaggcgctgcatgccaaagcggcggcgaggctgtggccgagagaaaggttgaaagtctttatgcgcctgtcgaagcgggctatctcgggcagaaaaattgcccgcgatgtcggttctttgtcaccggggttccgttccttggcggcctggtggcgctggctaacgaactcgcgttagagattcatgcggaaagcgcacgttttcagagctacgcggcggaggtcgatcggcttgagcaggactggtatgacgcctgccaggccaatcagccggacactcagcactctattcgaaagcaggcgagcgccaaccagcaactgagcgccgggaagctcgatggcctgttggctgactatgttgccgtcaatcactacgttcagggctgcctgaaactcatcaatgaaggagagcagagcggcgaaggcgagaatggcgtcagactgatcgccgctggcgatcttgccgaggtcggtgtcgcctttgaagattccgagacgaactaccatttgctggccgaaatctgccagaacgcgaccatctatcgttcggccaacccctcgcgggcggtgcctctgatcgccgaagccatcgaccgcatggccgaaaataacggtttggcaccggctatgttcaggctcgatgacgaacagaagctggtcgttgccaacgagatgaatcggattctccttcagcgtttgggttcctgggaaaaaatcggcgacctgttctcgggcgacctgatgctgctcgacattgacactcacgagcccgaactgacgcgcatttcgaccgagatcgaacagcttctttccaatcccattcgcgtgcgccagttgacccacgaggcttctatcagtgagtga

SEQ ID NO: 341144 - DNA, 414 bp, Pseudomonas aeruginosa
  misc_feature (362)..(368): n is a, c, g, or t
atgccagccaagaagaatttttatacctaccccgaggcccaagtcgccgctcaggcgctgagcattaagagtcgttctgaatacaaaaatcgctaccgcgaaaccccgaggctgccggccagcccaaattactcctatgccgacgctggctggatcgactggtacgacttcctcggcaatgagcggcccgacctctacccgacctacgccgagacccaagtcgccgctcaggcgctgagcattaagaaccagcctgactacaacaagcgctaccgcgaagccccgaggctgccttccaaccccaatcaggcctatgccgacgccggctggatcgactggtacgacttcctcggcaatgaacnnnnnnnatgccgacgccggctggatcgactggtacgacttcctcggcaatga

SEQ ID NO: 341145 - DNA, 1371 bp, Pseudomonas aeruginosa
atgccaacaatccttgagtcgtcccaccaagaattcagatcttttgtggtcggtgcgactggcatacagcatgtcctgccagtcatcgtgaccgagcatggggttctggatcagtttgctcgatacatgcatttgaatcaccgaaagagccgttcttggcaggagtcctcggtttttgcagtgcgcctgctgttggagtttatggaggccaatcatggtttttatgacgagccgcgcacgctgttcactgtgttttccgatgcattgttcacgggtactgtctcgaacatcggcgatccttctggtctgtggtggcagcccagacagccggatgacgctggtaagctgatcggccacattacgcagttcactgattggctggcgctcgtcaatgaggacgccaagtttcagcttaatccctggcggcaagcgactcggcatgaagaacggctgaattgggctgcttattcacatcgtagggacaacgcattcctgtcacacctttggcgctccaaaccgcagacgagccagtccagagcagtgcgctcaagaacgctgccggtggagcggcaaacgcccgccaaggcatttccagaggaatattttgaactgttggtatccgagggtttccgcaggcggacgcgagattcacgagggccgacagaccttcgcaatgtcctgattacctacctcatggaatacggtggagtgaggctgtccgaagcgttgtcgctatggagcgatgacgtaagcgtagaggacggggaggtcatcgtccgtattcatcaccctgaatacgggctggcacctggcggtaaaaccaaccgcgctgcttacctgcaaaaccaatatgggctgcaacctcgcaatcggctggtgaaggcgacagacccgctgtttctcggctggaagaacggactgattactgacccgcatcgaaactgctttgaggtgttcttctatcccggtgattttgggcaggtatttgcctgcctgtggcgtgactaccacctgaaacagcgggtgaagccgaaggctggcgaagctcatccctatgccttcaccaacagggacggccagccctattcgcaccgcatgtttcgcaaggcccacaggttggctgctgagcggatcgggttggattattacaagatggcgggtaccacccctcacggccaccgacatgcatttggtcagcgtttggcacgtgatggagcttcgcaactcacgattaggaacgccatgcaccacgtttcgctcgaatcgagtctgatctatacgcagcctacggcgaaacagatgcgtgaagaactccacgatttggaggaccgcatgcggttgcggcatgcacaggccgtgaccaaggactga

SEQ ID NO: 341146 - DNA, 630 bp, Pseudomonas aeruginosa
atgcctatcactgagcagcaactgctgcaaatcctcccgaacgccggccctcgagccggcgtttttgttggtgcgctgaaccgcgggatgacccgcttcggtatcacgtcgcctgtgcgcgcggcggcgttccttgcccaggttggccacgaaagcgcccagttgacccggctggtggagaacctcaactacagcgcccgcggcctggttgcgacctggccgagccggtacctcggcgccgacggccagcccaacgccctggcgcagcgcctggcgcgcaacccccgagccatcgccaacaacgcctacgcctcgcgcaacggcaatggcgacgaggcgtccggcgatggctggtgctaccgcgggcgcgggctgctgcagatcaccggccgggcgaactaccgcgccgccggcgccgggctgggccagccgctggagcaggaacccgagcttctcgagcaaccggagtgggcggcgatctcggcggcctggtggtggtcgacccacggcctcaacgagttggccgaccgcggcgagttcgccgccatcacccgccggatcaacggtgggctcaacggccaggcggagcgcctggcgctgtgggagcgggccaaggcggtgctgtcgtga

SEQ ID NO: 341147 - DNA, 1029 bp, Pseudomonas aeruginosa
gtgctgagtgaggctgaagaaaaacaagcaaaagtagtttttaacctgttgaaagaggctactagtcaagaggttgttcgtgaattcttgcgagagaaaggggtcgctgtaagtgcgccaaactgggacgctctttattcagaccggattcttccagctcttagagaaaaaagactgtccatttcagacttagccttattgctgcgcgaggttgaggaacatggtagacagcacatattcctttataaatgcttagaggacgatgctcagaaacttcttaaccggaagcgtatcgaaactattgccggcgagcttggtctatcgaacctcctgtccgagccactctatgttgagatgccggaggaacctcaagttgttgatatacgaattgacgaagcccccaatggaagcggcgtcctttcccttaccgttaaggtatgtgaatgtcgacaaacgagtaaactggtaggcgacgaatatgatgaagctaccagccgaagatataaaacatatgaaataaaaaagaaacgcgcaatcagcattgcaaagctcagcatagatggaacactcgaacttagaattgcctctcgagacaattcgacaaaatatcacgaacagatatccgagctaatccggaaagtcaataatttcttcaatataacattattccatcaagtatcactaagcaccgcaaaggacactctattcaagaacaaggagaaatttgaaggcaccatacgatacagcaataccaccgcaagaaatgactttggtgtcgcaatgaacctttctgcctcaaacctgtctcagagcttactcgaagataacggttccaactccgccatgaaagagttcctttcaaatgatggctttgtaactggaagcaatatttggtttatccttccagaggatgaggatcgccaaattcatgttatccttagtggggaaacacatgaatttgccgtaacaggggcctgcacctcaagagagtattcttatgttcttggaaagattctctcccttaattaa

SEQ ID NO: 341148 - DNA, 888 bp, Pseudomonas aeruginosa
atgaatcacactgaaatcatatccttggttgagcaactttggtcatctacacttccagaaaagagaagagaaactttcaaactgttaagatccaccattcccgcagacagcttatctctttttgacgcactcgtagacaacaaaagaaatggaattcacgactgctcggactctagagtactaatactaatacacggaatccatactgatggctcctggcaccaacacgtccaggccaaactatccgatataaaaaatctccaagttcaagacctaggctatgatctagttaccgcacttcagctttttggcccattcagaaggggccctatagaacggatagttagagaaattcgaaacattaaacgcgaagagccattagcaaaaatatctgtcatagctcatagttttggaacatacataactagcaaaatacttcaagaccacccagacatagtttttgacaaaattataatgtgcggatccatagtaagcagagactacccttggaaccgaaatgcacgaggcatgaataagagctccataataaatgacgtaggaacacgtgacatctggcctctcgttgccacctgcactacgcttggatatgggagcactggcagaagagggtttcaaagctcctgcgttacggaccgctatttcaattatgcacacagcgatttcttcgaagagaaaaacgaccacataaccaaatactggcgccctatattcgagcacaatgccataaaaagctcagactgggatactaaaaagccaaaagccggcctttcagtattgattttctcccaccctttattaggcagacttcttgtagcaacctttattgcaggcgtgatcctggctcttttctgctactccaatggatga

SEQ ID NO: 341149 - DNA, 792 bp, Pseudomonas aeruginosa
ttgaatcgcgataacaagaaagacaatcggtttcagagttacctgttgatattgatgctgctggcttgtgccaggggagaggctctgggagcacaggaccgacaggcgttgcatgagatgcgtactctggcgatccgggcagctgtcaatgcgctgctctactacaacctcaatggctccccctatgaggcagagaacatcgaggtctccacccgtgcaatgggacgcttgcacgaaatggccacgcaagtgggggatgcgtctctaattgagcaggtacgccggtttgacaatgcggttgtcgaactgaagcacctgccacaaagcgtcgctgacgctcgcaaggttcaggcagcttattcccgttggttgcccgctgtcgttgaggggtattccaacctggaaaggtcactgaccgagcactacgacgctgctcctgatccggggcaagtgcaagacggactgcacgagctcagtcagaatatcgggcagatgttgatctcctaccaactggcgtcctttccgaacttcggcggcgacgtctggattctcgacgatcaagctctcgtctcgctggatggcagtatcgaacggcactttgctgagttatccgcgcgcggccacgatctgtccacgactctgaacgctccactgagtgactaccatttcgtgcgtccgcgccttctagagtcgtctgggcactgggcgccgaatgcggtagaacggtacctgatgaaagcgatgaccgcccttgatgatgaagtgcggcgcttggggacgacgcccagataa

SEQ ID NO: 341150 - DNA, 840 bp, Pseudomonas aeruginosa
atgaggaagacttggttcgtcacgggggccactcgtggtctcggcgaggccattgccagagcagcgctggaggcaggtgacaatgtcgttgcgacaggacgccatctgactcgtctcgagcgggcgttcgagccctttgccgagcgtgtactggctctgcaattagatgtcaccgaagctggccaggcggcgaccgtggttgaggcagcagtacaacgtttcgggcgtattgatgttgtcgtgaataatgcgggatatggccaactgggtcccttcgaggagaacgacgccggagctgcagagcggcagttcgcaaccaatgtcttcggtctgttccatgtctgccgtgcagtgctgccaacgttgcgccgacagcgtagtggacacatcttcaatgtttcctccattgctggtgtgaccggcatggctggtgcggcgctgtattgttcggcgaagttcgctgtggaggggttttccgaatcccttgcccaagaagtggcgcagttcggcattcgcgtaaccctggtcgagccaggcgcctttcgtaccgactttctcgatggcagttcggctgctttgggcagcatcagcctggaggactatgctgagctcagtcgtcgtatcaaggcgtcgtcggcggctaacaatcaccaacagaatggtgatcccgccaagctaggtgcgatgcttgtgagactggccggtgaagagcatccgccgctgcgctacctggccggttccgatgccctgcaggtaatgacaggaaaactggcggcgttgagtcgcgaagtggagcagtggcgcgattggtcggcattcaccgacggaaatttcagctga

SEQ ID NO: 341151 - DNA, 876 bp, Pseudomonas aeruginosa
atgacctccaagttgtctatctttcgccatgtcttgctactgctgctcggtatgctttacctgtccagcgccctggcccaggacgaaggaaattatgcggcggaggccacgcaggccaatcgtctgttggaacgggctgttgcctactaccgggcaaagggggaggctgcttttgcggccttcagtcgtcagggagagttcatcgatggccagctctatgtctatgtcgtcgacactagtggcgtgatgttggccagcggcgggccgtcggcgaacctggtggggcgcaatatcggtggcgtgctcgacgctgaattgaacaagtccttcaaggctgcgttggcgttgccagaggatggtgaaacccataccgccgactaccactgggtgaactgggttgatggcaaggccgagcgcaaacgagtgtttttcaggcgcgttggtgagcggatcttcgcggttggctattacatgcctcgctccagcaagcaggaggctatccaactgttagcgcgcgcgagtgccgcgatggcagccaaccccgcgaaggtgatcgagcaggtcaacagcctggacgtggagtttatccgtgatgacctgtatgtattcatcgtcgatctggatactttgaagttcagcgcccacggttacaacctgcgcctggttggcactcaattccgtgccttgcagtccgccgaccaaaagcggatcggtatacagatgctcgaggcactgaagaagggcggtggatatgcagaggtgagctatctgtggcgcaaccctgcgaacagccgccttgagcagaagaacaccctgcttcgccaggtagggcgatatgccgtggcggtcggctattacgtacgccctgagacctga

SEQ ID NO: 341152 - DNA, 1059 bp, Pseudomonas aeruginosa
atgcgagaactattcgaatcaaccatcgagcgccttttcggcaacttagccacgccggaatacgtgctcggctgcgagggtggtgtgtggccggccgaactctggagcgtcctgaaggactccggtttcagcctggctgccgtacccgaagccctgggtggtgccgaggcggggtgggctgatctctatgtgctggcacgtgccgccggccgttttgctgcaccaatccccctaggggaagcgctacttgccaactggctgcttggcaaggccgggctcgaggggcgtggtgatgtcctcagctttgccgccagcgcccagctcagcctacggggcgacaaggtggatggccttgtgcatgacgtgccttggggccggcataccgatgccgtggtggccattgctgatgccgccgatggcccacgtgtggtcctgttggatcgtaccgcggcggtcgcacagttcctggccctgaatgtggctggcgagccgcgcgatggtttgcgcttcagttcggctccggtgcttgccagcgcgccactgcccacgggaatgtcaggtgatgtcctgctactggggggagcgctgctgcgttccgcgcaaatcgctggggccttgcgagcgctgctggaaatgacctccggctacgcttgcgaacgccaccaattcggccgtccgatcggtgcctttcaggctatccagcaacagctcgcggtattagctgagcaggcggcggccgctggtgtcgcagcggaggccgccttcgtcgagtcggacagcgctttggccgccctcagtattgctgttgcgaaggtcagtaccgccgaggccgccagcgtcggcgccggtatcgcccattccgtgcacggtgccatcggctttacccaagagtactcgctgcacctgttgtctcgtcgcctgtgggcctggcgtagcgagttcggctcggccagtctgtggagtcagcgtatcggtcaactggcctgcgccgctggcggccaaggctactggccgttgcttacagggcacgcagcccaatcactacctgaactcgggtga

SEQ ID NO: 341153 - DNA, 504 bp, Pseudomonas aeruginosa
atggcgcgaatttccacggtaccgctagaggatatgccggccgagctgctcgaggcgatcgtgcgggggcaggaaacccgcatgctcagttcgacaaggccgattcaggtctgggcgcatcgccctggtctggccctggcctggctggaactgatggccggcttctatcgggacagcttgctgggcgagcgcttgcgcgagctgttgcggctgaagatcgccagtatcaccacctgtcaggcgtgccagttggcgcgcaagtccgatgaggtcagcgaggacgacattgcctgcttggcgatcgacagcgagcgcttcagtcctgcggagcgggccgctctgcgttttgccgaactgtttgccggtgactacatggccatcgacgacgggcactacgcgcgaatgtctgaattcttcagcccggctcaggtgacggaaatcaatctctattgtgccctgatgctggccggtgggcgtatgacttacgtccagcaggcttactga

SEQ ID NO: 341154 - DNA, 732 bp, Pseudomonas aeruginosa
atgacttcgaaagccaccagatcgagcaagggcgcgagtgacaagcccgtcagaaagaaggccagtccggcggagaaacctgctgccgtaacgaaaaggcctgttcagaaaaacggtgttgcctcgtcggcgaatggcaaagtaagacccaacaagcgctccgaggagaccgttacgaatatcctgtctgccaccgaggaggtggtgctgcgttccggtgcagatcggatatcgatcctggatgtttgccaggtggctggggtgtcccgggggacgttctatcgctacttctcctcccaagaagacttgctggataccttctctcgtcacaagcgggacagcttccatgagtcgctggcattggcgctgggggatattgccgaccccgacgcgcgtttgaatgcgctgattgtctacctggataattaccttgagcagagccgcgcccgacgtctgcttgtggtggcgcccgactacgccctgggtttcttccgacggatattccatgattccatcgtgcgctttcaggacctgcttgggatcgtgttcgatgagtgggatgcccggctaggcatcaagatcgacagggagctggtctgcgaaatgatcattcgctatgtcctgagcgaggtgctcgtgcctgaaggggttagtcgccgtctcctgccggtacgtgtgcggaagctcatcgttgccttgactgtcggttccacctcgcgctctcgccgctga

SEQ ID NO: 341155 - DNA, 741 bp, Pseudomonas aeruginosa
atgaccaacatgttccgccgccgagtggaaatcgtctctacgccacaggatgcaacacgagaggtacgggccgctcttgaggacgatttccatcacttccgcgtctggctacgccatagtgacggcatggtacgcgagatcggcggggaggccgtgcgctacccctactccgcctgcccacaagcgtccggccagttggaacaactgataggcatgccactcagccatatcgcccattcagtgacccggcagaccgatgcccagcatcaatgcacacacctgctagaccttgccggcctagccatcgccaacgcggcccgtggaacgctccgccgatgctacgatgtccaggtaccggaccgcgtcgacgaacacacgacaccggtactgcttcgtgatggcaggctcctgctgagctgggacgtacgaggctcgatcatccaagggccagcgccctactgtggggtaaacctgcgcaaaggaatggctcgctgggcccttagccaccttcccgaagaggatgcggaagctgcgctgctgctacgccggtgtacccagatctcacttggccgtcagcatccattagactcccaggtccatgcatccagcaccagtctctgctttagccagcagccggcacgggctgcgcaggccctgcggatcaagggttcaacgtgggatttcagcgacacggcagcacgtctatgctcgggcgaccaagactggctagccggagagtaa

SEQ ID NO: 341156 - DNA, 1002 bp, Pseudomonas aeruginosa
atgagattggtaacctttaccgacggcaacagggtcgcacgtgccggtgccttgctggagcacgaccagatcgtcctggacctacaggccgcctgccaggtccggtatggaaatgagcgtcccgagttggccagcgtgctggcgctggtcgaggccggggaggaggggttggctcttgcccgttcgatggtggagctggttcctgcaagagctgtgcgtgcccgggcggcggtgaagctgcacgcaccgattcagccgccgccgcaaatgcgcgactgctcctgtttcgagctacacctgcggcagagctttgccgcagcacgccgggctcgcgcgctgcggacgccagaccctgaggctacgctcaaagcgatgaatgcacgtgccgacgagcgcgtcatcgaaaccttcaaccgccaacccatctactacaaatgcaaccgcttcgcggtcatcggtactgacgacgaattccaatggccgagtttcagcaaggcactcgacttcgagctggagttcggctgctacatcggcaagcgtggtaaggacatcagtcgcgatgcagctcgctcgcacatcgtcggctacaccatcttcaacgatatgagcgcccgcgacgcccaggctgcggagatgcccggcatgcttggcccagccaagagcaaggacttcgatacggcgaacatcatggggccatgcctggtgacggctgatgagttgggcgacccctacgatctggaaatggtcgcgaaggtgaacggcgaggagtgggggcgtggcaacactcgtgatatgcgctggtccttcgaggacgtcatcgcccatgtgtcgcgttcggaaacgctctatcccggggagttcctcggctccggcacggtcggcaacggctgtggcctggagcaattgcgctatctgaatcctggcgatctggtcgaactggctgtggagggaattggtgtgctgcgcacccgggtggggtgcgcggagcaaagggggggctga

SEQ ID NO: 341157 - DNA, 702 bp, Pseudomonas aeruginosa
atgtcccggcctttgcaagacaagacaatcatcgtcaccggcggcttcggtgccctcggcggggccgtgggccgcctgctgctggagcgcggtgcgcaggttgctctgctcgatcgcaccgaagttccagctagtctgggcgatgtttctggggttctgcccttgggcggcgtcgacctaacctctgccgagtcggcgcggtttgctgtggcccgggtggtggagcgcttcggacatctcgacggcctagtcaacgtcgctggcgggttcgcctgggaatcattcgaggatggtgctttggatacttgggatcgcctgtatcagatcaaccttcgtacggctctagtcagcagccaggctgcgctgccctatttgcttgctgccgcatccggacgcatcgtcaacattggtgctctagcatccctgaaggcgggcccgggcatgggcgcgtatgccgcctctaaatccggagtggcacgcctcactgaggcgctggctgaagagttaaaagaccgtggggtcaccgtcaatgctgtactgccaagcatcatcgacaccccagcgaatcgcgcagccatgccggacgccgatgccagtcgttgggtaacgccgggagctttggccagagtgattgcgttcctgctctcggacgacgccacacctatcacgggtgcctgcctgcccgtatctggtcgggtatga

SEQ ID NO: 341158 - DNA, 399 bp, Pseudomonas aeruginosa
atgatcagaaaactgcccgccctcaacgctgataaccgcgccttctggcaaggcggcgagcacggtcgactgttgatccaccactgtcatggctgcacgcactatttccacccgcccgggccaatctgcccccgctgcgcgagcctggacgtcgcacctcgtgaggtatcaggaaaaggcaaggtgctgagctacaccctcaactaccagccttgggtcgctgacctggaagtgccctacgccgtcgccatcatcgagctggtcgagcagcagggcctgcgtttcgtcagcaatgtaattgggatggacccgctccaagtgcggatcgacatgcctgtacgggtcagcttcctccacgtcgaggatgtctggctccctctgttcgagaaggatcaatga

SEQ ID NO: 341159 - DNA, 792 bp, Pseudomonas aeruginosa
atggaaagcccagagttcacggaagcaggcagtagtcgcaagggtgccagcgtcacggtgaaaccggtcgctaacgcgattcgcattctccgccatttgagtcagagcggggcgccggagcgttcggtggacatcgcccggcgcctgtcgatcaaccccagcacctgcttcaatatcttgcgtaccttgttcatggaagatgtgatcgatttcaacccgatgtccaagcgctattcggccggcctggggctggcccgcctggttgggcaactggttacccaagggcagcgtgtgcaattggttaagccgctgctacaggaattcgcagcgcgcatgcaggtaaccatcaccctttggcggcgcatgggggcggatcgcatagtcatcgtcagctcggcggccagtcctgccgatgtgcgcatcgacatggccgaggggcagcgctttccgatgctgatgggcgccagcggtcggctgttctcgacccagttggacctggacacgccggcattcgaggatatctaccatcggatacgctgggcgcgtcccttgccaatcgagatctatcgcgaggaggttcacctagccgcggaacggggttgggcagtggacgatgggtatttctcggttggtatccaggcagtcgctgcgccagtgtattcccctgagggcactatcgatttcactgtctccgccgtgatgttccgcggccagcgagacgacgagggggttggcgaactggctgccgagctgatcgagttctgtgccgaactggcgggtattctgttctga

SEQ ID NO: 341160 - DNA, 1623 bp, Pseudomonas aeruginosa
atgagtatggacaggcaggccaacgttgctttggcaggggcggaacactcttcgttctgggcgcccttgcgtcatgggctgttcgtcagcctttggctagcctgcgcgcttgccaacctagcgatctggatgcagaccgtgggggcagcttggatcatgacccagctatcggcatcacccctgatggtttccctggtgcagacagccattactctgcctgtcttcctgttcggtttgccgggcggggtgctcgctgaccgcatggatccgcgccgtctgttgcttctcacccaggcggtcatcttggtggcggccgcagcgctctgcctgctggattgggtgggactgctgggggcctggtcgctgctgctgttcacgttcctgctggggggcggcagcgccttgggtatggcggcctggatggtgactgtggtcggagtcatcccgcgtgagcaggtgccggcggcggtcgctctcaatggtatttccatcaatgccactcgggccctggggccggctctggccggcctactgatcgtctggtggaccagtgccgcagtatttctggtcatcgcactgtgcatggctgcagtgctcgtattcatctaccgtctgccggctcgcgtccatgccgacggcttaccacctgaaaccttagccggcggcatgcgcagcggcctgcgctacatccgccactcgacggttctgtctagcgcgctcaggcaggtattcgtgttcaccagttgcgccagcgcgctatgggcgctgatgccgctggtagccaaggaggagttgcacatggacgcgggtggctatggactgctgatggcgtttatggggactggcgcggtccttgctgcgctcggcctgaccagcgtctatcggcgttttgctctgcgacggttgatcgatatcggggccctcgcctttgccgtggcgaccctggcggcggcgctgtcgcgcagccaggtggtgatctgcgccacgcttctgctggccggcatgggctggatggcggtgaacgcgaccatctccaccgtggtacagacttatgctgcgaactgggtgcgagcacgtgtcgcctcggtatacctcctggtgctgatgggctcgatggcccttggtggtgccctgtggggggctatcacgcaatacctgggcttgcagcaaagtctgctgctatcggcatcgagcatcttcctgggcttgttcctgactcgtagcggggccatcgagatgggccgcgaagctgactttgccgatgccctgcagacggataagccgatgctggtcgctgagggcgtcgaccacggcgacgggccggtgtgcattgaggtcggctaccaggtggatgctgccggacgtgaggcgttcctgcgtgtggtttatggcgtcggccagacgcgacggcgtaatggtgcgcggaattggcgcttgtaccgtgatctagaggagcccaaccgctacgtagagcgcttcatcgtcgagtcgtggctggattacctgcggcagtgcgggcgcatgacccggggggacgtggcgcaggcagtactgctttcgccttttcgcgaggaccgatcgatccgacgctatatcaatcaagcaccggtagagggtgtctag

SEQ ID NO: 341161 - DNA, 579 bp, Pseudomonas aeruginosa
gtgggggcgtacgacgaaatagcctatccggccctgaccggacagctcgactatgaggtcgagttggtcgctgtggttgcccggccgctaggcgaggaggcgcaggccagcgcttgcctgctcggctacacggtcggcaatgacatcagtgcgcgggatgcggggaggcgtatcggtcgcctcgacctgctaacccagaaatccatggatcgcactacaccgatcggtccctggatcgtcactctcgacgaattaggcggcatcggacagcctgagttggagatggggctggaggtcaacggtgagccgcgccagagggacaatactcggcagatgatcttcccggtggacgaattgctcaattacctcgatgcgcgtatcagcttgcggccgggcgacctggtgttcaccggctcgactcacggtgtgggcctggaggacggtcgcttcctcgcgtcgggggatttggtcgaggcgcgtatcggcgggatcggcgagctgcgcaaccgggttggccgccagcgtagactgcctgctgcgcgaagtgctgggcggctgggcaggcccgacggcgaatga

SEQ ID NO: 341162 - DNA, 762 bp, Pseudomonas aeruginosa
atgactgggcgtcttgaaggtaaagtcgcgctgatcaccggaactggcggtggccagggtagggcggcggcgctgcgcttcgcccgcgagggcgctattgtcgtgggctgcgactttaatggtgcagcgcacgaggaaaccgccactctgctaagcgctcagggacttcgtttgcatggtcgagcgtccgtcgacctcggtgaccatgagcaggccagggcttgggtcgaggcggccgtcgttgagcatggtggcatcgatatcttgtacaacaatgcatcggcggctcgcttcggcaaggtcaatgaactgtctgtcgaggattggcattacaccattcgcaacgagatcgacctgctgttctataccaccaagtacgcctggaaccatctggccgagcggcgcggagtcattatcaatgtttcttccacagcagcctggggcggctccaaggtcgcgggaatttccgcgcatgccgcagcgaagggagcggtggtgtcctttactcggcaacttgctgtcgaaggggctcccctggggattcgcgccgttagtctaagtccgggcttcatcgctaccccgggaacctcggagttcctggagaatccggtggcgcgagcggcgcttctcgatggtgtcctgatggatcgtcctggcgagccggaggaagtggtcgccctggcgttgttcctggcatccggcgaggcttccttcgtaaccgggtctgatttcgtcatcgatggtggtctgctggctatctag

SEQ ID NO: 341163 - DNA, 231 bp, Pseudomonas aeruginosa
atgagttccgacaaggcccgattcgaggttgtggtcgagcgcagccgctgctgtggctacggtctctgcgctgcgatctgtcccagcatctataagctggatgccgatggcttagtttacgtcgataacaaggctgttcccgtcgagctggaggacgaggcgcgagagggcgccgaagcttgtccggccgaagccatctggctcgaagagatcaagcccgaggggcgatag

SEQ ID NO: 341164 - DNA, 1680 bp, Pseudomonas aeruginosa
atgtttctgagagggctgtcgatcggcgccaagcttctcgtacttccagggttgttcgtcctgtcgctactgatcgtgtcggggatggcctatcgggggctggtcaagcagcacgccgtgatcgaggaaatcgaccacctgcgcttccatcagtatcgccaggtcctcgaaacctcctcggcttcgcaggcggcgatggtgggcgcctatgctgcggtagtgcggatcctcgagtcgaatggctcggcctccagggaggagctcgagtcctatctcgaggatatgcaagacagtatcgatgacttgcaggcagggatgggcaaactggctcaggagacccgcctgggcgacgaggagaaagcgctctatcgagccgtggaagatcaggctggagtggtcggcgaaagcttgtctgacttcaaacgcacggccgttgatgatcagttgcaggcggcggcgttgctggggcgaatacgtgccgaatacaacggtttgcaggggcagttcaaccgcttgctgggggtgcaggcggagttgacctccaatgccttcgtcgaggctggcgacttgcagcggcagttgtccaggatgctgattgttgtcctcgttgcagctagcgttctggccctgtttgtcagtctgctgttgcgtcgacagattgttcgagccattcgggaaattgagcaggcttccgtgaggttgcgcgatggcgacctgaccatccgtgtgcgagtaatggggcgtgacgagatagcccatactgcgcaggctttcaacgagctgattgacagctttcagcaggcaatgcggcaggtcaccaacgtggcagtgtcagttggtgcctcagcggaacagttggtggatgcctccgcacaggtggctgagagctccactgcgcaggtcgatgctgtgggcgcggtatcgctgactatcgggcagatgagtgacggtatagcgactatttccagtcatgcggaaaacttgcgcagttcggcggaggcgagcctgcatggggcggagaatggtcatctggcgctgtcacgcttgctcgagaagatcgacagcgtgcgtcacgcgttctcagagatacgcggatcggtaggcgacttcgtggaaagcaccgcggccatcactgcgagcattactcaggtcaagggcctgtcggcacaaacaaacctgctggccctcaatgcggctatcgaagctgcgcgcgccggcgaaagtggacgtggattcagcgtggtggcggacgaggtacgcagcctggcgcaacgttccgccgtggcggccaactcgatcaacgagctgacctcgaagctggaggggcagtctgaagtggtggacgaagccttgcgcgctggcactgtggcgctggaggacagcagcaggctgctggctgacctggagtccacgttacagcaggctgcggaattggtgggggattccactcgtggggttgaacagattgccgatgcggtccgcgtgcagaacgccggtggacggaacgtggctctgaatgtcgagcgcattgcgcgcatggcgggagagggggatgcaattgcccatagtgtctccagtgccgttatttctctacgaggactctccgaggagttgaccctggcggtaggtcgcttccgctttcaaggagagacggaggcggtcgactgcatcttggtttga

SEQ ID NO: 341165 - DNA, 819 bp, Pseudomonas aeruginosa
atgacctccggttcggatgcattggatccgctgttgatcaatgagtctgtccgcgtcgaacgagattccgctctgggctggatcgtgctgacccgacccgggcagatcaatgcgatcaacgacgatatccgccttggtgtaccgaaggccctagggctgctggaagccgacccgcaggtgcgggtcatcctgattcgcggtgagggtgaacgaggcttttgtgctggggcggacatcaaggaaaaacgtggtgaagagtcggccatacaggttcgccaacgtatggagcgttcgcgctggatcgagtccctggacggcatctgcaagccggtgatagccgccattcatgggtactgcatggggggagggctcgagttggctctagcctgtgatatccgatttgctgcaccgaatgcagtgttcgccctgccggaaaccgggctgggactcatccctggcggcggtggaacccagcgcctggcgcgagtcgtggctccgggcttggccatggatctgttgttgactggcgagcgcgtgagagccgatgaggcccgccgaattggcctggtcactcgcctggcgagcgacgagtccaactggcttgatgaggtcgcagcacttgctcggctgatagctgccaagccgccggccgcttcggcatacgtcaagcaggccgcgcgggctgcgttggagctggacatcaagcgcgggcttgatcttgagttggacctgttcgcgctcctggcaccaaccaaggatcggcgcgaggccgcactggcatttgccgagcggcgcgaaccgcgcttcaccggtgagtaa

SEQ ID NO: 341166 - DNA, 2496 bp, Pseudomonas aeruginosa
atggtcgagcagaagtacaacagtggaatgccggtgatccctaaccttcgggatttcgacatgacctccggcgggtatctcgagcgagtgatcttcaacaatcgcatcctggtgttgctggtatgccttgttgccaccctggtgctgggtttccatgcgactcgcttgcaggtcaatgccagcttcgaaaagatgattcctagcaccagcccgtacatcaaaaattatcttgcctacaagagcgagttgccggggctcggtaacagcgtgcggatcgtggtggagaacaagcagggagatatctacgaccatgactacctgaccgcactgcagaaggtgaatgacaccctatacctgattcctggggtcgatcggtcctggatgaaatctctgtggatgccgatcgtgcgctggaaggaggtcaccgaggagggtatcgacggcggtgcggtgatgcctgccgattacaacggtagcccgacgtccatcgacaagcttcggcgcaatatcgcgcgcgcaggcatcttgggaagcctggtggccaacgacaatcgatccagcatgattgtcgcccccttattggaaaccaatccccagactggccagccgctgaactaccgtgagttctccagccagttggagaaccagttacggtcgatggagagcgagtcgattggtatccatatcgttggcttcagcaaactggtcggtgatctgatcgatggcctctatgcggtcatgctgttcttcggcgcgtcggtgatcatcgccgcagtcttcgtctacttctatacccgctgcctgcgcagcactttgctgctggttggcatcgccgtggctggcgtaatctggctgcttggcctgatggagttactcggctacgaactggatccttactcgatcctggtgccgttcctgatcttcgccatagggatttcccatggcacgcagaagatgaacggcattctccaggacatcggacgtggcacacataagtacatcgctgcccgctacaccttccgccgtttgttcctgaccgggttgacagcgttgctgtgtaatatcgtcggcttcgccgtcctggtgatcatcgacatcccggtaattcgcgacctggccttgaccactagtatcggtgtggctgtgctgatcttcaccaaattgctgctgatccccgtagcgctgtcttatctcggggtaagtcagaaggctgcacggatcgccattgagaaggatcgcgccggggagtctaaccgcggattcctcggccatatctggcatggtcttgaccgtttcaccgagcgtccctggtcgatcggcgtgatcgccttgtccgttatcgttaccgcagcctgcagtgtggtcatgcttcacctcaaggtcggtgaccttgaccctggggcgccggagttgcggccagactcgcgctacaaccgggacaacgcattcatcaccgctaactatgggctgtctagcgaccagttcgtggtgatcatgaagaccaatgaggacaactgccgcctttaccaaccgttgcagaccatggaccggctggcttggcagttgcgccagactgagggagtgcagaccaccagttcgctggccgagaccgtccgtttcttcactgcgggcatggctgaaggtagtggcaagtggctgaccatcagtcgcgaccaggcaatcaccaactcctcggtcgattcggcgatgatctccgcaccgggaatcaccaaccagaaatgttcggttacaccgctgattgcctacctggctgatcacaaggctgacacgctcactcgcgtgctgcgggttgccgaggagttcgccaaacagaataacgtcagcactggagagcaaccggtcgagttcctccttgctgccggtaacgccggtatcgaggctgctaccaatatcgaggtggagcggggcatcgtcaccatgtacctggcggtatacggcgccacggctctactttgcctactcaccttccgtagctggcgcgccacgctggtagcgctgataccgttgctgatgacgaccatcatctgcaaggctttgatggtgtggctgggcattggcctgaaggtagcgaccttaccggtcatcgccgtgggcgtgggcgtcggcgtcgactatgccctgtatctgctcagtgtgcagttggcggtgcaggagcgtggtggcagcttgatcgtggcttatcggcgctccctcgactttaccggcagagtggttgccctgatcggtttgaccatggcggcgggggtcgttacctgggcctggtcacccatcaagttccaggctgacatgggaatcctgctgacctttatgttcctctggaacatgctcggcgcccttgttctcatcccggccctgtcccacttcctgctcaaccccaaagcacgtcccgcggagccccaagtggctggtagcacagcgcctgtctctctcgggaaaggtacagacgcgaatacccaggctgctaccgcccattga

SEQ ID NO: 341167 - DNA, 1158 bp, Pseudomonas aeruginosa
atgacaagcccttgccgtgacctgatccactcgatgcaccgcctgctgactggcagatggcaagttcgccggcaggtactgttggctgtggcttcgacctctctgttgctgtccgcttcgtcgtttgctggtgcggcgacggttgtcgggcatgacgtcctgagcaagcctgctctgaagataagcccccatatacgccctccaatggttgctgtgacctactcgggcgaggcactgctcggtgtcggtccacatggtgtgatcctgcgctcggaagactatggccagaattggagccaggttcccagtccagtttccagcgacctggtgcaagtacgcttcaccgatccgaagaatggctggattgtcggccacgacgctttgctattgcacagcggtgacggtggtcggagctggcaggtacgcctggatggaagacaggtgcttgtgttgctgcgcgagtactactcgcgagcagagaaagccggagatcagcaggctggcgacttgctgcgtgaaattgacctagcaatgaaaacctctgcgacaccggatgtcttgcccaccccgttgctcgatgtctccttcgatgacaagggtaccggctttgtagtcggcgctttcggactcatgctgcgcagcgaagatgcaggagccacctgggagccctggattgagcgcgcagataacgagcggcggatgcatctctatgggcttgcccaacaccacggtcagttttacgcctgtggtgagcaagggctactgatgcgcttggacgccgagtcgcagcgcttcgttagagtcgagacgccctatggcggaaccttctttggtgttgccgcgcatgatggcttgctgcttgcctatggcctgcgcggaaatctgtatgccagccaggatgatggccgggactggcgcaaggtggaagccggattggacagcagtgtggtgggcctggttgaggaagcgggttcgctggtgctggtcagccagagcgggcggttggcggtactcgaaccgagttcattgctggtgcggcccctcgagccgatgcgctccagcgaagtttatgcggcgagccgaactggacaggatggccacttgcttgttgctacctatgccggcgcacgggtagtgcagatcgctacggcgaaataa

SEQ ID NO: 341168 - DNA, 1368 bp, Pseudomonas aeruginosa
atgaaacttcgactcgccttagcccttgcctttagtggactctctttgccggtactggctgcagtgagccagcaggaagccgctgaacttggcaaggacctgacgccctggggggcgatcaaagctggtaatgccgatggcaccatccctgcctatgagggggggctgaagaaggccccgcctgggttccagccggacagtggattctgggtcgatcccttcaaggatgagaaacccctgttccgcatcactgctgcgaatgccgacaagtacgcggacaagctcagtgagggacaaaaggccctcctcaagcgcaatcctgatacttggtacatggatatctacccaagccatcggacaaccgcctatcccgacgcagtggtaaacgccacattacgcaatgccaccggttgccaggtgcaaaaggatggcctagcggtcgaccctgcctgtcgtggcggcctgccgttccctatcccgaagaacggcaacgaggtgatgtggaatcagcaactgcgctacaagattggtccgggctattccaccaccagctcttccaatagctgggtgatagatacgaatggccaagtgactaagaccgccgagcaggcgaccttcgaagaaacgccgttctaccagaccagccaggctgatcgcgatccgatgatgtacgccagggtgtattcgctgaacaacttccccgcgcggcgggcgggagaggtgatcgtcctcaacgatttcctcgatccggaatccaagccgcgccgttccttcagctacaccccagggcagcgccgggtcaagttggcccctgagttcaacttcgacactcctgtagctagccagggtggagtgactttgttcgatgagctgcagatgttctctggtagccaggaccgcttcgactacaaactggtaggccgtaaggaaatgtacattccctataacgcctacaagttctacttcggctgcaagcaggacgagcaattcctcaagagtcacgccaaccccgcttgcgagcgctgggagctgcaccgtgtctgggtggtcgaagccacgctcaagccgggcatgcgccacgtctacagcaagcgtacctactacctcgacgaagataccttcggcatcggcctttacgacgcctgggacaagagcggtgcactgtaccggtcgatcttcctcagtggcgtgcagatctacgacaagaacatcccgtacaacgttaaaaacgtcgtatacgacttcaacaaggggatgtgggcactgctgaacgatgcgcttaaaggtggttatcgcttcaccgatgtgccctattcggaacgtcagatgaacccggaggcgatcgtttcccgcgtcactcagcgttga

SEQ ID NO: 341169 - DNA, 1665 bp, Pseudomonas aeruginosa
atgaacgcgatggcaatgaagatgtctgggcgcaagtccctcgttctcagcggtctggccttggctgtaatggggcaggtcggtggcgtgatggcgatggatatcgatgtcggtaaccccgacctgcgactgcgctgggacaacaccgtgcggtacaacctcggggttcggactgaggggcaggatcacaagatcatgaacaacccgaactacgacgagtccgatggcaagttcgacaaaggcgatatcgtcaccaatcgccttgatttgctcagtgagattgacctctccttccgcgatcagtacggcgcacgcctgagcgccgcggcctggtacgacgatgcctaccacgatactgacgtgaagagtaacgtcccgggctattcgaccagttacaaccgggatcgatacagttccgaaaccaaacgttatgcactcggcccctccggtgaaatcctggatgcctttgtgtggagcaactttcagttggggcagacgcccgtcaacgtcaaggttggccggcacaccaactactggggggaggggctactgttcggcgcccatgcagtgtcttattcccaggcacctaccgatggcatgaaagcagtgaccagtccaggtattgagactaaagaggtattcctgccgatcgggcagatttcggcgaaagcccaagtcaccgacaacctctccattgccggtcagtatttctacgagtgggataacacccgcttcccgtacggtggaacctacttcggcgcagccgaccccttcttcgaaggccctgacaggttgcctgcggctccaggcttcaatctcaatcatgcgtcttctaagcgtgggcgcgatggcgagaactggggagtgatggccaagctaaatgtcgaggctatcgaaactaccttcggtgcttactatcgccagttcgacgattaccaaccctggctatcgccacaggtggatgctgctcatcgccaatatcgactggtttatccgcgggatgtcaagttgttgggggtcagtgcttcccgggctatcggcagcgctgcagtaggtgctgagctgtcctatcgcaaggatggggcgctcaatgctacgggggttagcctgctggacgacgaggggccgcgtggcgacaccatccacttcgtggccaacgccgtgtacggtgtgccgcgtaacttcatcgccgataacgcaacgctggttactgagttcgcttacagccatttggataaggtgacggagcacgaggagctgtacaagggagaaggctacaaatgcgtagatgttcaaaccggtggtaagggtgacaaatccgatggttgctctacccgtgattactatgcagtggcgctgaactacaccccgcaatatgtcgaaatcttgccatcgtggacccttgatgtgccgctgaccattaactatggcctgcatggcaatgccgccagcgcaggcggtggcagtgagggcgcgctttcatggtcggtcggtgccaagatgacctaccgccaggaacatgaattcagtctgcgctatgccgacgtatccgcgcaggagaagaactccctgaatgccaatggcgagcggatggtcaatggcaacggtaacgttggcggtaccgaccgtggttggttggttttcacctacaaaacctccttttaa

SEQ ID NO: 341170 - DNA, 843 bp, Pseudomonas aeruginosa
atgcacatcgacctcagaggtaaacgagtcatcgtgaccggcgcgtcgcgaggcattggtaaggcaatcgcccaagcatttgccgacgaaggcgcgaaagtggctatttgcgcccgcaccttggaagctgtgacgagcgctggccaggaactgcaaagaaccgcgcaggccgtcattgctcgtgccgtcgatgtcaccgatacaacgagagtcaaggcatttgtcaccgaggtggccgagacctggggcggagtggacgtcctggtcaacaatgcaggtcaaggcaaaggcggcaacctggacaccctgacgccagaggccatcctcgaacacgccaatatcctgcagatgggtcactatcgtttcgtccaggcagtggttccatacatgcgcgctcagcactggggacggatcatagaaatcaacgccctcgccgggagcgtgcccaccccggacggcatcccctcggtgatcaatcgagcctcctgcatcgccctctcgcgctcactgggcatgtccctggcgcgagacaacatcctcgtcaacagcctgaacatgggctggatcgacaccgggcagtgggagcgccattacaaagagatgccaccaggcgtaagccgcgaggagttcaacgagatggtactcaaggtggttccactcggccgcttcggcaagcctgaggacgtcgccggcatggctctgttcctggccagtgagtacgctgcgttcatcagcgccgcgtccatcgatatcagcggcggcatgggtgggcagatagcctatttcccgactctcaagcgcgatttcgtcgaaacagcccggaaacgcaacgaacaagcctga

SEQ ID NO: 341171 - DNA, 549 bp, Pseudomonas aeruginosa
atgacccaggcgatctacgacatccctctcaagagcatcgaaggcgatgccctgacgctcaagcgcttcaagggtaaggtactgctggtggtgaacgttgcttcgaagtgcgggctcaccccccagtatgctggtctggaaaagctctacgaggacaagggtgcggccgggctcgagatcctgggctttccagcaaatgacttcaaggaacaggagcccggcagcgacgaggaaatcaaggcattctgcgaactgaactacgccgtccagttcaccctgttctccaagatcgcggtgaccggcgaaaaccgccatcccctgtatcggctgctgacggaggcacaaccacacaccgttggcgaaggtccgatgcgtgaacgtctcaaaggctatggcatagaagccggaccgattcccgcggtactgtggaacttcgagaagttcctggtcagccgtgacggacaggtggttggccgcttcgccccggatgtggcgacggacgatccgcgtctacttcaggccatcgaaatcgagctgaacaagcactag

SEQ ID NO: 341172 - DNA, 3567 bp, Pseudomonas aeruginosa
gtgagcacaccactctccctggaagacaagtacgcccagaagaccggaaaggcccttatgacagggatccaggcactggtccggctaccgttgatgcaacgccagcgcgacctcgacaacggcctcgacacagcaggctttatctccggctatcgcggctcccccctcggtggcttcgaccaggcgctgtggaaagcccgcgaccacctcaagcagcaccaggtattgttccagccgggggtcaatgaagacctcgcggccacctcgctgtggggtacccagcaggtcaacctgttccccggcgccaagcacgacggcgtgtttggcatctggtacggcaagggccccggcgtggatcgctgcggtgatgtgttccgccacgccaatgccgccggtacctcacgcttcggcggcgtgctggccattgccggcgatgaccatggcgcgcgctcgtcctcgcttccgcatcagaccgaacacattttcaaggccgtgatgatgccggtgctggcaccgtccggcgtacaggagtacctcgactatggtctgcacggattcgccatgtcgcgttactccgggtgctgggtagcgctcaaggcggtggccgacaccgtagaaagcgcggctatcgtcgaccttgacatcaatcgcgtgaagccagtcattcccgatttcgccctgcctgaaggcggcctcaatatccgctggccagaccctccgctggcccaggaacagcgcttgctggagcacaaactctacgcagcagccgcctatgcccgagccaacggcctcaaccgagtgactctggactcgagtcgggcacgcatcggcatcatcacctccggcaagtcctatctggatgtgtgccaggcgctggacatcctcggaatcgaccaggagcaggccgagcggatcggcctgcgagtctacaaggtcggcatggtctggccgctggaggcagagggggtgcgccagttcgccgaagggctggaagagatcgtagtggtcgaggaaaagcgccacatgatcgagtaccagctcaaggaggagctgtacaactggcgcgaagatgtgcgcccgcgcatcgtcggcaagttcgacgacaagggcgaatggagcctgccgcacaccgattggctgctgccggcaatcaacgacctgacgccagcgcagatcgcccgcgccttggccaagcgcatcttgcgtttgcacccgcacggttcgctacagatgcacctggcggtgctagatgcccaactcggttgcaagcaacaattgagcaacctgatggagcgggtaccgcactactgctccggatgtcctcacaactcctcgactaaagtaccagaaggcagccgagctctggcaggcatcggctgccattacatggcggcctggatctatccgcgcaccgagaccttcagccagatgggcggcgaaggcgtggcctgggtcggccaggcgccattcacagaaacccgccacgtgttcgccaatctcggcgatggcacctatttccactctggcctgctagccatccgtgcagccgtggcggccaaagtatcgatcacctacaaaatcctctacaacgatgctgtggcgatgaccggagggcaaccggtggacggcagcttgagcgtggcgcagatctcccgccaactcgccgccgaaggcgttcagcgaatcgtggtggtcagcgacgatccggacagataccaggaagtacacgacctagcagccggggtaccggtcctacgccgcgacctgatggaagaagtacagaagcagttgcgtgagtttcccggtgtctccgcgatcatctatgaccaaacctgtgctgccgagaagcgccgccgtcgcaagcgcggcaaatttcccgatccggcgcggcgggtggtgatcaacgaggcggtttgcgaaggctgcggcgattgcagtaataagtccaactgcatgtcggtagtcgcagtggagaccgagttcggtagcaagcgagcgattgaccagtcgtcctgcaacaaagacttcacctgcctctctggattttgcccaagctttgtcaccgtcgaaggcggccggctgcgcaagcccaaagcgctggtgcagagcgccggggatgtctgggagcttccccagccgctgctgcccgacctcggacagccctacagcatcttagtcaccggcgtcggtggtaccggagtagtcaccatcggcgccctcctgggtatggcagccttcatcgagggcaagggcgtgctgaacctggacatggccgggatggcgcagaaaggtggcgcggtttggtcacacatccgcatcgccgctcgccaggaacaactgttcgccccccgtatcgcagagggcgaggccagcctgttgctgggctgcgacctggtggtaagcgccaacacagagaccctggccaagctacgccagggcgttagtcacgctctgatcaacagcgaggaaagcatcaccagcgccttcgtccgcaccttctcccgccaggcagaatccggtgacctgctggaaaaccccgacccgcgcttccgcagtcccgaaatggccgcacagatcaacgaagcagtcggcgcggagcgggcggaattcgtcgatgccagcgccatcgctaccgctctgatgggcgactccatcgccaccaataccttcatgctcggctatgcctaccagaaaggctggttgccggtgggggagacggccttgctggaggccatcgaacttaacggcacggcggttgagttcaatcgtactgccttcgtttggggccgccgctccgcagctgactcacaacgagtacaccagttgctcgcagcgggcagagtccagagccgcgaccggcaattgacgcagaccctggacgagatcgttgctcggcgcaccgacatactgaccgattatcaagacgcagcctatgccgagcgctaccgcaagcgcgtcgaacgcttcagcgtcgcggaaagcaccctcaatggccagcccggcgccctcaccgaggcagtggcgcgcaattacttcaaggcactcgcgatcaaggacgagtatgaagtggcccgtctattcgccaacgacgagttcattcgtaagatcgaggcaaccttcgaaggcgattaccacctgaacttccatctggctccgccactgctcaacaagaccgcaccgggtgtggaaccggccaagcgcagcttcggtccctggatgctcaaaggcttacgcctgctcagccgtttccgtcgcctgcgtaacacctggctcgaccccttcgcccgcacccatgagcgcaaggtcgagcgcgcatggctggaaagctacgaggcgatcctcgacgaagtgctggcccgattcactgccgacaacctcgccaccgccttggaactagctcgattgccggatgccgtacgcggctatggcccggtcaaggagcgctatctagcccacgccgaaacgcgcaagacacaattgctagcccggttgcgtggtgaagcacagttccacgacgccactcagccaactggcatgagtgcacgtatccaagtcacccagctgtga

SEQ ID NO: 341173 - DNA, 255 bp, Pseudomonas aeruginosa
atgcaagacgtcgtcgtcgccgatcgtactgccatcggtgccatcggtgccatccaggacagcctggccgacttcagtgcagtcaaactaggcagcgccgtaatccgcaccctgctagaaaaaacaggcgtggctccaacctacttagatgaagtgactctcggccaggtgcttaccgagagctgcggacagaatccggcacgccgggcggcaatcaccgccgggctgccttatatcgtgcccgtccgtgagtaa

SEQ ID NO: 341174 - DNA, 195 bp, Pseudomonas aeruginosa; identical to SEQ ID NO: 333000

SEQ ID NO: 341175 - DNA, 1899 bp, Pseudomonas aeruginosa
atgcttcgctcgctgtcgtttgccaagaaaatccttctcgccgccgcattggtggtggttttcgccttcacctgcttcatcctctacaacgattaccgacagcgcgaggccgtgcgcacggacacggaaaactacctcggggaaatcggcaccctgaccgccagcaacatccagagctggctggaaggccgcatgcacctggtggaaggcctggcctcgcaactggcgctgctcgaccagcccgacgaggcgaatatcgcaaggcaactggaacagcccgtcttcagccgcaatttcgcgtcggtctatcttggcgaggcggccagcggcgccttcaccatgcgcccctacgacgccatgccggaaggttacgacccacgtacccgcgcctggtacaaggacgcgctggcggccgaccggcttatcgtcaccgaacccttcgtcgatgccggcaccggcgagcagatcctcgccatgtcgctgccggtgcggcacgccggtcaactgctgggcgtcgccgccggcgacatgaagctggagaccctgaccgcgatcctcaattccctgaagttcgatggtgccggctacgccttcctggtcagcgacgccggcaagatcctcctccaccccgactccgggctggtcctgaagaccctcgccgaagcctatcccaagggcgcaccgaacatcgaccccggggtccacgaggtggaactcgacggccgcagccagttcgtttccttcaccccggtgaagggactgcccggcgtgacctggtacgtcgccctggtcctcgaccgcgacaccgcctattcgatgctcagcgaattccgcacttcggcgatcgtcgccacgctgatcgcggtggtcggcatcatgcttctcctcggcatgctgatccgcgtactgatgcaaccgctcaccgacatgggccgcgccatgcaggacatcgcccagggtgaaggcgacctgaccaagcgcctgaaagtcaccagcaacgatgaattcggtacgttggccaatgccttcaaccgcttcgtcgagcgtatccacgaatcgatccgcgaggtcgccggcaccgcccgtcaactgcacgacgtggcgcaactggtggtgaacgcctcgaactcctcgatggccaactccgacgagcagtccaaccgtaccaacagcgtcgccgcggcgatcaacgaactcggtgccgccgcccaggaaatcgcccgcaacgccgccgatgcctcgcaccatgcgtccgacgccaaccaccaggccgaggacggcaagcaggtggtcgagcagaccatccgcgcgatgaacgagctttccgagaagatcagcgcctcctgcgccaacatcgaggccctcaacagccgcacggtgaacatcggccagatcctcgaggtgatcaagggcatctccgagcagaccaacctgctcgccctcaacgccgccatcgaagccgcccgcgccggcgaggccggacgcggcttcgcggtggtcgccgacgaggtgcgcaacctggcccatcgcgcccaggagtcggcccagcagatccagaagatgatcgaagagctgcaagtcggcgcccgcgaggcggtggccaccatgaccgaaagccagcgctacagcctggagagcgtggagatcgccaaccgtgccggcgaacgcctgggcagcgtgaccagccggatcggcgagatcgacagcatgaaccagtcggtggccaccgccaccgaggaacagaccgcggtggtcgactcgctgaacatggacatcaccgagatcaacaccctcaaccaggaaggcgtggagaacctccaggccaccctgcgcgcctgcggcgagctggaagcccaggccgggcgcctgcggcacctggtggacagcttcaagatctga

SEQ ID NO: 341176 - DNA, 1293 bp, Pseudomonas aeruginosa
atgcaggcgttatacctgctggcacttgaaccggtgtctgagaccacagccgaccgaaattcctatggctttcgccctcaccgttccacggcagatgcaatcgagcaattgttcgtcaatctcggtcgcaagcattctgcgcagtgggtcatggagggcgatataaagggatgtttcgacaacatcagtcacgactggctgatcactaacgtcccgatggacaaagtggttctaaggaaatggctgaaagcgggatatttggaatccggtcgattgaatccgacaggggcgggaactccgcaaggagggatcatctcgcccgtattggccaacctggcccttgatggactggaaaaggagctcgaatctcggttcgggcagcgtaataccaaagccagctacaagaccaaggtcaactatgtgcgatacgcagatgatttcgtcatcaccggcatctcgaaagagctgctggaaaacgaggtgaagccactcgtcgaagccttcatggccgagcgggggttgagccttgcggtggagaaaacgttgttcacgcatgtatcggatgggttcgatttcctcggtcagaatattcgcaagtacggtgacaagctgctgataaagccagcccacaagaacgtgaaagcatttctggccaaggttaaggcgttggttgaagcgaacaaagcggcaccggccagcctgttgatcaagcagctcaatccagttattcggggttgggccaattatcatcggccgattgtcgccaagcagaccttcaactacgtggattacaggatctggaaattgctatggcgatggtgcaggcggcgacatctgaatcgctgcaaacgttggatcaaggaaaaatacttcaagcgcgtgggaacacgtagttgggtattctccgggctacaccccagcggcaaactgctccacttgttgtacgccagcgatacgccgatcaagcggcacaccaagatcaaggcggaggctaacccatacgccccagaggacgagatgtacttcgagcaacggctggaatatgcgtggcgaagctcggacgaggggaagcggaagacgctgacgctgtggcttggccagagcaagcgctgcccgatgtgcaagcagttgattacgttcgaaagcgggtggaacattcaccatgttatcgagcggcacaagggcggatgcgacgagctgggcaatctggtgttgttgcatcccaactgtcatcgacagttacacagtgcggcaccggctctttcaactgagaaagggcttacaaaggcttga

SEQ ID NO: 341177 - DNA, 459 bp, Pseudomonas aeruginosa
atgtgcgtggacgcgtccgccttcgccctcgacggcgtcgagcgcaacgcggcgctgaacggcgtggcggagaaggtcgcctgcgtcgagggcgacgtgttcgaggccctgcgcgagctgaaggccgccgacgaacgcttcgacgtggtgatcgccgacccgccggccttcatcaagcgcaagaaggacctgaagaacggcgaggccgcctaccgccgtctcaacgaacaggccatgcgcctgctgagcaaggacggcatcctggtcagcgcctcctgctcgatgcacctgcccgaggacgacctgcagaacatcctgatcggcagcgcccgccatctcgaccgcaacatccagctgctcgagcgcggcggccagggccccgaccatccggtgcacctggcgatcgcggaaacccgctacatcaagagcctgatctgccggctgctgcccaacggctga

SEQ ID NO: 341178 - DNA, 474 bp, Pseudomonas aeruginosa
atgccccagtcccgccgcccgttgcgcatcggcctgatcgccgacacccatggcctgctccggcccgaggcgctggaacggttgcgcggctgcgaccagttgatccatgccggcgacatcggcaagccggaaatcctcgccgagctggaacgcctggcgccgctctcggtggtgcgcggcaacaacgacacccaggactgggcggcggacatccccgagcgcctgctgctgaagatcggccggctgaccctctacgtgctgcacgacctcaagcgactcgacctcgacccggccgccgaaggcatcgacgtggtggtcgccggacattcgcacaagccgctgaaggaagagcgcgacggcgtgctctacctcaacccgggcagcgccggaccgcggcgcttcagcttgccgatcgggatcggcgtgctggaagtggcggggaagaagatcgaggcggagctgatcaccctctga

SEQ ID NO: 341179 - DNA, 930 bp, Pseudomonas aeruginosa
atgagcaccgccgggcgacctaccgcgcaacagtcggccgaacgccggcagctgcgtcggcgcctgctgctgagcagcccggcgatgctgatgctggtgctgttcctggtgatcccgctgggcatcatgttcgccgtgtcgatccagcaatccggcgactacggcggagtgaaatggggccagcacagcctggaggcctacctcaatttcctctgggaacgcgacctggacgacagcctggtgttcaacgccgactacctgggcatcttccagcgctcgttctggctgtcgctgctgaccaccctcggctgcctggcgctcggcttccccaccgcgctgtacctggcgttgcaaccggaacgtcggcgcaacctgctgctgttcctggtcaccgtgccgttctggaccaacctgctggtgcgggtctacgcctggatcctgctgctgcgcaacggcgggctggtggacgccggcctgcaaggcatcggcctgaccgacaccgggctggggctgctctataccgacaacgcggtgatcatcggcctcctttatacctacctgccgttcatggtgctgccgatctacagcagcctggaaaagatggactggcgcctggtggaggcggcattcgacctcggcgccaaccgctggaaagcgctgcggcgggtgatcgtgccgctggcgatgccggggatagtcgccggctgcatcctggtattcatcccggccctgggcagctacatcattccggaattgctcggcggcggtaaggcgctgatgatcggcaacctgatccagctgcaattcggtaccgcgcacaactggccgttcggcgccgccctttcgttcgccctgctggccttcgtcctgctagcgatgctgatctacaacctgcgcttccgggccaacgccggcggaggccagccatga

SEQ ID NO: 341180 - DNA, 1044 bp, Pseudomonas aeruginosa
atgacctaccgcacaccgctcaccctgctcttcgccgccggtctagccctgggcggccaggctcgcgccgaaggcaccctgcacttcgccaactggtcggactactacccgccggagttgctgaagaagttcgagaaggacaccgggatcaaggccaccctcgacgcctacgacagcaacgagacgctgctggccaagctcaaggccggtggcggcgcctacgacgtggtggtgccgtcggacagcttcatagagattttcgtcaaggaggggctgctgcaaaagctcgacaagagccagttgccgagcctgggcaacctgaaggaaaacttccggacccttggcttcgatcccggccacgactacagcattccctatctctggggcaccaccggctacagctacgataccgcgaaggtgccgggcggcaggctggaagaaagctggaagccgttcttcgaaccaccggccgagctgaagggcaaggtggtggcgctgaactccatcgaggaactgttcattcccgccacctactacctcggcatcgacgaatgcaccgaggacgccagggaagcgcaaaaggtcctcgacctgctgctcaggcaaaagccggcgctggccatgtacaacagcgacggcaccatcgagcgcatggccgccggcgaggtcgccatgcaccagcagtggaacggcgccttccaccgcgcccacgcccaacgcgccagcctcgaatacgtctatccgaaggaaggcatccggctgttcatcgacaacttcgcgattccgcgcgtcgccagcaacgtcaaggaagcccacgtcttcatcgactggatgatgcgcccggagaacatcgccgccgcctccaacttcgccaagtacaacaacgccatcgtcggctcggagaaattcatggagaaggcgctgttcgacgacccggcgatcaacaccccgcaggacaagctcaaccgcctgaagccgttcaagctctgctcgccgaaagccctggcgctgcgcagcaaggtctggaccaagcttaagaaatga

SEQ ID NO: 341181 - DNA, 201 bp, Pseudomonas aeruginosa
atgatcgacgcggcgctggcggccagctcgcgccagcgctggccggccagccagtttggccatctcgatccctttttgaccgtctacagggttctccccggcgaaaccggattgctagagtcgaaccgcgccctcctcgaggggtcgcccggagccgcggaaacggcgccggcagagcccaagggaacctcgcgaccgtga

SEQ ID NO: 341182 - DNA, 765 bp, Pseudomonas aeruginosa
gtgaggcagaccctgcgccagggcgctctgggcgttgccgggctgctggcgctgttcgccctgtggtggctcggcgtggccctgttcggcgccgccgacggcctttcggcacgcttctcgccgcaggcgacgttgctcagcctgggtgaactgctggaacgccgcgaactctacgagcatgtgctggtgagcctgaaacgggtcctgctgggcttgttcctggcgctgctggtgggagtgccgctggggctgctggtgggcgcctcgcgcaacctggaagcggcgaccactccggcgttccagttcctgcggatgatctcgccgctgtcgtggatgcccatcgcggtgatgctgatgggcgtgggcgaccagccgatctatttcctgctggccttcgccgcgctctggccgatcctgctgaataccgccgccggcgtgcgccagctcgacccgcgctggctgcaactgagccgcagcctcgccgccacgccctgggaaaccctgcgccgggtgatcctgccgggcatcctcggccatgtgctgaccggcgtgcgcctggccatcggcatcctctggatcgtcctggtgccctgcgagatgctcggcgtcagcgccgggctcggctactacatcctcgacacccgcgatcgcctggcgtactccgagctgatggcgatggtgctgctgatcggcctgctcggctacctgctcgacgccgcggcgcgcggactctatcggcgctgggcgcacggagcgctcgggtag

SEQ ID NO: 341183 - DNA, 951 bp, Pseudomonas aeruginosa
atgtccgtgaccgatgccagtttcccgatcatcaactggtcgaaggcgatgccttcgttgcgccagctgatgtatttcgcctgtgtcgccgagtacggcagcatcggccaggccgccgaggtgctgcacgtttcgcagccgtcgctgtcgcggcagatccaggcgctcgaagtgcacatcggcgaggcgctgttcgtccgcggtccggccggggtgagcctgaccgaggtgggcagggtggtgcattgccgcgcggtgaagatcatcgccgaggccaaggcgctgacccgcgacatcagcgacggcgacgaccgccagttgcacatcggtttcagtcgctacctcgatcccggctggtccggcgagctggcccggcagttgaaggaagcgcgggtgtgcagcgccgtttcgccatcctgggcgccatcgctggacctgctcagcctggtccgcgagtcgtccctggacgcggcgatcatcggcgcgccgccgaaggtggtgcgtgaatacgagctgatggagatcggcagctacgagcacgtcatcgccctgtcggaaaccctgcaccggcgactggcgcccgactggtcgctgaacgacctggtcggcgagccgctgctggtaccgaaggactcgctgtttcccgcctacagccagttcatgaacgatgcgatggatgccgccgccttcgcgccccggcgcagcgtgcggccgaacgacctgagcattctcctggcccaggtcgccagcggcgacggcttcgccttcctgccgttgtcgctgaccaagttcgcctatccgggggtggccttcaccgccttgccggcggcggtcaacgaaggtttccgcctgccggtggggctggcggtgtcgccgacttcgcggcttcgtgccagcgacacccagttcgaatgcttcgtcgagaccgcgcggcgggtcgccgccggttga

SEQ ID NO: 341184 - DNA, 549 bp, Pseudomonas aeruginosa
atgccgatcgaagacgtgttctcgatctccggccgcggtaccgtggtaaccggtcgtgtagagcgcggcatcatcaaggtccaggaagaagtggaaatcgtcggcatcaaggcgaccaccaagaccacctgcaccggcgttgaaatgttccgcaagctgctcgacgaaggtcgtgctggtgagaacgttggtatcctgctgcgcggcaccaagcgtgaagacgtagagcgtggccaggttctggccaagccgggcaccatcaagccgcacaccaagttcgagtgcgaagtgtacgtgctgtccaaggaagaaggtggtcgtcacaccccgttcttcaagggctaccgtccgcagttctacttccgtaccaccgacgtgaccggtaactgcgaactgccggaaggcgtagagatggtaatgccgggcgacaacatcaagatggttgtcaccctgatcgctccgatcgccatggaagatggcctgcgcttcgcgatccgcgaaggcggccgtaccgttggcgccggcgtggttgccaagatcatcgaataa

SEQ ID NO: 341185 - DNA, 645 bp, Pseudomonas aeruginosa
atggctaaagaaaaatttgaacggaacaagccgcacgtcaacgtcggcaccatcggtcacgttgaccatggcaagaccactctgaccgctgcactgaccaaggtctgctccgacacctggggtggttccgctcgtgctttcgatcagatcgacaacgcgccggaagaaaaggcccgcggtatcaccatcaacacctcgcacgttgaatacgattccgctgttcgtcactacgcccacgttgactgccccggtcacgccgactacgtgaagaacatgatcaccggtgctgcccagatggacggcgcgatcctggtttgctcggctgccgacggccccatgccgcagacccgcgagcacatcctgctgtcccgccaggtaggcgttccctacatcgtcgtgttcctgaacaaggccgacatggttgacgacgccgagctgctggaactggtcgagatggaagttcgcgatctgctgaacacctacgacttcccgggcgacgacactccgatcatcatcggttccgcgctgatggcgctggaaggcaaggatgacaacggcatcggcgtaagcgccgtgcagaagctggtagagaccctggattcctacattccggagccggtcgtgccatcgaccagccgttcctga

SEQ ID NO: 341186 - DNA, 2223 bp, Pseudomonas aeruginosa
gtggggcgcgcacagcgcgcaattcgacctgaccctggacacctacgaatcggaacagggcgtgcacgccgaattcacctatgccaccgacctgttcgaggctgcgaccgtggagcgcctggcacgtcactggcgcaacctgctagaggccgtcgtcgccgagccgcgaagacgcctcggcgacctaccgctgctcgacgccgaggagcgcgccacgctgctgcaacgcagccgtctgccggcgagcgaatatcccgccgggcagggtgtgcatcgcctgttcgaggcccaggccgggctgaccccggacgcgccggccttgctgttcggcgaggaacgcctgagctacgccgaactcaatgcgttggccaaccgcctcgcctggcgtctgcgcgaggagggtgtcggcagcgatgtactggtcggtatcgcgctggagcgcggcgtacccatggtggtggccctgctggcggtgctcaaggccggtggcgcctatgtgccgctggatccgcagtatcccgcggaccgcttgcagtacatgatcgacgacagcggactgcgcctgttgctcagccagcaaagcgtgctggcgcgcctgccgcagtcggatgggctgcaaagcctgctgctcgacgacctggagcgactggtgcacggctacccggcggcaaacccggacctgccggaggcgcccgacagtctctgctacgcgatctacacctccggttccaccggccagccgaaaggcgtgatggtccgccatcgagccttgaccaacttcgtctgcagcatcgcccggcaaccgggcatgctggcgcgggaccgtctgctgtcggtgaccaccttctccttcgatatcttcggcctggagctatacgtaccgctggcgcgtggcgccagcgtgctgctcgccagccgcgagcaggcccaggatcccgaggccctgctcgatctggtcgagcggcagggcgtcacggtattgcaggcgaccccggcaacctggcggatgctgtgcgacagcgagcgtgtcgacctgctgcgtggctgcaccctgctgtgcggtggcgaggcgctggcggaggacctggcggcgcgtatgcgcggattgtcggcatcgacctggaatctctacgggccgaccgagacgacgatctggtcggcgcggttccgcctcggcgaagaggcccgcccgttcctcggcgggccgctggaaaacaccgctctgtacatcctcgacagcgaaatgaacccatgtccgcccggcgtcgccggcgaactgctgatcggcggcgatggcctggcgcgtggctaccatcgccgccccggcctgaccgccgaacgcttcctacccgacccgttcgccgccgacggttcgcgcctgtaccgcaccggcgacctggctcgctaccgcgccgatggggtcatcgaataccttggacggatcgaccatcaggtgaagatccggggattccgcatcgaactcggcgaaatcgagacgcgcctgctggagcaggacagcgtgcgcgaggcggtggtcgtcgcccagccgggggtggccgggccgaccctggtggcctacctggtgcccaccgaggccgcgctggtcgacgccgagtcggcgcgccagcaggaactgcgcagtgcattgaagaacagcctgctggcggttctcccggactacatggtaccggcgcacatgctgttgctggagaacctgccgctgacgccgaacggcaagatcaaccgcaaggcgctgccgctgccggacgcgagcgcggtccgggacgcccatgtcgcgcccgagggcgagctggaacgggccatggcggcgatctggagcgaggtcctgaagctcggccacatcggtcgggacgacaacttcttcgagctgggcggccactcgctgctggtgacccaagtggtttccagggtacgccgccgcctcgacctgcaggtgccgctgcgtaccctgttcgagcacagcaccctgcgcgcctatgcgcaggccgtggcgcagttggtgccggccgcccagggcgggatcgtccgatgcgccaggggcgcatcgccgcagctgtcgttcgcccaggaacgccagtggttcatctggcgcctggatccgcacagcgcggcctacaacatcccggtggcgttgcgtctgaagggaccgctgcggcgcgatgccctgcagggtgccctggacctgctggtgcagcgccatga

SEQ ID NO: 341187 - DNA, 1707 bp, Pseudomonas aeruginosa
atggccagcaacctcgccattggcaccatcaacaatggcggtgaccttggcaaggggctgcaacaggccaccagcgctgacagtctgaaagggtacgccatcgcagcggccacggcttatctcgtcagcccgcagttggacaaggcattcggcgtatccagtgacaacatcaacaaagtcaccaaaggattcaagctcagcacagttgagggaatcggtggatttgctgcctacagcattgcccaaggctttgctcaatcggtcatgcagcaggccgcctatggcggcagctacatcgacaacctcggtaatgccatggcaggtcaggcgcgcaacctgggaatggcggtaggtttcaatttcattggcgactcggtcaaataccctgatggcagcccgccgaaaatcatggctcacgccctgatgggaggtctgctggccgaagcctccggcagtgacttcaagactggagcggcggccgctggtgccaacgaggccatgatcaacctccttgggaaaatggtaggtggcgatcaaaacctcgaactgatggcctcgcaactcgttggcgtagccgcggcaagtgcggtcaatggcgatgtgagtctgggcgccgagatcgccaaaagcgggacggcgtacaaccggcagctacacccagatgaaatcaaattcgcatcggatgtggagcgcgtcaaacgttatgcccaggaaaatgggctgagcgaggacaccgcccgcaaagagcttctcagcacggccgccatgatggtggacaatggctggaaccaggccttggccggcacagacatcaacgctgcccgggctgctcagtatctgcgtacggagctgggcacaggcccggacagcaatctcttccaggtgacccaggctgactactacaacgagcgggtggggctgacggcgctattcaagaacaaggaggccctgaccagcgttctggaaaacatagccctagcgaatcccgcgagctatacgagggaccccgcgaaccgtgcggaagtgctgaatgccaaaggtgaaggtagccaagcgggctttgggctggcactggaagggatcgtcagcgcgccttcaaaaactgccttgtggttgatgggtgcgctaacctgttcaagctgtgcggagcgggatatccagaacgcttggaactcggttgcctcgttacctgaagacatccgtatgaaaggctatctggatgccttgcacaccatgcaaggccagggtgccagcgtggtgcgggacaacgccgcgagttcgactgcattgggagttgaggttgggctggccattgatggagggttggcaggggcaggcaagggcgtcgttacggatggtccgaaaggaatacttacactgaaagattttcctgatgtctctaccaagataagccagaagcagcttcgccatattgctggaacacagcagcttgaggcacggggaggcggtggtttcttaaacagtgtctctgatgctcaaaaagtgcttgatgcctaccataccggccaagtgaaaatcctagggagaaatgctcagggattcccagtagtcaagtttgagggcgttactggaactaacgttaatctcggtgttggtataactgatcaggcaaccaatgtatttattatcaagggcacaaagagtccaagtattgtccctacaaatccaaactggagtcccaaatga

SEQ ID NO: 341188 - DNA, 663 bp, Pseudomonas aeruginosa
atgttgaccaacggtgcaactgtccccaagggcgtgcctgttcgcgccgcgaccctcaatactgcgacaggccggtatgaggtgacggttcccgcaaagtccaccgtgccgaatacacccccgctgatcttgacctggacccctgctacccctccaggaagccagaacccctcaagcaacactccggtcgtaccgcagccggttccggtgtatgagggagcaacgatcaccccagtgcaggccgaaccggagtcctatccggaagtgccgttagatctggacgatctgatcgtgattttcccggcggattctggagtcaaacctgtttatgtaatgctcagtagtcctcttgatagtggtatattcacgagaaagcagctgcttaagaaatatcaaagtcatgccgatgactttggcttcgccggcagaaatgcaaataacaccaccttggcggagttcagagataaaattctggaacaccttggctcaccttcaactattgaaaaaggtgtttatcatagatatcaaggatccaaggtattttacaatcctgacactaatattgtggttgttatcaaagaggatggaatgtttttgtcagggtggtatcttgaaccaggaagcaaacaggaaaaaaactattttgagaatgaggtgctttaa

SEQ ID NO: 341189 - DNA, 981 bp, Pseudomonas aeruginosa
atgaagcagatgaccttcgccgatgccgagtacgccggcaagcgcaagcagacccgcaaagagctgttcctgatcgagatggatcgggtggtgccgtggaaggggttgattgccctgatcgagccgcattaccccaagggtgaaggtggccgtccggcgtacccgttgatggcaatgctgcgggttcatctaatgcaaaactggttcggttatagcgatccagcgatggaggaggcactgtacgagaccaccatcctgcggcagttcgcggggctgagcctggagcgtatccccgacgaaaccaccatcctcaacttccgtcgcctgctggagaaacacgaactggctgctggcatcctggccgtgatcaatggctacctgggtgaccgtggcctgtcgctgcgccaaggcaccatcgtcgatgccacgctgatcaatgcgccgagttcgaccaagaacaaagacggcaagcgcgacccagagatgcaccagaccaagaagggcaaccagtattactttggcatgaaggcccacatcggcgtcgatgacgaatcgggcctggtgcatagcgtggtaggtacggcggctaacgtggcggacgtcacccaggtcgacaagttgctgcatggcgaggaaaacgtggtctgcgccgatgcgggttataccggcgtcgagaagcgtgccgagcatgatggccgcgaagtgatttggcaggtggcagcacggcgcagcacttacaaaaagctgggcaagagcagcgcgctgtacaaagccagacgcaagatcgagaaagccaaggctcaggtacgggccaaggttgagcacccgtttagggtgatcaagcggcagttcggttatgtgaagacgcgcttccgtggcttggccaagaatactgcgcaactggtgacgctgttcgcgttgtcgaacctgtggatggcacgccgacatttgctgaccaatgcaggagaggtgcgcctgtaa

SEQ ID NO: 341190 - DNA, 2373 bp, Pseudomonas aeruginosa
atgttcgcccccgccaaccagacgcacttcagccttcgcatcgaaaacctccggcacgacttccaggtactcgccttccgcggtcgcgaagccatcagccagccctttcgcttcgacctggagctggtcagcgagcgatccgatctggacctcgacgcgctgctgcaccagccggccttcctgatcctctcgccgagcgggcaaggggtccacggacagctcaccagcatcgcccagggggactccggcaagcgcctgaccggctatcgcgcgaccctggagccgcgcctggcctacctggggctgtgcagcgaccaacgcatcttccagcgcctcagcgtgccggaaatcatcggtcgggtgctggagggccacggcattctcgccgacgcctaccgcttccagctgggcccgacgccgtacccggcccgcgaatactgcacgcagtacgacgaaaccgacctggcgttcctcagcaggctctgcgaggaggagggcatccattaccaccatgagttttctgcccagggccatgtgctggtcttcggcgacgaccagacctcctttccgcggctgcaacgccccgtcgcctacgtgcaggacgccgggctggtcgccgaccagccggtggtcaagcgcttcggcgtgcgcttcgacacccgtgccagccgggttatccggcgcgactacgacttcgagcaacccgcgttgcagatgcaggccgcccatggcccgcagctcgtggcgcagcaaccggacctggaggactacgactatcccggccgcttcacccaccgcgagcgcggcaagcacctgagccggcgcgcgctggaacggcatcgcgccgactacctacaggccaggggcgaaagcgacgaaccggcgctgctcagcggacacttcctgatgctgtccgcgcatccccgcggcgaatggaacgatctctggctgcttaccgaggttctccacgaagggcggcagccgcaggtactggaagagtcgatcgacagcgacgtcgcgcagggccagggcgatttccgccagggctatcgcaaccatttcgtcgccactccctggagcgcgcatttccgccccccgctggagcatcccaggccacgcgtgctgggctgccagacagcggtcgtgaccggccccgccggcgagaccatccactgcgaccaatacggccgggtcaaggtgcagttcttctgggatcgcctcggccaggccgacgacaacaccagttgctggttgcgcgtcgcctccaactgggcgggcaagcgctatggcggcgtcgccatcccgcgggtgggcatggaagtcctggtgggtttcctggagggcgatccggatcagccgctggtcaccggctgcctctaccacagcgaaaaccgggtgccctacgagctgccgcagaacaagacccgcagcgttttcaagaccgacagctaccccggcggcggcggtttcaacgaactgcgcatcgaggaccgcaagggccaggaacagatcttcgtccacgcccagcgcgactgggacgagaacatcgagcacgaccagaagatccgcgtcggccacgagcgccacgacacggtcgagggcgatagctacagcgagttcagggccgaggaacagcgcacggtccatgccgaccgcaaggtcgaactgaaggcggccgaccacctcagcgtcgccgacgcgttgcacctgaggatcggcaccggccagttcgtcgaggcgggcgacgagatccatttcaaggccggcgacaaggtagtgatcgaggcaggcatggagttgaccctaaagggcggtggcagcttcgccaggctcgacccgggcggtgtcacccttgacggcgcccaggtgatgatcaacagcggcggcagccccggcatcggtagcggcgttcgcgcgctgtcgccgctgcaaccgctcgcggccgacgccgcggcggcgggaggcgccttgttgggagccatcgcccagaaggtcggcgaagcgccgcagaaactcctgcgtttcgaactcagcccgttacccggcgtgccgtcggcggccaggcagccgtatcggctctacgccaacggtgccctcaaggaggagggcatcgccgacgaaggcggcgcaatcagcttcgagccgctgccgggcgaacgcacctatcggatcgagaccgccaatggccacgcctacgacgtggagatggtcgaccagccggacgcactgcaggccgatgaccgcctcgcccagcaggggttccgcgactaccgggcggaaatgccccagcacaagccgcgttccgccccggacgcctaccggcgcgacgcctcgcggcccggcgccgccgacaaggatgaccccacgctatga

SEQ ID NO: 341191 - DNA, 459 bp, Pseudomonas aeruginosa
atgcgtaccgtgaccccggcgatgccgatgaacaccgccaggctcaacaccagcgccggtgccaggcccagttcggcgaccagcgagatcggcggcagcgacggcagggcgaaccaccagccgacatgctgggtggcgatcagcgagccgaggatgaagaacagcagggtcaccagcatccgcgcgttgccgccgccgacggtgaacagggtgccggaggcgcagccgccgcccagttgcatgccgatgccgaaaatgaaggcgccgacgatcaccgaagtaccgaccggcgagacgaaaccgctcaccggctggccgaacaggctgcccgccgccagcgccgggaagaacagcagcaccgccagcgccagcatcaccatctgcgcgcgcagcccggcgccgcgccgttcgcggatgaatacccgccaggcggaggtgaagccgaaggcggcgtggtag

SEQ ID NO: 341192 - DNA, 909 bp, Pseudomonas aeruginosa; identical to SEQ ID NO: 322361

SEQ ID NO: 341193 - DNA, 315 bp, Pseudomonas aeruginosa
atgattatctacggtgtcgcactgctgtctctgtgtaccctcgccgggctgttcatcggcgagatccttggcgtgctgctcggcgtgccggccaacgtcggtggcgtcggcatcgccatgctgctgctgatcttcgtcggcagctacctgggcaagcgtggcctgctctcggcgaagaccgagcagggcgtggagttctggagcgcggtctacattcccgtggccttcgccctggtcccgctgctcgaccgcttcggccggaagaaagccgaaggcgccccgccattgaaaccgcgcaccagcgtgcaggggtga

SEQ ID NO: 341194 - DNA, 564 bp, Pseudomonas aeruginosa
gtgcatgacgatatcggccagtacctgacgggcatccgcacccaactgttgttgctgcgctgcacggcaggcgacgggcagccggcgctggcacgcctggagcgctactgccaggggctggacgacagcttccgcgcgctgctgcgcggtctaccgccgccggccctgcaacgccagtcgctggacgaggcgctgcgcgcctgcgtggcggactggcaggaaggccagggcatcgcctgcgagctgcgcctgggcggtccgctgccgcccctggatgcggcggccgggacccatctctaccgcctgttgcaggaggcgctgaacaacgtcgcccggcatgccggcgccagccgcgtgcggatccgcctgcaatgccgtggcggctttctctacctgagcgtacgcgacgacggtcgcggctgcgcggcggacccggcacccggcttcggcctggactcgatgcgccagcgcgcgcgctgcctgggcgctgaactgagcctgcgcagccgtcccggacagggcctggcgttgcgcctgcggatgccgctggaacgcgacgactga

SEQ ID NO: 341195 - DNA, 1344 bp, Pseudomonas aeruginosa
atgaacaagaatcttctctccgctgccattctcggcacccttctcagcctaaccagtgcaacggccctggccaagctggatgccagtgaaattgcccgcttgggccaagacctgacgcccaccggcgccgagcaagcgggcaatgccgacggcagcattcctgcctggagcggtggccttacccagccgccggccggttacagtgcggccaagggttatatcgatcccttcgcgaatgaacaaccgttgtacaccgttacagcggccaacatggcgcaatatgccgaccggttgatgccagggtacaaggcgctgctggcgaagtttcccagctacaagctgaacgtctatccgagtcatcgcactgctgcgctgccccagcacgagtacgagctgatccgcgaagaggccgctaagctcgagcttaacggcgatagcatggtcaactatcagaaaacctcggtgccttttcctattcccaagtcgggtctggaggccatgtggaaccacctgacgcgctatcgtaccggtggctttctcgattacccgactgaaatggtggtgcaggccaacggctcatttactccggtgcgccgaatgcgaaaatttgccatggcctcaagcatgaccaacccggagccgaaccggctgtactatttctggaatagcgttacctccccagaaagtatcgccggcagccagactctggtgcatgagccactcgaccaaaccaaggagtcccggctggcctggcagtacaacccagggcagcggcgcgtgctgcgcgcgcccgagttctcttatgacacgccgccaggtgcctccgatggcttgcgtaccaacgactcagctgacatgtacaacggcgcgcccgacaagtacgactggaagctggtaggcaaaaaagaaatgcttgtgccttacaacacttacaagctggccgatacttcgctgaagtacgagcagatcattcagcccaaccacttcaaccaggacctactgcgctacgagccacatcgcgtctgggtggtcgaggccacgctgaagccgggtgagcggcatatctacgccaagcgggtcttctatctcgacgaggacagctggagcatcctggcctcggacatttatgacagtcgtggcgaactttggcgctttcatgaggcccacgcgttgcagcgctacgacattttgtccagttttcatataagtgaggtttcctacgacctgcaggcacgccgttacctagtggttaacctgcagaaccaggagatcccaatcaagttcaacgttccggcgaacttgaaagattttagtccctcggctctgcgtcgcagcggccgctga

SEQ ID NO: 341196 - DNA, 1137 bp, Pseudomonas aeruginosa
atgaaaaaatacaaccaaccagcgctgaggttgctctgcctgttgtctgtcggcctggcggccttgccgctcagcgccgcgccactggtcgatcgccttgagcgcgccgcccgaatttcccccttagccagcgagtcgcccctcaccgatgggcagttggtcggcgattatctggtgacggtggggggcagcggccacgtgctgttgcgctcgccctccggcgagatccagcaggcacaagtgccggtcgatgttctgctgacctcggtgcatttccccgatgccaacaacggctgggccgtcggccatgacggtgtggtcctgcatagcaccgatggcggcaagacctggagcaagcaactcgacggcagtgccataagcgctttgatgttgaagtgggccgaggccgagatggcgcgtttggaattagccagtgcggcggcgccagacgacgaggcgctgcataccgagttggagaatgtcatcttcgccttcgatgatgctaaagccggtatcgagtcaggcccggcacgcccgctgctggatgtgtggttccgcgatgcgcagcaaggctgggcggttggtgcctatgggatccttgtgcatacccgcgatggcgggaaaagctgggaatttgtctcgaccctggaaaaccccgagcgtttgcacttcaatgcggtcctcggtctgcgcgacggcagtctagtggtcgccggcgaaggcgggcgtctgtaccgctctagtgatgacggccagcactggacagtgatcacgccaatgagcccggcctcgctgtacaaactgcagcagctgagcgatggccgcctactggccttgggcttcggcggtaccttgctggccagccaggatcagggcctgagctggcaggtcatcccgctgccggtgcgcgcgggtctgtacggcgccgcacaactggcggacggcagcttgctgctgaccgggcaaggtggcgtggtgctgtacagcaccgatggccagcagttcaaagtttggcaggcggccgctaaggcgccttggctcggcgtggcgcaagtgtctgccgagcaactggcgctgattggtagcgccggcctcatcaccatgcccttggcagagctcaaggagcagctgcaatga

SEQ ID NO: 341197 - DNA, 2079 bp, Pseudomonas aeruginosa
atgaatgccaaactgaacgacgggtctagcccgcaacttgagaccagcgctttgcagcggctggttggtttcaccgaacgtgcactgtttcgcaatcgcgtggtggtgcttctgttcttcttggtcctttcgctgttgctcggctaccaggccctgggcttgcgcccagacgccagcttcagccggatgatcccgaccggccacccgtttatccagaactacctgcagtttgagagcgtgctccggccgcagagtaacgtgctgcgcgtggtggtggaaaaccccaagggcgacattgtcagcaaggagttccttgagactctgcgcgaggtcaacgataggattttctacatccctggcgtcgatcgcggcaatttgaaatcgctgtggacccctaacgcgctctgggctgaagtcaccaccgaaggcttgcgcgccggccgggtgattcccgacacctacgacgggagcccagaggcgttggcacaggtgcggcagaacatccagcgcgccaacatgctcggcagcttcgtcgccaacgacttcaagtcggcggtgatccgggtgccactgctggagatgaacccagagaccggcgagccgctggactacggtgcctttacccaagcgctggaaaagcaggtgcgcgagcatttcggtgtacagggcgtgaatatccgcgtgatcggcttcgcccagatcatcggtgatctgctggccgctgccaccgacatcgcgctgttcttcgctatcacagtcggcctgattagcctgatgctctatctctattgccgctgctggcgcagtaccgcagtaaccgtggtgacttgcctgctcaccgtggcttgtcagcttggcctgttgcaccttttcggtttcggtctggacccatactcgatcttggtgccgttcctgatcttcgccataggcatcagccacgcggtgcagaacattaacctgatgatgagcgcgatggggcatggcgccacgccgctggttgccgcgcaacacaccttccgcgccctattcattcctggcaccacggcgctgctggccgatgcggtggggtttatcaccttgttggtgatcgacattggtgtgatccagcagctggcaatcaccgccagcattggcgtgttcgtcgccatttttaccaagatgttcctgctgccggtgctgatgtcctacgccggcatcagtccgcgcggcttgcgtgagcaggaaaagcgagccaattcgtcctggcctatcttccgccgcctgtcggccgtggtcgaaccgcgcgtggcgctgccgctgatcgccctcagcgtgatgctgctcggcgtcggctactacgcccgtcaagatctgaaaattggagacctggacaagggcgcaccggagttccgtccggaagcgcgctacaaccaggacaacgcttacttgctcaagcactacagcaccagcactgatgtttatgtagtgatgttcaagacaccggctgaacagtgcgcacgcttcgccgctgccgacctggccaaccagttcgaacagagcatgcgtgaagtcaaaggtgtggaatcggtgcagtcgctctatcgcaccatgcgcttcaacatccttgcgcgcaatgagggcaacccgaagtgggccgaactgtcgcgcgatcagttcgtgatgaacaatgcccgctcaggtgtcgctgccgagttcgtcgaccccaactgcagcgtggcgccaatcagcctgtatctgagtgaccacaaggccgagacgctgacccgggtggtcagcgcggtcgaggccttcagcaagcagtacgacacaggagacttcgagatcctccaggcggcaggtaatgccggcattgaggcggcgactaacatcgtcatcgagcagtccgagaagctgatgctgctcctggtgtttgtgatcatctcgctagtggtctggtgggagtttaattcgatcaaagtgaccatcgccttgatggcgccgctgtacctgtcaaccgtgctgtgcgaagcggtgatggcgcagatgggcctgggagtgaagatggggtttggggagcaatggaaccaaaaaccaacgtaa

SEQ ID NO: 341198 - DNA, 399 bp, Pseudomonas aeruginosa; identical to SEQ ID NO: 269206

SEQ ID NO: 341199 - DNA, 351 bp, Pseudomonas aeruginosa; identical to SEQ ID NO: 328417

SEQ ID NO: 341200 - DNA, 939 bp, Pseudomonas aeruginosa
atgagttgtttgcttcctcatccgcttaggcgtgatcgtagtattttgattacttataagcgccgcgctcataaagtgaactgtcagtcagttagtagtggcgctgtgtcgacgctggatgatgaagtagataccctgagtgtggtgctgcccgatatttccgctattataaacatggtcgcagaaaggaatgagtctataaggagtaggggggagtggaaagataggctattcgttcgtgagcgccccttaaagaatcctgatgaaagaactcctgcacctataactattaatactattaatcgagctttggaggcgctggtagttcgtcatgagttgatttctgataatggtgacagactggttgttaatgtgtctagattaaggaagacctttgcaaataaaatatgggagctctcaggtaatgatccttttttaactgcaatgttggctggaaatactccaaaagtcctcctagacagttatttggaagcgccggatgatgctgagaaaaattgggcgttgatgggggaggttcgtaataaagaacttctcgaaaatgatcatgccgattttggtattattccggtaaaagaggtaaatactgctgtggcccgttgcaaggataccgttaacgggcacagggctcccaagaatgggagtcattgtgtggagttcttaaactgctttcgctgcagctctttcgtagtgactgcggatgacctgcatagattattaagcttctattggttgttggttcgtgagcgcgggcgaatcggtgcaaaaaaatgggtgaggctatataggcatataattaaaattattgacgaaaaaatcttgcctaaatttgataagtccactgttgtggctgctagggaaaaagctaggcagaatcctcatccattttggaaagatcctgaaattttggggttggcataa

SEQ ID NO: 341201 - DNA, 1437 bp, Pseudomonas aeruginosa
ttgaacaacaaaaacgatatttcctgcctgtttgccagaaaaccattgccattgctctgcgccctgatcgtcggcggactgttcggcacgtcccaggcgcaagccggcggcttcatggtgccgaccaccaacacggcgggctggggccgtgcgatggcaggcggctcgctgtttcccaacgatccgagcgccgcgttcaacaacccggcggccatggcgttcatcgacaagcggatcgcccagttgacggtcaactacgccgatatcgacatcaagtacaacggcgatgcctacgactaccagggtaatcccatgaccggcggctaccaggacgggccgggcacccccgagctgggtaccaacgatggcggccaggccggattcggcgcgtggctgccgaccggcttcctggtcgtaccgatcaacgaccgcttcgccttcggtctgagccaggtcgttccgatgggaatgcgcagcacctgggacccgaactggaaaggccgcgatttcgcggtggacaccaagatcgagacgatcggcctgaccggctccctgtcgttcaaggtcaacgacaacttctccctgggcgccggggtgatcatccagcgcacctccggcttcgtcagccagaacctcgatctctatgcctcggccgccaactccccgggcatgggcgggattccgttcccggcctcgaactcgtccgcgctgatgcgggtcaaggtggacaacacctcgcccggcttcttcgccggcgcggtttggaagccgaccgaccgcgacaccctgggcttcgcctaccacgcgaagatccgcaacaagctgaaggggcactacaacctctacgaccacgacggtggactgaccgagggcgccatcgagggcggcaccccgggcctggcctatccgggcctggacctgcgcatgggcgcttccgcctcggcgcgcctggatatccccgcctacgcctcactggattgggtacaccagttcaacgaccgtctgagcctgggcgccagcgccacctggaccgagtggtcgtcgttccaggacctgaccctcaagtcccacggcaacacgatcgtctccatcccctacacctaccggaacacctggaccctggcggtgggcggcgactacaaggtgaccgaccagtggaccatgcgcgccggggtcgcctacgaccagacgccgacccacaatgccacccgcgatccgcggattcccgacggcgatcgctacttcgcctccctgggcgccggctatcgcttccagtcgatgccggagttgtcgatcgacgcggcctactcgcggcaattcgtcaaggaggtgccgttgaagacggtcaaccaggatcgcctgggcggcgggcggctggatggcagggcaaccagcaagggacaggtgttcagcctgtccgcgacctacgacttctag

SEQ ID NO: 341202 - DNA, 1338 bp, Pseudomonas aeruginosa
atgacgcaatccgtcgacgctttcctcgagcgcctgaagcggcgcgatcccgatcagcccgaattccaccaggcggtggaagaggtgctgcgttccctctggccgttcctcgaggccaacccgcactacctggaagccggcatcatcgaacgcatcgtcgaacccgagcgggcgatcctgttccgcgtaccctgggtcgacgaccagggccgggtacgggtcaaccgtggctaccgggtgcagatgagcagcgccatcggcccctacaagggcggcctgcgcttccatccctcggtcaacctcggggtgctgaagttcctcgccttcgagcaggtcttcaagaactccctgaccactctgcccatgggcggcggcaagggcggctccgacttcgatccgaagggcaagagcgacgccgaggtgatgcgtttctgccagtcgttcatgagcgagctgtaccgccacgtcggcgccgacctggacgtgccggccggcgacatcggcgtcggcgcgcgtgagatcggctacctgttcggccagtacaagcgcctgtccaaccagttcacctcggtgctgaccggcaagggcctgagctatggcggcagcctgatccgcccggaggcgaccggcttcggctgcgtctacttcgcccaggaaatgctcaaggatcgtggccgcggcttcgacggccagcgggtggcgatctccggctcgggcaacgtcgcccagtacgcggcgcgcaaggtcatggaaatgggcggcaaggtgatctcgctgtccgattccgaaggcaccctgtatgccgaggcggggctctccgacgagcagtgggaatacctgatggagctgaagaacgtgcgccgcgggcgcatccgcgagatggcggagcagttttccctgcagtttctcgaagggcgccggccctggggcctggcctgcgatatcgcgctgccctgcgcgacccagaacgaactggatgccgaggatgcgcggcgcctgctggccaacggctgcgtctgtgtcgccgaaggcgccaacatgccctcgaccctggaagccgtcgacctgttcctcgaggccggcatcctctacgcgccgggcaaggcgtcgaacgccggcggggtggcggtgagcggcctggagatgtcgcagaacgccatgcgcctgcgttggagcgagggcgaggtggataccaagctgcacggcatcatgcagtcgatccaccatgcctgcctgctgtacggcgaggagcaggggcgggtcaactacgtgaagggggcgaacatcgccggcttcgtcaaggtcgccgatgcgatgctggcgcagggcgtggtctga

SEQ ID NO: 341203 - DNA, 402 bp, Pseudomonas aeruginosa
atggaggggaagcttcgaatcgtcaccgctaatcagttactgtcgtttaatcaaaggggagacttcttccttgtatgcagagactttctggacgacgtggtggtggtcgtcaaccacactccgggcgactatccagtcggcaagcagggcgatgtattcacggccgagttaagggtaacgcgcatgccgtgccttggcctgaacgacggcccggtgctccagcacaaagagacgtgttcgttccaggtcgcgaccgatgatcaggctgagacagaccacttgtggagcgcgatcatcgacaattggggggtaggtgagcgcgtatggctggtgcaggggcgagtggggcgtttcgtggtagatcaccccgcatatcctgacggctgccatacccagccctga

SEQ ID NO: 341204 - DNA, 438 bp, Pseudomonas aeruginosa
atgctagacaaaatttacatcttggttgaagagaagtacttcacgtccggagactttaatggactgactttactcgagcttattaaagatacaggcttcgcgaaagacgtggctctggccgagatcagggtgggtgtcgagactgatttactgacgattgagcacatgggaaatcctcatataaaaccgtttgccagggtaaataaggaggaaatgcttggatttttagatgagagtatgggcgagaagcctttctgtatgtacccacaccccgagaagctgaagagcgctgcggccgccgaaacctatcgagagacccccttcgcttatgaattagcaaaaggggcaggtcagttagactttcgggccttcgatctatcaatactagagttctatcgtgttggcgctgatggaaaattgacccaccctgccgattga

SEQ ID NO: 341205 - DNA, 210 bp, Pseudomonas aeruginosa
gtggcgggcacaaccaaattagccgttgagctggtactggagagcggcagcctgagcgccgaacacatcctcaatgtcgtggcacggctgacagcatccgaaccaccacccagcgtcgaaacccacttgtcgctcaaggaagccccggtcgctaacacggcgcgctacgaccgcctgcgtggccaggccgagggggtcggtcatgcgtga

SEQ ID NO: 341206 - DNA, 429 bp, Pseudomonas aeruginosa
atgcacgaggatcttctcgatgagggcgaaaccgtcagcctgaaccgagttgctcgcctgatggcggctgagcgaattcaaggctggccacgccggaaacgacgtggctttggaagagccgtcagtggccgcccagcaggcgtgaaaaacctgctggagcgcgatttcaccgcgcaggagccggagcgcaagtgggtcacggacatcacggaaatagccacactggaaggcaagcttttcctatgtgtggtgctcgacttgtacagcaagctggtgatcggttggtcgatgcatcaccgccaggatcggcagatggtgattcgagcagtggagatggcgatttggcagcgccagggtgactggtcagtaatcctgcattcggatcgcggtagccaaggcggattcaaccggtcgtcgcaacacctttga

SEQ ID NO: 341207 - DNA, 1434 bp, Pseudomonas aeruginosa
atgaggattaagaaatgtatatcagccctgaagatatcgctttttatggcgtgcttattgccatcgttattctttgctcagggcgctagggctgaatattattattggtacatgggtcattttgataagaaagtttcgtcgccctcggcgggttgcgatctttatttcactggtatatctcgcgatccagggcgggtttttgttatggagccttcttcaaatccaagtgaggcgggcaaggttttctattgtgtggttcgttctggtgattgggttctttttaatacgactgttgttttgaaaggcgataggtgtcccgaagggcagtctctcgatttaaaagatggcttgtgcaagcctccgcctcccgagtgcgaatctggagtgccgaacttgttcaggagttctaactatccaattatcgtaattaatggaaagaacacagttcctagttctccgccgtctggctgtttgaatgggtgcgcttatgaggctgatagttctcggccaacatcttgttatcgcactccaggctccacaactgaggggttctgcaactacacgctcaagagcaacggccagaactgctcggcagattccggcaacctgggcggcaccggtccttcgctcagcgaaccgaatcagccgccagtgaccgacccgccttcggacccgaatgacccgggctgtccgaagggctacagctggtcaggcaccacgtgcgtgaagacgccgaccgatcccacagacccgaccgacccgaaagaccctggtggtgatggtggtggaactggtggtggcgatggtggcgggactggtggcggtacaggcggtggcggtgatggcggaacgggcggcggcgatggcggcaccggcgggggagacggaaacggtggaactggcggcggtgatggcgatggcggcggcacgggtggtggtggtgatggcgggggagacgggcagtgcgatccggccaaggacccgaacaaatgcggcagtggctcctcgatctccggcgacggtgactgcaaggtggcgattcagtgcaacggcgacgcaatccagtgcgccattgttcgccaggaaaagctcgcacgctgcgcggatgaagagttccgtacggtcgatgacaagaagattcaggacctgaagaacacgctggccggtgagttctccgggcctgagtacgaacccatcaaggccaccggcgagaacacccatgacctgtcgaagctgctcgacactagcgggcgcttctccaaggcctgcccggttattcctgacgtctcgttcccctggttcggcagtactcagacggtgtcgctcagtagcgtgtcgtccgatctgtgcacgtatctccagtggttcgggtatctgcttgtcgcgttcgccatgcgcgccgcggctgaaatcattgcgcgagggttgaactga

SEQ ID NO: 341208 - DNA, 1092 bp, Pseudomonas aeruginosa; identical to SEQ ID NO: 324657

SEQ ID NO: 341209 - DNA, 2778 bp, Pseudomonas aeruginosa
atgaatgcagtagagattgagtccgccatatcggacctggcccttgagccctttgatgcagcggagtttccgttcaccttcctagctgcatttggcagaaaggacgcggagatcaagcgtctacgcgcaggcaacaacaatgcttcggatgtacccggcggcgtgctactgcgcaataacattcatatcgccgcctgcgagcccggcaccgtgggcgaaacgctcaaagcgctgcgtaccagcttggccaccacaaaggccaaagccaaattcatcctcgccaccgacggacaaacgctggaggccgaagagctgatcacaggtgaaaccatcacctgcgactacccggactttcccaaccatttcggtttcctgctgccgctggccggcatctccaccatcaaggagatcaaggacaaccccatcgacgtgcgcgccaccagccgcctgaacaagctgtacgtcgagctgttgaacgagaacccggactgggcaaaagccgagcgccgcgccgacatgaaccactttatggcgcgcctggtgttctgcttctttgccgaagacaccgatatttttaatggcgatggtctgtttaccaaaacggttgaacagttcagcgagcgtgatggttccaacaccgaccaggtgctgtcggaaatcttccgctccatgaacatcaagctggccgagcgcgccaccgctcaaccgcgcctgcccagctgggccaacatcttcccctatgtaaatggtggattgttttcaggcaacaccgaagtgccgcgctttacacgcatggcccgtacttacctgctgcacgccggcaacctgaactggaaaaaaatcaatccagatattttcggtagcatgatccaggccgttgccgatgatgaagagcgtggcgcactgggaatgcactacaccagcgtgcccaacatcctcaaggtgctgaatccgctgtttctagatgatctgcgtgcgcaactggaagcagccggtgacaataaagccaagctgctcaacctacgcaagcgtttggcacatattcgcgtatttgatccggcctgcggctccggcaacttcttggttatcgcctacaagcagatgcgcgagatcgaggcggagatcaatcgtcgccggggcgaggctcacaataagtcggaaataccgctgaccaacttccgaggcattgaattacgcgactttccggcagagattgcccgcctggcgctaatcatcgccgagtttcagtgcgacgtgctgtatcgcggccagcaggatgcactggcagagtttttaccgctggacacgcaaaactggattgtgtgcggcaacgcgcttcggctggattggctaagcatctgcccgccaaccgggacgggggtaaaagtggtggccgatgacttgttcggaacgccaatcaatcagacggaaatcgatttcgccaacgaaggtggtgagacgtatatctgcggcaaccccccatatcttggaagtcagtggcgcgatgaagcccaacagagcgacatggatgccgttttctctaaagaaaccaagagctacaaggatcttgactatgtggcagcctggtatttaaaagctgctcagtactgcgctgagcaagacgcagactttgcgctagtagcaacgaaaacaatctgccaaggaattcaggtggctatgttatggccactaattctggatcgaggactgtcaatattctttgcccaccgaccatttacctgggggaacttggcaaaagataaagctggcgtgacatgtgtcattgttggcgtttccaaaagaagaaggcaatctcaacgactgtttgacggggatacccttaaagaggtcagcaatattggaccctacctaattggcatgcccaatgtcatcgtggaaaaacgcccacgacgtcctgatgacttaccaatcatggactacggcaacaaaccatcagatggcggaaatctgatctttgaggacaaggaagaaatccagaacatcctccaagagtatccggaagcatctccccttatccggcgttacatgggctcacaagaatttgttcgatcgactgcgcgtcattgcttatggattgaatccgaaacgctgcagttagctgaagtaatcccgcctatcaaaatgcgccttgatctagtcagaaaggtgcgtagtaccagtaaaggcaaacagtcaaatgacaacgcaaatacaccacaccgctttgtctataccccccataaagatggcgtagctctgattgttcctcgtgtcacttcagagaataggccttatttgccttgcggttttgtcgatggtggcacggtcgtagctgatacagctgcagtcatttatggggcgccgatatggtgcttggcactagttgcaagccgattgcaccagcaatggattgcaacggtttgcgttaggctacgaacagactaccgatactctaataccctcggctggaacaccttcccagttccactgctcaccgaacagaacaaggccgatctgacccgctgcgccgaggacatcctgctggctcgcgaagcccattttcccgcgaccattgccgacttgtacgatccagaagccatgccggacaacctgcgccacgcccacgagcgcaacgatgaagtgctggagcgtatctacatcggtcggcgttttagaaacgataccgaacgactggaaaagctgtttgacctctacaccaagatgacagcagatacatcgaaggccgcgccgagaaagccacgagggaaaaaggcatga

SEQ ID NO: 341210 - DNA, 129 bp, Pseudomonas aeruginosa
atgagcgatacccctgctagcctgaccacgccccccgaaagctacggcgagtggttaggtgatctcaaatcccgcatccgaaatgcccaggcgacggcactctcatggaggaagaatcacagtgactaa

SEQ ID NO: 341211 - DNA, 747 bp, Pseudomonas aeruginosa; identical to SEQ ID NO: 318856

SEQ ID NO: 341212 - DNA, 3306 bp, Pseudomonas aeruginosa
gtgaagcaagcactgctctggcgtgacagcgagaccctcattctcagcagcatcgaactctataactggggcggctttcagggctatcaccgtgccgagatcgatccctcaggcaccgccgtgatcggcccaacgggtagcggtaaaacgacgctggtggatgctctgatgaccttgctgtgcgccaacccgcgctacaacctggcttccacaggtgggcatgaaagcgaccgtgatctggtgtcctatgtgcgcggggttaccggccctggagacggaggtgtagagcaatctcatatcgcgcgccagggtaagacggtcaccgccattgccgccacgctcgagcgtgacggtgcgcaggtgcgactgggcgctgtactctggttcgagggcaccagctcctcggcgtccgatctgaaaaaactgtggctgttaagcgagtcccccgagcagacgctggagcattggctcagccaacatcacgcaggcggcatgcgggcgttgcgtcagatggagaaggatgggacgggtatctggccgtatcccagcaaaaaagccttcctggccaggctcagggattacttcgaagtcggtgaaaacgccttcaccttgctcaaccgcgctgccggcctgaagcagctcaatagcattgatgagatctttcgcgagttggtgctcgatgaccgctccgctttcgggcgggctgccgaggtcgctactagtttcgatgatctaacggacattcaccgggaactggaaaccgctagaaagcagcagcgctcattacaaccggttgccgatggctgggagcgttacaaggccttacaagaacagctgcaggataaacaggtgctcgaaggcattcttccggtctggtttgccgagcaggggtatcgcctatggttggctgaaaccaataggctagagaaggagcacaagcaggctgagctggatcgagaacactgcgagcgtcgacttgatgcccagaagggcgtggtcgatcaacatcgtcagcgctacctgcgcgtaggtggcgcagggctggatcaattacgcgggcgcatcgcggattggctcagggagtgcgataagcggcgcctgaaggccgagcagtaccaacgcctggccaaggggcttggactggcggaggcattatcggccgcagccctcgaggagaatcagcagcagatcgcggcgcgcctggaaatactgacccagcagattactgacgcgcggcaaacggcgttcgatgcgggtctcgtccagcaggagctcaatggccgcctgcaggccttacagcaggagcgtgccgaggtggagagacggccaggctcgaacctgcccgggcatttccatgcttttcgaggagatctggcgcaggcgcttggcgtcgatgaatcggccctgcctttcgtcgccgagctggtgcaggtcaagcccgaggaactggcctggcggggtgccatcgagcgggcaatcggcagccaccgcctgcgtatcctggtgccgcatggcgcgtccgaggctgcactgcgttgggtgaaccaacggcataaccgcctgcatgtgcgcttgctggaggtcaaggagccgtcgtcgcgccccgtgttcttcgacgatggctttacccgcaagctgaccttcaaggagcatccgtaccgagaagccgtgaaggcactgctggcggacaacgaccgacattgtgtggaaagcccggagcaattgcgtcataccccgcatgccatgacggcccaggggctgatgtcgggtaaggaacgcttcttcgacaagcaggaccagaagcgcctggatgaaggctggctgaccggcttcgacaaccgcgaccgtctggccttcctgactgaacaaattcgcgaggtcaatgaacagctcgcgcctgccaagctggccttggatgccgcccagggcgatgtccgcaagttggaggatcaagcttcgctgctgcagcgcgtcgaagaactgcagttcgaggagattgatctgccgggcgccgagcgtcagctggagtcgctgcgtgctcagctggacaccctgacacgccccgactctgacctcgcccttatcaaggctgagctggatgaagctgaggcattgctggactctctggatcgacagaggcaacaacttatcgagcagtgcggtcagttgaaaattcagttcgagcaggccgcatccgctacccgtaaggcttatcgcggcgccgaaaaggggctgagcgatacgcaacgtgagttggcgctagcgcacttcccgacgctgagcgctgctgacctcggcgatattgtcgagctggagcgcaagcatacgcatgagcttcaagggcagctcaaagcgctgggtgagaaactgggcgatcagaaatccgagcttgccaaacgtatgtccgacgccctgaaggttgacaccggtgcgctgtcagaggtcgggcgggagctggtggacgtaccaaagtatctggagcgtctacgtgtgctgaccgaggaagccctgcccgagaaactcaagcgcttcctggaatacctcaatcgttcctcggatgacggcgtcacccagctacttagctatatcgaccatgaagtctcggtgattgaggagcgtctggatgacctgaacagtacgatgcagcgtgttgactttcagcccgggcgctatctgcgcttggttgcgacaaaggtcatccatgcaagcctgcgcaccttgcaacaggctcagcgccaactgaactcggcgcgtttcatcgatgatgaaggcgagagccattacaaggcattacaggagctcgttggactgctcaaagatgcctgcgagcacagcaggaatcagggcgccaaagcgcttctggatccgcgcttccgcctggagttcgcggtctcagtgattgatcgagaaagcaagagtgtcatcgaaacccgaacaggttctcaggggggtagtggtggcgagaaagagatcatcgcctcctatgtgctgaccgcttccctcagctatgcgctctgtcccgacggcagcagccggccgttgttcggcaccatcgtgctcgacgaggcgttctcgcgcagctcccatgcggttgccggtcggatcatcgcagcgctgagggaattcggcctgcatgctgtcttcatcacgcccaacaaggaaatgcgcctgttgcgccaccatacgcgttcggccgtcgtcgttcatcggcgcggcgtggaatccagtctggtttccctgagctgggaagctttggatgagcatcatcaacagcgtagcaaggccatgcatgaagtcgcccactga

SEQ ID NO: 341213 - DNA, 222 bp, Pseudomonas aeruginosa
atggcctgggcgaatgagcgcgccgagggcgtgatcgaggaagcgatcgtcgctatgcgtcggtcggtgatcccgcgccacgaccagttggtatggcgcggccagatcgagatggcctacacgctggacgccataggcacccggcaatacgacgacatgcgccgccggctcgacgccgcagcggatgcgagacagcaagaactgaggagcatcgacctatga

SEQ ID NO: 341214 - DNA, 1743 bp, Pseudomonas aeruginosa
atgcgcataacgaaactcgaaatcaccaattttcaagggctgcgtcatgcggcccttgatgtttctgcgccggtgctcctggtggccggccataacggcgccggcaagagttcgctgctggacgccatcgccatggccttcaacggccagccgcgccgcgtctcactgaagaaggagatggacaagctggtaaccgagggcgccaagaagggcgaggcccgcgtcgagtggctggacgaggccggcgaggtgcaggcctgcggggtcgcgctgcccagcggcaaaggctccccgctcgccgactcgccgttcctgccatacgtgctcgacgccagcctgtttgccgctctggacgccaaagatcgccgccgggtgctgttcgacctgaccggcgccagcgccagcccggccgaggtcggcaagcgcctgaaggccaagggcatcgacctggcgctgttcgagaaggtgaagcccctgctccgttccgggttctccgccatggtcggccaggcaaaggactacgccagcgaagcgcgcggcgcctggaaagcggtcaccggcgagaactacggcagcgagaaggccattgactgggcgccggaactggtggccaccgcggtgaccaacgaccaggtcgaggaagcccgtaacgccctgcaggcgctcgaggacgatctggctgaagcccagcagaccttgggcgccagcaagcaggcccgccaggccgccgacggccgcgcccagcgcatagccaatctgcgcgagctggtagacctggagccgcgccgccgcaacaagctgagcacggacgagcagaaccaggacgagtggtccgagaaggtcatggccgccgagctggcctcgtccggcagcgtgccgcaccagccgctgacctgcccccactgtcagggcgcggtcgacctgcaggccggtgctctggtggtgcatcagccgcctgagaagatcgctgacgccgaggcagccaagcgtctgccggaataccgcgagtatctggccagtgctcagcgcgccgtggcgaacagccagcgggacctggacgagtgcctggccgccgccgagcagatcaaggccctggaaaccgagtccgccgacgcgcccagcgccgaagcgatcgccaacggcgagcaggctatcaacgaactgcggcaggcccgcgacgcgagccgcgcgaagctggtggcccttcaggaagccatggaagcggctgcccagcgtgaggcctcgatcgcgaaagcgcaggccgcgcaccgggatgtggtggcgtggaccggcatggccgacgcgctgtcgccgaccggaatcccggctgagatcctggccgacgcgatcggaccggtgaacgaactgctgcagcgcctatccggcacagccggctggtcgccggtacagatcagcgccgacatcgatgtcacgttcggcggtcgactgtacggcctgctgtccgagtccgaacgctggcggtgcgacgcgacgctggccctgaccatcgcgacgatctccggcctgcgcctggcgctgctggatcgcctcgatgtgttggacctgccgagtcgtagccaggccctgacactgctgcgtgccgtgaccatggacaaggaaatcgattcggtgatcgtcgccggcacgctcaaggaggcgatggcgaagacgccgacctggctacaagcggtctggatcgacgccgggcaactcgccgaccagcagcaacaggctgcggcctga

SEQ ID NO: 341215 - DNA, 1344 bp, Pseudomonas aeruginosa
ttgagcattaatgtattagaagatcagcgcctggtcagcgtagttggtcataatagccctactagcaccgagtccagtaatgtgcccaattactcttggagcgctgaatctattctacaccagcagctagggctatcctgtctcgacgacgatgaagtgcttgccctaatggctctgagcccagcagagcgaaagcatcaaggagtcttttttacacctgccgaattatcaaaattagcagtagagaaatttggctactctttgaacgaaggcgcaatactcgacccagcctgtggatcaggaaacctacttgcagccttggccgcaacccttgaggtattgccaagtttagaggccacattagcagaatggaactctagactacatggaatagatataaacaatgacttcgtaaatattgcaaagaaaaaactagtcaaattagctctaagcaaaggagccgtaccgtccggggagaagacccccaaagaaatattgtcaatactctcaaatattaaagccggagacttcctaaaagaatacaagtcttattgcggtaaaattggaggagtcataatgaaccctcccttttgccatatagaggctaacaatgagattaactggacctctggtaaatttaacgcagcatcacttttcgtaatttatgcaactgaaattctagcggctaatggtaaatttttagggattttgcctgatgttctacgcagcgggacaaggtatgcacaatggcgtagcctcatactgaaaaaaactgaatgcacaatggaaacatttggaaacttcgaacctggagtccaagttgatgtatttattttgcaaggcaaaataaatcatactcaagaagaaaaaaatgccgagcaagttgcagccaacgaaactcccaccacgttattgatggatgaatttaatgtttcggttggcccagttgtacctcacagagataaggttactggtatagaagcgccttttgcgcacgcaaagattctcccagcatgggaaaccgtggatttcttgcccgagcgcatctgccacgccggaagaaaagttcaaccaccgttcatagctgtcagacgcacctccagccctaaggatagatttagagtagttggcacagtagttaactgttcagagcccgtagcggttgagaaccacatcataatactatcaccaaaagatcgaagcttactttcttgccaaagaactctagaactcctcaaaaccgagcacgtaaataactatatcaatagtaaaattaggtgtaggcatctaaccgtgggcatcatcaaaggaatccccatagggagagcggctgatggaaattag

SEQ ID NO: 341216 - DNA, 2244 bp, Pseudomonas aeruginosa
atggaaattagaaaaaagataggcgatcaccctttcactgtagaggcccgggtcgcaattcagttaggccgtgaaagtatatccagctcattagtggccataagcgagctcgttaaaaacgcttatgatgctgatgcagaaattgttgaaatatcatttgaggggcttgaaacagagacccccacattgaccattactgatgacggtgatggcatgaataaagatctcctgctcacaaagtggatgcgtataggcacaacgcataagagtgtatcaggagtaagcaaaaaaatgcgtgtatacaccggcgccaaaggactaggccggctaggcatcgatcggctctgcagccacctgacgctttatacaaaaactgagacttgtaaaaatatctatgaagtagatatacactgggacaaatacaaccagatacaaagcgcagaactagacagcatcagacatgaagtatttgaaatagatgcactcactatgccccgcatagatttccctatcaacgaaaaagggaaaggttcaaaatacatcctgacagggctaaaagaccattggacagaagaatttcttgaagagcttagaaaagagctttcgctacttgtctctcctttctcaaggaacttgggttttaaagtaaaattcagtactaatggtagctttccaaatcttgatggttttgtttcatccgagcatttccttgaggcagcggagtggcgcttagagtcatctatctccgcgagcaatgaggttctcgtttctatatatgacggcaaaggtgaattaagcgaaccatcttcacccgttagctgggaaagctggatgccgggaggagaaaaagtaccccgctgcggcccattaagcttcactttgtatttcatgagaaatataaccagcagggaggttaatactgacaaattcaaacctaaagacattagaggatttctgaagagcaaccagggcgtcagaatctatagggatcatttccgagtcaaaccctatggcgaccctagtggtgaaggggactggcttggattggctatgcgacgggtaatcaatcccgaaagtataaccatggacaactggcgtatcggctacaaccaagtagtaggcgcggtgtttattggacgtgatcaaaaccccaacctcgttgatcagacaaaccgagaaggcctgactgagactccggcctactttgagctacgtaagttcaccctaaagtgcgttgagcttttcgagaagcatatccagactaaagccagggaagaaaaaaataacaagccgccaacggttgggctatcggagcatgtggacaagagcttcaacacatataaagacgtaatcgaagcaattaaacgcattaagtcagaatcaaaccaagttaaagtcaagcaacagctcgaagaaatcgaagcgacattaaacgaagaaagcgaacgcaccgcacgcgttaaagagaaagttgatcaactggaagctgagaaagatacgctggcgaatctagcctcacttggcattctatctgtatcgtttggtcatgaaactctcgctgccatatccaatgcgatcactaatggctcgctactgagaacaagggtcaacgacggcttttttatgctccccatagatgttgtcgagtttgcaaataaaagatttgaccaaattgaaaaatcgctaaactatataaagatattcggaaatttctctctaggaaatgttagacgagacaaaagaacacgcaggactttcaatctagcaacagtcgcttcaaatgtaatcagcagctttgaagatgtgctggcaaatcgaaaaacaacggcagaactagcaacaattaactcttgcccaccattgataagagcttttgaaatagattgggagagtatatttgccaatctgataaccaactcttgctgggcacttctagacactccagcaagtgaaaggaggataaaaattaccgtcactgtagaggagagcgactgcataattttctttgaagatagcggctgcggcattgaagcgggagtggagccccatattttcaaagcaacattctcgaccaaacgcaaccaaaaaggtgacacaatcggaacaggcatggggctatctattgttaaaacttttgtggaagagcattccggtggaacaatagaactcacgaacaaaggagagctgggcggggctcgattcctaataaaggtaccacttgctaaatccggagctcaagaatga

SEQ ID NO: 341217 - DNA, 630 bp, Pseudomonas aeruginosa
atgaaaataatatttgtcgatgaaaatgaagaccaacgcgaaacttactccttaatgctagaggattgtttccccaagggagaaggggcacctactgttttgggagtcgagccaaaacctcatgtcggcgatatgagttttttagtcgaagacccaagtgtagtagcaattattcttgacgagcagcttaaagaatcaggcgtagcacaatactacggcattgaactcgcatcatatcttcgaacattaaatagcaaaatccctctatatattcttaccagctttattgattcagaagagctcttagatggggagatgcaagtcgaagacattctaaacaagcaggaccttgccgttaaaaagcatgtggttggcgcacggatactccgcagaatcgattcatacttagaaattataggtaatcgaaatgtgcgttttgaatttcttctaagaaagtccataagaggcgagctagccgaaggtgaaacggaggaactcaagaaacttggctacctgagagactcctcattcgagatggaagaaataatcagcagtgaaaagctaaagaaacttgaagccctggaagaaaaaatcgccaatatagaaaatggactttctaaaagatcatga

SEQ ID NO: 341218 - DNA, 642 bp, Pseudomonas aeruginosa
atgaaacatctattttttcccagaatcacccgcacacagaattacagaaccaaaacctgcggagccttttatggatactcaacttacagagaagcaattcacacagattgccaaaacagatgtgtctattgcgatgtaactttagaagaaaacggacacgaaggatttgcacttgaccatttccgcccccaagagcaatttcctgaactaagggacaatcccaataatctaataatagcctgtggaaaatgcaacagaaacaaatcttcacactggccggcgggtacgaatacaacagctactcatgatggagtagtaggctttatagatccatttgagtgtgacagacatcaatactttcaagtggagccggcaggaactctttctccactgcaagggccatctacctatctcattgagctccttgggctcaatcgtgccagtcgaatacttgtaaggaagcaccggatacttgatgacaagataaccggtcttatttctatggcagaggagagcattgattgtgctctatcgctactggagaagggacaagaaacagagcttgctatacaaaagcttaacgctgcaaaagcagcaattgctagtatcaaagagattcggaatgaaatccacccgatgtag

SEQ ID NO: 341219 - DNA, 732 bp, Pseudomonas aeruginosa
gtgattacatcggaagttatcataggaaagattgtcgaatttatagtggggaagtcgctatctgctgtcggaaagctttcaatgagcaataggaggaaggcatgccgctctctaactaaactctattattctctccaggctctcgaggatgtgactgagtctatcttccggaccgtaagtgattttcgaggaacagaaactggcgaagctttcgcagtgatgaatgctttaagtaatcacatgcatgaactggcgctggctagcaatatgttcgtggatcttggatatgaactttacgcaggacttgagatcgttgatcctgcgctcgccgcatgttgtgatgcgctttacattagtaagttcggtttccttagcgagatgtctgatacggttgtatgggatcgaagcttagctcgtgggcgaattattgtgaaaatgcctaagagaaccacgagcgaagaagttttaaatttaaaatatgttgaggcctctgttgcgttaaagaatggtgaaaagcattactgggctgatacctgggtcgaggcggacgggccacacgaagtgctccttacttgggaggaccatgatgcggcacgggccttcctgaacaggctttctgaacatagagacacgcttgccagcgcgaagcaaaagcttcgagagctcctaaaatccagttttaatatagaggaactcctcttccaaacagacgcgcacccctatcgctattga

SEQ ID NO: 341220 - DNA, 651 bp, Pseudomonas aeruginosa
atgccattaacatctgcatacgactgcagtggaattacaaaggattctgccagactgcaagcctcatccaacttttcccatacatcaggcagcacctcaaattctttttcttggagcctcagcgttccgttcagcatcgagtcgattttcatctgtaaccgttggacttccttagtctgctcatgtctcaactgctccaagttctttttaaatttattttccagccaagcagttccaagaaacttaaaaatagcaaaagaaattgctgaactcccccctccatacagaataacttttccaaccatttcatatagctgctccactaccacccccacgcgctatgtcacagaccaaggctcacagacattagtcgtaaagcttttgcacatcactcccgccccatctcccataactactggaggcaagcgaggtagtctagatattcctagctggaaaactacttcgcgggttttccagcctacatggagcatacggctgcgtagagtgggaaatgcttttcttgtccccagcttttctgcaaatgcccccgggagttacctggcatccgctttgagtagcgcttctgccaagcctatgcgtagcccaaagccaagcaaacccacatacatgaactacagcacctacacttag

SEQ ID NO: 341221 - DNA, 2022 bp, Pseudomonas aeruginosa
atgattgaggacagcgtgagcgaacccggccggcgcgacggcggggatgccgggaagcgattggcctggctgcagcggcaggtcttgccggtgctggaggagggggacgcggtctgggtttccgggctggacggcgcgccgttcgccgggggcgcacacaaggtcgtcgaggcttccgccgctggcgagctgcctggcaacgagcgtttccgcctggcttgcctgggcggggcggtgggaggcgtggcggacgactggcaggccatgcgcctgctcctgcgagcggtggagagcctggaggatcgcggctggctgctgctggaggaggttctctcggtatgcgccgcaggcgcttgccggagtccccaggcgcaggcccgcctggcgctttccctgggcttgcggcaggtcgcggaactgcacctgggcgcgccggacgacggcggacgccagcgggtgctgcaactgttccggcaggacctggcggttgcgcgcatgcagcgctactcgggcctgagggtcgcctgttacggcaacatgcctttccactaccgctcgttgcgtcctttggccgagtgtttcgaggacagcctcctgagcctcgacatcgatgaagtcatggcctggaaaccggacgtgatagcggtggccgacggctggtcggtggagttctggcgcgactactgcgatgcgcacaacgtattgctggtcggcatgcgccatggctcggtcacccgctacggattcgccgagggcacctaccgctacgccgactatctgtgcggcagcgcctgggacatcgacgacaccctggcttcctcggtgatgccgcgcaacggtttcctgctgaccggcaacgcctggtgcgacgaggtgttccggctgcccgcgagaaccccggcggagaacgcgccgaccatcctcttcgcccccacctacaaccccgagatcagcgccgccgtccacctcggcgagcgtgtggtggcattgatccgcaaggtctatcccgcgtcgcggatcatcatcaagccgcatcccgccatcgtccagcacgaacatgcgttcgtcagcgacaaggatctgttccgcgacctcatgaagctctggcgcgaacagtcacgcacggacccgctggtcactctggtggacgaccccgaggcgagcatcgcggccagcttcgccgaagccgacattctgctggcggaccgttcttcgctgatcttcgagttcatgacgctcgaccgaccgatcctgctgttctcccgcgaacagcggatcgcccgctgggcctacaacccggaggctccagggaacgcctggcgcgatatcggactggagttcgccgacgacgagcaactgctcgacctgctggccaatgcctttacccggcacgcggagagtcgcgatacccaggagaaccgcacgcagcagctgtacggccggtttcgcgacggacgcagcgtccagagggtcgccgcagcgatcgccgaggcgccgcgcttacagatcgtgctcgacgcgcgggccgctgcggatggcgggcagcgcctggccgaacattatgcggcctgcttcgcccatcgccgtatcgacctgatcgctccgtccggcgcggcattgccggccgacgtgcggcgcttcgattcgtggcgggcctggtgcgacgcggaggctgccacgctcgaacgcagggcttcggcggtgcttctggtggaagacgatggccagttgctgccgggcagcgcgcatcaggtaagcgcgctcctgccggccatcgccatgggccagttgcggcatgcccggctggcgttggaggagcgcgaggccgggcccgctggcgaaaccgactggagcgcccgccgcctgcacaggttgctcgcgcgcctgcagccgaagccggcctggcgcccgcgctgttgcgcgaggaactggccgacctgccggacgaagcggagcagccgttgtggctgcgcgccgtggcggcagccgaggcgccggtcgaatggcccgtcgggcagttga

SEQ ID NO: 341222 - DNA, 663 bp, Pseudomonas aeruginosa
gtgtcgcctattgaacatgctgtgatcagcgcggcgggcatcggctctcgtctgggactgaacaaacccaagtgcctggtcgaggttggtggcaagacgctgctggcccagcacctcgagcgcctggcggagatcccgaacgtctgggtcgtggtggggttccaggaggaactggtcatcgagcaggtgcgcaacctgcgcagggacgcgatcatcgtgcgcaaccccgatttcgaccgaaccaataccttgcagagcatccaccgggtttcgcgctatctcgaccggcgcttcctcgccgtggatggcgacaccttcatcgagaatcgctcgttcgaacgctttctccgcgctgccgccgggcaggcgggcctgatcggcgtctcgcgctacaccaccagcgatggcgtgcgcgttctgctggacgcgggtggcgaggcggtcaccgctttcacccgcgagccgcagcacgcctacgaatggacgggtatcgcgattctccggccggacatggtggtggaccggccgatatacgtgtaccaggcgctcgaaccatacctgccgctgcccgcgcaggaactcgacgccttcgacatcgataccgccagcgacctggatatggcgcggcgcgtgcacctgaataactggaacctgaatgattga

SEQ ID NO: 341223 - DNA, 1320 bp, Pseudomonas aeruginosa
atgcgcatttcaacgatccaggctttcaacaactcggtcagtggcatctcccgcaactatgccgacctgacgcgcacccaggccgaaatcagtgccggcaagcgcctgctgaccccggccgacgacccggtcggcgccgtccggctgcttcagctgaaccaggagcaggcgctcaacagtcagtacaaatcgggcatcacggcagcgaagaacagcctgcagcaggaggagaccatcctcaattcggtcggcacggtcatccatcgtatccgcgagatcgccgtgcaggccggcaacggcggcctcgacgcctcggacaagaacgcgctggccaccgaactggcgcagcgcgaggacgaactgctgaacctgctcaacagccgcgacgccagcggcaagtacctgttctccggcagccagggcgatacccagccgttcgttcgcaacccggacggtacctactcctacaacggcgacgaaggccagcgtgaggtacagatcgccagcagcaccttcattgccatcagcgacaacggcaagatccttttcgaaagcggcagcaacgccaaccgggtctccaccggcaaggacgccgcaggcctggacgccagcggcaaccccagcgacagcagcatctccctgggcctggtgacggacaaggaagcctacgacacggtgttcccgtcgagcacgccaccgctggccagcgatggcgtcggtatccacttcaccgacgcgaagaactacgtggtctacgacctcaagacgatcccgccgggctacgactggagcaccagcgaccccaacccgccgagcttcgccacgctcgccagcggcaagatcgacgacaacgcccagaccagcgacttcatcaccttcggcggcgtcaaggtacagatcgacggcgagccgcagggcggcgacaccttcagtatcaagcgccagccggaccaggaaaagcgcagcttgctcaataccgtgtcggacttgcgcaaggccctgctcagtgccgaggacacgccggctggaaacctggctatccgcgacgcggtgggggtggcgatctccaacctggactcgtcgaactcgcaaatcctcacgggccagggacgcatcggcgcgcggatgaacgtcgccgaatcgacggaaaccttcatcgacgacgtgaccctggtgaataccgccgtgatctcacagatccaggatctggactaccctgaagcgctgtcacggctgaccctgcaatccaccatcatggatgcggcgcagcagagtttcgtcaagattcgcggcttgagcctgttcaactacctgagttaa

SEQ ID NO: 341224 - DNA, 504 bp, Pseudomonas aeruginosa
atgtcgatgcttacccaaggaactcaggtctatgcccttgttccgccccgctctggatctggtccttttacggtgatggagatcgagtgcgcaacctccttcaaccccggaggaaacccggcggatcagatcgaggacccgtgcttgagcgagacctcgcgcaaatacaagaagggcatgcgtacccctggtcaagccactctcggactgaatgcagatccgcggaatgcgagccatgttcggctctttcagctctcagaggatgacagtgaccaggatattgtctttgctgtcggctggtcagatggtgtcggtgtaagcccgtccgcagaccaagacagcaatggagactgggactttgatcttccgccgacgcgtacatggttcgttttccgtggttacgtcagcgacttcccgttcgattttgcagccaacaccctggtcgccacccaggccacgatccagcgctctggcgcagggcagtggattccgaaaaccgcgtaa

SEQ ID NO: 341225 - DNA, 588 bp, Pseudomonas aeruginosa
gtggctgaactcgctctcatccgcacagcccagggcctggtcccggcgaccgaggcagatcgcgaaaccgttcagaagtggaaggccggccaggtcgtccatggaaaattcactcggatgcgcaacgccaaattccacgggaagttcttcgcgatgctggatttggcgtgggagtactgggagccgaaaggcgggctggtgccgcgccaggagatgcgcggtatccgcgggcttgccaagtacttcgaggatctgaatggccgccctggccagttgcagaacgccgtcgctgcgtatatcgccaagcttgaggctgatcgcgccgaccgcttccccgcagtcgagaagagccgagaggctttccgggagtggatcaccatcgaggccgggcacttccacctgatccacacgcctgacggcgttcgcaaggaagccaagtcgatcagctgggccagcatggacgatacggcctttgagcctctctatcgggatgtgttcgcggcctgctggcggctggtcctttcctctcacttcgaaaccgaggctgacgccatggcggcggctgatcagatggggactttcgcatga

SEQ ID NO: 341226 - DNA, 465 bp, Pseudomonas aeruginosa
atgaaaacgcccgtactagagacccgcagaaaggtaatgaccacggtagccaatgcctatccgggcggtcgcgattgcgctgctgcgcgactggggattccgctgaagcgcctggagaaccagatgtacgaaacggcgggcgtgaagcccctgagcgacggcgacctgtacgtcctggagcaggagatggggacttcctatctgccggactacatctgcgcgatgtacgggggagtgtttgtgcggacgccggaagcgggcgatctggacaacgtagacctgcaccaccgttcgctgcgtacagcggttaagcgtggacgggttgatcagatgatcgctctgtccctggaagacggggagatcagcgccgatgaggcgaaggaaatcttggccctgcatgccaagcacatggctgcccggcatgaagaggttcgagccgtgctcgaactgcacagggcgaagtga

SEQ ID NO: 341227 - DNA, 1050 bp, Pseudomonas aeruginosa
atgagcgccgagaagaccgagcagcccacggcgaagaagctgcgcgacgcccgccggcaaggccaggtggtgaagagcaaggaaattgtctccagcgcgttgatcctgtcgctggtggcgctgctgatgggcttttccgactactacctggagcatctcggcaagctgctcctgctgcccgccgagtacatcgacctgccgtttcgccaggcgctggagaccatcctggagaaccttctccaggagctcctctacctgctggcgccggtcctgctggtcgcggcgctggtggtggtgctcagccatgtcggccagtacggtttcctgctcagcctcgacagcgtcaagccggacctgaagaagatcaacccggtggagggcgcgaagaagatcttctcgatccggagcctggtggagttcctcaagtcgaccctgaaggtcgccctgctctccctgctggtctggttgaccttgcagggcaacctggccagcctcctgcggattcccgcctgcgggctggactgcgtggcaccggtgagcgggctgatgctcaggcagctgatgctggtctgcgcggtcggcttcctggcgattgccgtcgccgactacgccttcgaacgccaccagcactacaagcagttgcgcatgagcaaggacgaggtgaagcgcgagtacaaggagatggagggcagtccggagatcaagagcaagcgccggcaattccatcaggaactgcaatcgagcaacctgcgcgcggatgtccggcgctcctcggtgatcgtcgccaacccgacccacgtcgccatcggcatacgctatcgacgcggcgaaacgcccctgccgctggtcaccctgaagcacaccgacgccctggccctgcgggtccggcgcatcgccgaggaagaaggaatcccggtgctgcaacgaattccgctggcacgggcgctgctgcgcgacggcaatgtcgaccagtacataccggcggacctgatccaggccaccgccgaagtcctgcgctggctggaaagccagcagacggatacgccctga

SEQ ID NO: 341228 - DNA, 309 bp, Pseudomonas aeruginosa
atgaacctctcgacgctgctcagcagtctgacctcccgggtcccgggcgaagacctgaccgataaacagattctctccatcaagtcagacctgggggcggctcggcaagcggctcagaacatggcgcttggtgtcgccgcggtcgggaatctgctggcgaacgttggcgctgaaggcgaagtcggccaggaaacctcagagcgtctcggctggtttctggaggagatcggcggggccatcttcatgttggttgagctcgagcaggtctgcacggatcgcatcaaccggcagaaggaggctcagcaatga

SEQ ID NO: 341229 - DNA, 801 bp, Pseudomonas aeruginosa
atgaaagaaaaattcaagataaaagaaaaatcaatctggctatgcctcgcaatcattaggtacgaactaatagcctttgacatttccctatcccaaaaaaaggaagaactacaagatttaattaattggctacgccacaccatttcttcatttgtaactttgaacaacctatatgatatagcaaaaacaagccaaataagcaacgacccaaaattctgtaaaaaaacacgtaatctcagaaaaaatttagaattcataaatcatataagaaacaaaaccgccggacacatggatcctcatctagtggagagagctgttcagtggacaccagaaatatttctagcttcaacagaaacagaagacaccgcagaagccctcaatcaccggattttttattgctacaaaggacttctagagtccgcaataaattcttttctttcgaaagataaaaggcaaaaaatatttaatcatgaaattgatatatcctaccctccagaccagaaagagttctatatctttttaaaagacataatcactatttccattgaatggatagacacggcaataccatttattgaagcaaatggaatctttcatgaaaggtcagctattacggagcttggatgccttgcagggcaaacaaattttgacctaaaatcaaaatccagttttaattttgacactgtctctatcgaggcaaagctagaacacttaatcagcgaattagaaatagacgaagatcaaaaggagattttaaaaagcctgaccaactcccttaccaaaaagaccaatcacaactaa

SEQ ID NO: 341230 - DNA, 231 bp, Pseudomonas aeruginosa
atggtcgggctgcgccacttcgagaggacattcgagctccaagtttatggtcccggggtgacagtctgcgacctcggggaagtccttgctgatcagtggcaactggcgagcgagggttccctgcgcgacgcccagaccgggcactatccgcgctctgagcgaatggagttgctcagttttgggtgtagtggccaacaactcgtgaaggttgtccaacagagcttctattga

SEQ ID NO: 341231 - DNA, 879 bp, Pseudomonas aeruginosa
gtggtcctcaccgccttcgataccctgatcgtgctggccctgcagggcgccaacttccgccgcctggaggccatagtgctggggctgatcgcgaccatcggcgcgtgtttcttcgtcgaactggtgctgatcggcccctactggccggatgtcgccgccggcttgcggccgtcctgggacacgctgagcagccaggagccgctgtacctggcgatcggcatcctcggcgcgacggtgatgccgcacaacctctacctgcattcgtccgtggtgcagacccgggtcagcggcgacgacgcggcgagcaaacgctcggcgatccgcttttcccggctcgacaccatcggctcgctgtccctggcgctgctggtcaatgcggcgatcctgatcctcgccgccgcggctttccacggtagcggccataccgaggtggtggagatccaggacgcctaccacctgctcgacccgttggtgggcggcgccctggccagcttcctgttcggcttcgccctgctggcggcggggcagagctcgaccttcaccggcaccattgccgggcaggtggtgatggagggtttcctccgggcgaagattccctgctggcagcggcgcctgatcacccgcggcctggccctggtgccggccttgatcggcgtgctctggctgggcgaaggcgcggtaggcaagctgctggtgctcagccaggtggtgctcagcctgcaattgccgttcgccctgtggccgctgattcgcttcagcagcgaccggggcctcatgggggagttcgtcaacccgcgctgggtcagcgcgctggcctggtcgttgttcggcctgatctcggcggcgaacctgaccttgctgtatttctggttcggctga

SEQ ID NO: 341232 - DNA, 561 bp, Pseudomonas aeruginosa
ttgcagggacaacgcatcggttacgtccgagtcagcagttatgaccagaacccggaacgccaacttgagcaggtcgagatcggcaagctgttcaccgacaaggcctcaggcaaggacacccagcgcccgcaactggaggctatgctcggattcgtccgcgaaggcgataccgtggtggtgcacagcatggatcgcctggcgcgcaacctcgacgatctgcgccgtctggtgcaaaagctgaccaagcgcggtgtacgcatcgagttcttgaaggaggggttggtgttcaccggcgaggactctcccatggccaacctcatgttgtcggtcatgggtgcctttgccgagttcgagcgcgccctgatccgcgagcggcagcgcgagggcatcgccctggccaagcagcgcggtgcctaccggggccgcaagaaagccctctccgacgagcaagccatcacgttgcggcagcgggccgctgcgggcgagccgaaggctcagctcgcccgcgagttcggcatcagccgtgaaaccctctaccagtaccttcgcacggacgactga

SEQ ID NO: 341233 - DNA, 1875 bp, Pseudomonas aeruginosa
atgattttggctaaggatgttagctattatcaacaagaagcactgagaaaggctcgtgaaggtcacacgcacctgcctatagcagtcaccgctacacggctaggggacgggacatacaaagtcttaagttatctcgcggatgacgtttggcgattcccaaacgcgatttttccaccagggactgctgaccacgataaatgcattcgattcggtaagattccagagcgttggcgctcagttctgaaaataattatgcttgaatactatttaaacggcatagagggccgggtgcgaccagtcggatcttcgttaatttcttttttcaaaaatgtatcattatttttgaagtttgctggtgtttatgtcgagtgcttgtctgaaatttcagaatttctgtgtatgcagtatgttaattatttaaaaaatagtagaagtagatctggtgataagttttctaagtcctatctttgtacgcgattgagctcggtgcacacactgcatctgctcagtaaagttactactactcccatggtgcacccttggcctgaaagtagcgcgactgagttgtcaggcgcaaatcgtgctcactgggcccaatcaaagaccttgccaattccagataacaagctcgcggaaatttttcgtgcggctgtatcacgtctagagcgcgcagacgagacattagcgcttgcggaaatggtttccgattggcaagcccaatattcctattctggcactgtaaacgcaaaacttgcggctacgggataccggggtggcattttagggttgagacttgagaaaaatctcctgctagatgcctgcagtatcgtcattcttctaacgagcggtataagagtttcagagctcatgagcttaaaagtaggcgctcactacgtacgtgatggggaagatggtactaagttttactggatgtctggagtatccacaaagaccaaagagggtaaggtagattggctagtcacaaagcttacccatgaagcgctagatgttgcggggaaggtcaccgcagagattcgtgccgagctaaatgatagatacagtttggctaagtcggcaaataatctgatagagatgcatgattatgaagcgcatctcgattctttgttccttgggtggggagggcatgcacataaactccaagtttttgctgcacaaaccattagggcaagattaaagcggtttatgctggctcataatattgactgggaggtcgcgccacaccaatttagaaggacgttcgctcgatatgtggctcgcagtcaactcggtgatgttcgttatcttcgtgatcatttcaaacattggacgctggatatgactgcgatatatacagaggatcaagttagagataaagagctgtttgatgaaatctatgttgcaatgcgtcacgaaaagatgctggtgcttgaaagtgtttttgaagaagatgcattagtttctggtggtttggcagagaccattcgtatttttcgatcctctgatgaggcgattcggacttacaaaagccgccgtgaaatggttcagtttgtatcggaggttgtgcatctgagaagtactggtattgcatggtgtactgcagatagtacgggctgctccggtggcagtgtcttggataaaactcgatgtggtgattgctcgaaaagtcttatcgatgaatcgcggctgccacattgggtaggcatatatactcaaatgttggagcttaaagctatcgctaatgactgtggtccaggtgcgggtgcacgaattgacagcgatattcgacggtgtgaagtcgtccttcaagagcttggagctgatattgaggagcttaagctcggtgttttacttgaacgggggcttcgtcatgcataa

SEQ ID NO: 341234 - DNA, 1608 bp, Pseudomonas aeruginosa
atggccaaaaaagacgttaagaaaagggatgattttagcccggcgacaattagaaaaattaaagaaatgtctggcgatgtgtgctctatgccaagctgtagagtcataactggaggatcaaagaagcttcgtgacaactcattcagcataggtgtggctgctcacatatgtgcggcttctcctggtggtcctcgctatgatctgagtatgggtaaggaagatcggaaaagctatgagaatggaatatggttgtgccaaacacactccagaatgattgatgttgatccagctagatttcctgttgatctattgaaagcttggaaagaagaagctgaaaggtggtcgatgactaatgtggggcaaaaattaattagtcagcttgatcacgataatgctattaggaaagctgttggacgttctattgctgaatttgtaggcggtggtgattctataaatgcccctgtccaaaatattattcttggttatgaagaagggttgaatgaactggactcaagatttgttgttaaggttgcgaggaaaagtgatggagttctagagcaccagatattttcaaggcctggtgaagatgggaggtttaagctaagtataaagaaatctgaaaatatagaagattcaattagacgcatggtggaacgtggagaaaaagcctgttttgaccgtgatgattttgagttctcggggtcaaaattatttgaagaaatttctaaggggaaaggcggtcgattgcatgttggggtagagggtaaggaggttgagctcgttatttatctggtattagaggatggtgatgaggaggagtttgctaattttaaatctgttcaagtgtcagggactaagtatggaaaaattactggccaagctttttctgggttgctgtcggtgaattttgagttttctttgcttggggatcttccaaacctaaatattaattttaatcctaatgtttggattggtcaggatgttagtagattggggtatttttctaatattaagaagattgtgaagcatcttcgcgggggcggtgttcgtaagttagctactgagatagttagagataagcaggcgtatagaataggtcttggaaatatagaggatgcatcacctttcgttgaggcaatgacttggcatgttgatttgctaaatgcagttcgtgtgatttcggatgctgtttttcagccgattattgttaaggacttcaatatctcagtagaggatgaggagacactgtttagatatgcctctcttttggagggagatattgttgagactgtaaagcctggtcacgagttttgtcgtggtgtttttacgcctgagggttttaaaaattatgatgagatgccgcataaggagaatgaattttccgtacgattcgtggaagatgatggaaggttttttaagttactcggaaatgaagtaaagccgccgcctgttgatgtgagtatcgaaaaatgtactgtgaataggtttagctatattgagggtgatgatgtcggagcagagggctttgtggtttacgctattgatgatactaagtgtgtgctttctcttcagaagagtcgtcagtgggtgttggattcaaaagattaa

SEQ ID NO: 341235 - DNA, 1782 bp, Pseudomonas aeruginosa
atgtctttgaataaaataggacaagtaatctcttgctcacccagctcaatatctatcgcaatcgatggattagagaaattcgaggaaaataagaaagacctacaaatagggagacttctaaaaatatcccaaggcaacagtgacttcaccattgctacaataagaaatataaaaggcattgatgcctatcaaaatgacggaactctaatctggcaattccaagtagagtgtcaagcaataggaacaatgagttccgaggggaaatttgaccgaggcagccttttattacccgtccccacagagcctgcatacatagcagaccacgacactatagaaaagcttttcgctgaagataacgagcatgatttcccactgggaaaattatctctaaataaagacatctctttaaagattaatggaaatcgattcttcggaaaacatatagcaattgttggatccactggctccggcaaatcctgcactgttgctaaaatcttacaagatgctgtcggaatttcagaatcacagaacaaaagcatcgcagctcaaaataattctcacattgtaattttcgatattcacgacgaatacacagcagcatttaacttacatgaagacgagaagttctcactaaaccgattagacattgactcattacaactcccctactggctaatgaactcagaagaactggagagcatgtttatagagagtaatgagtcaaattcacacaaccaagtgagccaattcaaaaacgccgtaactctaaacaaagagaagcacaatccttccctactaggaataacatacgatacgcctgtatattttagcatcaaggaagtctatcaatatattgaaaatctaaatcgagaaataattggccgactcgacggagaggactgccccaaacttgccgatggacaacttataaccaatcgatccgatttctattttgataaaaaattaatttttgttgccccatctacagcggcagcaacaaaagcaggtaatggcccattcaatggagaattcaacagatttgtatctaggctagagacaaagctttccgataaaagactgaagtttcttcttgatgcaaaaaagagcgacggcactccgtataaaaccgatgacttcacagatttaatgaagcagtttattggttacctgaataaatctaacgtcaccatcatagaccttagcggaataccctttgaggttcttagcatcaccgtcagcctcgtatcaaggctaatctttgacttctgctttcattattcaaaactacaacatgcaaagcagtctcttaacgacattcctgtaatgattgtttgcgaagaagcacacaattatataccaagaagcaatgatgtcgcttacaggtcatctcgaaaatcaattgaacgaattgcgaaagaaggcagaaaatacggtcttagcttaatgattgtcagccaaagaccatccgaagtatcggaaactatttttgcccagtgcaataatttcctgtcactcagactaaccaacgatgctgaccaaaattacgtcaaacgacttttcccagacaacactaactctattacggacatactgccaaatctttcccccggcgaatgtattgccgtaggcgacgcaatattacttccagcagtcattaaaatgccattaccttcgccagagccacactcatcaagcgtaaaggttcacaaggagtggaaagagaactggaaggatattaaattcgatgacgtaattaaacgctggagaaaagaacaaatttag

SEQ ID NO: 341236 - DNA, 1209 bp, Pseudomonas aeruginosa
atgtcgaggactgccgactatacgatccagggcttcctataccagttcaacaaaacccttcttgaaatactcaaatctcctgacgatgcgacaataaaaatagaaggcatagttgaagacattgaagtacatacgacctcaagcatagaggcgattcaatgcaaatatcacgaaacacaagataagttctccctaagcaccatatacaaacccctccttcaaatgatgcaacactttcatttgaacaatgacaaacaaataaagtacaagcttttctgtcatttcccattagaccaaaacattcaaatagacattaccaaaaccgatttagaaacaacattaaaaaccaaaaacaaattattcgaaaaatatgttgaagaacttaatggaaaagtagatctagacagctttctaaaacaattctctattgagataggctcttcattagaagatctaacaaaagaaattcacctagttttagaacagctaggcatccctgccgacgacattgaaatactcgcctaccccaacgcaattcagcacatagccgaattaagcattaagcatgactccgaagagcgaaaaacaacaagacaaaaaacagtaaaactcctgaaggacataaagagaacagcaatctcaaaatggactctcgcactaaaatcaaagagcaaactattaaaagaaagaagaaatcaattaaaacaaaacctggataaaaactctcgacttcgttacctgattgtcaacccagatgaagtagataatttcgaaaatgaattcgtcttattcatccaagactaccaagaaaaataccacttcaagcctgcacacacccaaacccccatcctttgcttactatcaacacctgatgaaaccaaagaaattcagctccggcttgaaatgaaaggtatcacatgccacgacggaataattgcagggattaaatttgatgagagtcgttttttcaaagatcctattataaaaaaaccaaagggagcagaaatgcaaagggagttcgatcttagaatcatatgctgggataacgcgactcaaactttaaataataggaaagccgacgacatttttgttatagccaactcgactcccaaagaactggacacaagagacgttaatgtcgaggttctttccacccgatccttacaagaaatcaagtacatgatggggataagccatgtctttgaataa

SEQ ID NO: 341237 - DNA, 204 bp, Pseudomonas aeruginosa
atgaaaccttcgcaatggacgcttcgctgggtgacgctctgtggctgcgggatgctggcagcttccgccgccgccgtggagttgccagggactgtacagccatcccagctcgatgaacgcttcaagccccgcagcgagccgcaggccaagcccgaggcgccgctggtggtgcccaagcaggtcgcgccgcaaggcagcgaatag

SEQ ID NO: 341238 - DNA, 1065 bp, Pseudomonas aeruginosa
gtgatcgccgacgccaagaccaaggtctatggcgatgccgatccggcactgacctaccaggtgtccgggctgaagaacggcgataccgctggcgcggtgctcaatggcggcggcctggttcgtgtctccggcgaaaacgtaggcaactatgcgattcagcagggtggcctgggtctggtcagcggtaactatgacctggcttaccagggcaacaacctgaccatcaccaaggcactgctcaatgtgatcgccgacggcaagaccaaggtctatggcgacgccgacccgagcctgacctaccaggtcagcggcctgaagaacggtgacagcgccggctcgatcctgaccggcgggctgaaccgcgacgcaggcgagaacgtgggtgtgtatggcatcaaccagggcggcctggtgctgaccagtggcaactatgacctggcctaccagggtaatgacctgaccatcaccaaggcgctgctcaacgtattcgccgatgccaagagcaagcaggtcggcaccgccgacccggcgctgacctatcaggtttccggcctgaagaatggcgatagcgccggtcaggtgctcgccggcgggctcggtcgggtgggcggcgaagccgtaggccagtacgacatcctccagggtgggcttgccctcaccagcggcaactaccagctcaactaccagggcaacctgctgagcatcctgccgctgccggtcacgccgggcgacctggggcaactggcagcgctctccgacttgcgcgaactgcagaaggggcgcgatccggatacccccggggatgcggtctaccgcaccaccacgctggaaaacccgttcctcgaaaacccgttcctgcgcgcctacgctctgggcatggacgtcagcgatcctaacctgctgccggctaccgccgcgggtccggcggaggacgccagcgccaagcgggtggggcagttcaccgatcgtccgctcagggcagaggccgagagtggggcgggttgctcgaaccagagctacctggccgactactggagctgcttcaacaagcctctgaatttctaa

SEQ ID NO: 341239 - DNA, 948 bp, Pseudomonas aeruginosa
atggatccgcgacccagaattcttgctgacgtagacctaactgaaagcaagattcatttctccaagaatccaattgttttactttgcgggggccacgtccctgaaaaagaacatgcggatgccgtcgatcctcccatccgttctctccgtgatgctttgaagcgcaaagcgctcgctttgctgaagactcctcatatcttcaggcctgaagaaattacgtcatggcatgaagatggagtctttcgaaatctaatggacttcgaggctgatcttgctagcatctgttcacttgtcgctattgctgttgaaagcgagggttcgattgccgaactaggggctttttctcagcttccagattttcagaagaaacttatagtatttgtgcctgaagaatatgcaggcgcaaagtcttttattaatcttggaattttgaggcatataaaagagaagcatggcacgggagtgaaaatttatccctggagcccgaggcgtccgctagagattccggacgatgttgttacagatgttatggaagacatcactgtagaattagatggcctaaagaagtcgcaaaatttatcactcgataacaatattcatgttgtagttttaatttacgaattgattaagttgtttgttgcgcttaaagagagcgaggtcattgagtccattaaggggttaggtaaagagatgcatcgcgatgatgtgcgacgcaaaatctttcttctgcaagaattcaaacttattagaaaagtcgaatatagtgattcgaccttttacgcatgcgatgatgagtctttccatactcttcgcttcgctctcaaatcaggcggtgctgttgatgtattaaggattagattcgaatgtattgattattacaaggcgacaccttccgagcgaaaccggaatagagcaattgatcgagccaggctgggggctgtgagatga

SEQ ID NO: 341240 - DNA, 954 bp, Pseudomonas aeruginosa
atgagcgaatataattttcgtgagcacctttcagatgagtttttgattgcccagcacgatgttgtccggctgctacttagagctccatatacctataagcgttatacgatccccaagaagaatggcggggtaaggcatatcgctcagcctgcgaaagaaacaaaaataattcagcggtttatgatgggtgaatggttttctaaactgccagtccatgagtgcgcagctgcgtataaagatggcgccagcattaaagacaatgctgagcggcatagtgggtctatatatatatcaaaatttgattttgttaattttttcggatctataactgaaggggatattaagagaatactgtctcggacgtttggggggcagttgtcagaaataagcatcgctgacatggcaagaatgagttgcatccgagacagagcaactggtcaattggtgctgagcataggtgcaccatcttcacctatactgtccaatgctgtgatgtttaattttgattcggtcgtgaatcagtggtgctcagaacgcgatataacatattcgcgttatgcggatgatctgacgttctcttccaacaagaagggaaatacgttttgtgtggaagagtttattaagggagcattgaaggaactatctgagccatcactatcgctaaattcggacaaaaccatacatgcgtcgaaaaaaaatcagcgccggatcaccggcctagttctgagcaatgatggcaaggtgactatcggacgtgatagaaaacgactaattagtgctatggttcatcgatttgcacacggtgagcttgatgataagtgtgttgcccatttacaaggcctgcttggttttgcacagggcgttgagcctttgtttatttccaggcttcgaagcaagtacacttcaaaagttattactgaccttatgaggttccgaagcaagaagctagattga

SEQ ID NO: 341241 - DNA, 1983 bp, Pseudomonas aeruginosa
atggcggattcttcaaatactcaaaacttgcagcaagaagatctcttctatgaagacagatttcttgagagttgggctggctctattatcactaatcccagcacggctattgttgagcttgtcgccaactgctgggatgcatacgccaccgaagtcaaaataagttggccagagccgaagaaaaacaagcaattttccatctctgataatggaaagggaatgacccgtgcagagtttgattacatctggcgggccatgtcctataatcgtatcaccaagggtggcgccacaacggcaccgccaccaggtgtagaaggtaatccgcgctacgtattcggcaagaatggtaaaggccgattcgccagcttttgcctcacccaaaactaccagatcacttcgatcaaagaaggtcagaaattcgtctacaaagtcagcaggacacccaacaagccccttatcactgaactcgtggagttcattgataacggtgtggaggggcatggaacaacaatcacaggcgaaggtgaaatccgtcagatcaacctgtccgtagagcagatacgtgaacttttgggtggtcggtttcttgcaaatccttctttcaaagtgatattgaacggcactcccatttcgtttgccgacatcagcaagtcgtccctttctatcgtggacgttgaggtgcccgattatggcacggtcaagatctatcacattgacacccgtaaggctgacaagacgacgaagcagcatggcatcgcgtggtgggtcatgaaccgtgctgtgggtgaatgccgttggcgaggtgctgacgttgaacgcattctggacggcaggaccgaaaaggccaagcgcttcacctttatcgttcaggctgacttcctcaataaggaaaacgccgtcaaggaagactggtcaggcttcgttgaaaagaacttggcatgggacgcgaccaggccgattgtccaagacaagattcgagagatcattgacaacaccagtgcggccgaacgcgaagacaagcgtagtgctgtccttgagagagtggggcagtcggtcaacgcccttcctcttttgggcaaggatcgtgtcaccacgttcgtcaatgaggttgtggatacctgtcctaatttcggtgagcaggagatcgtgcaactggctggcattctggcgaagctggaaaagagcaagtcgcagtatggtttgttagaaatcctgcacaaccaagacccgcatgatctggatgctcttcacgaagtcctgagtcagtggaccattggcatggccaaggtcgtccttgatgaaattcagagccgcctgaaggtcattaatgaacttcgtatcaagattcaggttgctggcatcgatgaggtcaaggaactccagccgctctttgccaaaggcctgtggatgttcggagacaagtttgaatcaatccacttcacgtccaacaaaggcatgacaacggtcatccgcgagttgtttgacggtaaggccgacaaggcttcattgaatcggccagattttgtgatccgcggtgatggcagcactggcttctactcccttccgtcctataacgaagatcaccaagaggtaggcgtgggccacctcgtcattgttgatctgaagaccaccaagctttcactcggatccaaggaaaaagagcagatttggaagtatgtgaaagaattgaagaagaaggggcatatccagcctgagacgcgggttgatggctttgttcttggggatcagattgaaagtggtgagggtggcacccgcaccgaagacaacgcgagggttaagattcaaccattactgtatagcattatcttgaacagggctgaacagcgccttctgaagctctatgacagggtaaaagaagctccattccttgtggcgcagcaggaagagctgagcaagttcattgagcccattgccgtgcagcagcttgggctgctggaagcggaatcgatggtagcaaaatga

SEQ ID NO: 341242 - DNA, 123 bp, Pseudomonas aeruginosa
atgacttctcccgtcaattggatcgctggctgcaactacttcttttcgacgttgaacagcgagagcaaggcgctgagacctaacggcttcatctatgaagaggaaataattggtgctgactaa

SEQ ID NO: 341243 - DNA, 1665 bp, Pseudomonas aeruginosa
gtgctgactaaagagaaagctaataacgaggagccagttgttcttctgcgccctgagaacaccaataaaaagtacgaagccttgttcttggagattgattgcggtcaaatcaaactaccaatgtttcagcgagaatttgtctgggataaggaacaaagcgccaagctgattgacagtatcttgaaaggttatccggtaggaactttcattttctggaagaccaaggagactttgagatctgttaaggatatcggcaaccataagttgcctgagacccccaagggggactatgctcaatatattcttgacggccagcagcggatcacctctctctatgcaattcgcaagggcattagaatttcaaaagatggcaaggaaatcaattaccgagacatctatgtgaatctcgatcatgacccattgaatgatgagcagatcgtcacaagccataaagaagaggacaaggcttacgtttcggtgcacgaacttctcacgcgaagaatgggtgatctgttcaagcaagtaggcgccgacaaggcggatcttgttgaggaatacaagaccaagctgactacatacgactttgccactatcaccattaaggattatccgatagacattgcttgcgatgtcttctcccgcatcaatacgggcggcaagccattgacccttttcgaaattatggttgccatgacctatgatgaagcgaagggctttgatttggctttgaagtacgatgaacttattaatgggggcgatgagctagacaagagtctcaccaaggcgaaatttgacactgttcccgccgcgacggttcttcaggcagtttctgctatcactacagatagtatcagggcaaaggacattctgaaaattcgccgtgataagtttattggaaactgggaacctatggtgtcctctatgtttacggcggtggattttatcagaacgaagctgcacgtgcccgtttcccagcttcttccgtacgctgctctactggttccatttacatattttttccataaaaatggcaacaaacgacctaccgagattcaggcgaagttgctgaagcaatttttctactgggttggactaaactggcggtacagtggatctaccgagacaaagatagctgaagatctgaagaagatgatttccatcatcaaggaaaaatctccaaagtatcctgcggaggagctatcggtatctactgatgatattgccgagacttggttctctgcgggcaactccaatgtcaaggcaatcctgtgtctattcgcctcgcaaaagcctcggaatcttgatgatgatagtgatgtaattcttgataactcaaatttgaagattgcctcaagtcgaaactaccatcactttttcccgaaggcttacgtgaataagcacttcaaggacctcgagccaaatatggttgccaacatcacgctgattgatgcggcctcgaacaataaaattcgggcaaaggctccgagcttttatgttggtgagtttaaaggctccaattccaagctggcctcatccttgagatcacatctcattggtaatcagcggaattttggaattcttgatgacgactacagcaagttcattaacaagcgatcagccgctattgctgatgctttaaatgaggccctaaatccagagttctaa

SEQ ID NO: 341244 - DNA, 957 bp, Pseudomonas aeruginosa
gtgacaaaactcttcgtagatacgaatatttatctcaatttctatcgatccgccaatgatagactttctttatttgaagagcttaaaaagctagaaaagacccttattgtatcagagcaaggatataaagaattccagcgaaatagaaccgcacagctaaacaagcttagtgccgaatttgagaaaatctcatccatgtctatatatacaacagccatagttaaagacatgagtgagcatcaggaagccatcaggcttcaaacacaaatccgtgaagtcgggaaaaaactgaaaggtaagattgaggcaatgctagaacctaagccgggagatgatcctgtgcttgatgcatacgacgacctaataaaaatctgcacttttatagaaacgaaagaaagtctcattgtaaaggctgaaatgcggaagatattaggtaatccgccaacctcacctgatagacattcgatttgcgacgagctactgtgggaagagctgattgaattttgcgatgaggacttaataatagtatcaaatgacaagacattcacggagaacagaaaaattctgaaagatgagttttcaaaggctcaccctgggaaaaacctgcaaatcgtcaagtccgtgagcgacgctttgcgtattttaggtgaagtttcagatcgcttagaggcgacagaggctgaaatggaattcagcgtagaccagcagtcatggcatatggctgacgtcataatggagatcgcaattagaaagtcatcttcaataattgtaaagaatgaccgcgaatatgtgaacttgaaaattggcaacgtcacgctggccagaaaagctcctgaaaaactccatctacttgatgcaatgaaagaactaacaaaaatgaaattaattcaggatgcaggcaatggcatttatgaactaaccgaaaatggccgtaattatgttccattcgacaagtaa

SEQ ID NO: 341245 - DNA, 261 bp, Pseudomonas aeruginosa
atgcttgtcaaactccccgatgaatcccccgacttcgtagagaaactcaaggaacagaccggtgcgaccacggctgccggtgcctatcggttcgccgctgagcggtacgggtcgctgacctatcagctcaagcaagccatggacgaactggcgaggttgcagacccggtgcaacgttcagcagcagatcatcgacaacgcccgcgcttctgcctcttcgctgcttgaccacgtcgcccagggcgatcttctccagggctga

SEQ ID NO: 341246 - DNA, 420 bp, Pseudomonas aeruginosa
atgattgacccaaccgacaagcaaacccaaccccttcccctggagcagccgaagcgcgggcgcggtcggccagccaccggcaaagccctgtccgacgcagagcgggcgcggcgataccgggcgaacaagaaaaatcgtgacgctcagccgtcacaaaaaacaccggaaaatgtcgatctgctgaaacagctcgcacaagcgcaagcgcgcatcgccgaactggaagccgaattagcgtcacgcgtcacgaaaaaagaagaagccgaggcgaagacttgggcaattcaagagcgcaagggtaaggcgcgctggcagaccatcagcaagggcctgacccggaaggccggagaacgccagttcgacaaactgctgtcgggcctgacagatccgcgctacacctaccgcatgattgaagaataa

SEQ ID NO: 341247 - DNA, 180 bp, Pseudomonas aeruginosa; identical to SEQ ID NO: 340153

SEQ ID NO: 341248 - DNA, 309 bp, Pseudomonas aeruginosa
atgcccttcgtctatctcggcctgactcgtgacgccggaacctcgaaaaagactggcaacgcctacgacatttcggtcgttcacttcgctgtcgatgccacgcaatcgacccgccccgatcgcaagtttgccgtcggcctggagcctcagaacctgccgatcgcgccggaagcagtgagccagttccaacgcgttgagccgctgtcgtcggtgaacttcgagttcgagcctgacccgcgaaacatgcagcgcagccgtatttgcggcgtgaaaccgctgccgaaagctgctggccaggccgcttcctga

SEQ ID NO: 341249 - DNA, 261 bp, Pseudomonas aeruginosa; identical to SEQ ID NO: 341245

SEQ ID NO: 341250 - DNA, 420 bp, Pseudomonas aeruginosa; identical to SEQ ID NO: 341246

SEQ ID NO: 341251 - DNA, 180 bp, Pseudomonas aeruginosa; identical to SEQ ID NO: 340153

SEQ ID NO: 341252 - DNA, 228 bp, Pseudomonas aeruginosa
atgatttccgccctgtcctgcgatggctccatctctattgcgccggatggggcgcccctgtgttcgggcatgtgggtcttgacccaggtgccggagcagttcgacccgtcgatgttggacacccaggcgctcgcccaggcgttctctgtcgggttcggtcttgtcgcgacggtccttgtcggcgccctgggcgtcaaggccgtgctcgacttcattaaaagagcttaa

SEQ ID NO: 341253 - DNA, 231 bp, Pseudomonas aeruginosa
atgaaaaacctgaaaaaactattcgttcgtggtggttccgccgttgcagtaggcgctgccctggtcgtctcgcaatccgcctcggccgctggctgggattacagcggtatgaccaaggatgtcgatttctcgaccatcgcgaccggcgtcctggctgtcgctgcgctgctggccgctgtgtatgccggcatcaagggcgctcgcgtggtcctgggcttcctgcggagctga

SEQ ID NO: 341254 - DNA, 1266 bp, Pseudomonas aeruginosa
atggcgattgatgcatatgtgggcaagcctgggcacggtaaaagttatggcgttgtcgagcacgtaattatcccgtcactgaaacaagaccggcatgtggtgactaatattccgctcgaagtcgatatgttactgatggattttggcgggactattgaacaactgccggaagactggtttgagcgtgaagacttggccgactttgcgccgcctggttcggtcctggtcctcgacgaactctggcggcgctggccgaagggccagaaaaccaatgatgcgccgatggccgacaagaaactgttggccgagcatcggcaccgcgtagacaagaaaaaccgctcgatgcgggttgtcatggtgacccaggacctcgaccagttggcgagctgggcaacgttgctcgtcgaaacgacgtaccggatggtcaagaagtcgaagaccatgttccgggtcgatatctacaacggcgtggccaagggcgatagcccgccgaagtcgaagctcctgcgcagcacggccgggcgtttcaagcctgacgtttaccggtactacaagtccgccacgcagtccgaaacgggcgctgtcggcgatgagtcgaaggctgacacccgtggctcgttctggcgatcctggggcttttgggggctggttgggctgatcgtggtctgtttgtcggtcggcattcccggcgtcgtccggttcttcacgccgccgcagcccaagcaagcgtcagcgccgactcccgcggctaaggtcgttgaacaggcgcagccggtggcggctcctgcggggcgtgcgttgcaagcggtctacggcacgtcgtcgaatggaccggtgccgtcagcgatctggcggatcgccggttatgtgcatgcgggcctgggcaaggctgatgcgtggccgtccaaggatggctacaacgctgagccggatcgaccgatcagcaagacgtcgcgtgtcgtgctggtgtccgaaggtggccgtacaaggttctggccgattgagaaatgccggttcttcgaacagacgcccgatttgtattgcgacatcgacggcgagcgtgtgacgttctggacgggccgaggggccgtatcgactgtgatggatgcgacaagcaccgcgagcggcggcagccagcgtagcgcagcgtccgccgcgaccggtgcgcaggtgcagaccccgcattcgtttcagccgcagcctcagcagcagggaacccgcgtgaccgttgttgctgatggcagccgttcgccccgcacgttgtga

SEQ ID NO: 341255 - DNA, 540 bp, Pseudomonas aeruginosa
atgacgaaatcccatctggccctgcggggcctgcttgtgctgctggcaggtctgccgctggcatcgcgtgccggcgatccgctgatcgtggtcgaagatcgcggtggcatgtcggcgctgccgtactacgaggccctcaacctccagccgcgcgccgatgtcccgggccggccgcccattccgacgccccgggttcccgccacgccagcggacgaagccgcgatgctgccggtgcgcagcagcaagctcacgcccggtaccgtcgcgcggcgcgtgatcgaagcgcccggcctgcggccgttcgcggtcatcggcgacgacgaggcttcccgggtctggttgcagcgccgcgccgccgctttgcgtgaacgcggcgcggtcggcctggtggtcaacgtcgagaccgcgcagagcctggcacggctgcgcgctctggtgcctggcgtaccgctcgcgcccgtggccggcgacgacctggccgatcgcctgggcctgcggcactacccggcgctgatcacggccaccggcatcgagcaatga

SEQ ID NO: 341256 - DNA, 225 bp, Pseudomonas aeruginosa
atgaaaaacaagattgaggatctgcgtaatcacctctttgccaccatcgaagggctgctggacgaagacaagcccctggatatcgaacgcgcgaaagcggtggctcatgtgggttcggtgatcatcgagtccgccaaggtggaggtgaaagcgctggagatcatcggcgccccgggcagcagcggaagcacattcctgcagatcggccaggaggactcgaagtga

SEQ ID NO: 341257 - DNA, 1344 bp, Pseudomonas aeruginosa
gtgagcgcgctggagcttactcctcctcactcagtcgaggcagagcaagcggtactcggtggcctgatgctggacaacgcggcatgggacattgtcggcgatcacctgcataaagaggacttcttccggcatgaacatcggctgatcttcaccgccatcagcgagttggccgcgaaggacgccccgtttgacgtcgtgacggtgtcggaagcgatcgaagaccttccagaagccggcgggctggcctacctcggccagctcgctgacaacacgccctccgtggccaatatcgaggcttacgcgcagatcgttcgcgatcgggcgcacctgcggcagttgatgtctctcgggcaccactgcaccagaaccgcctcgaaccaccaggcgaatccctgtgaggttcaggaggagatcgagcagaagctgttcgccctcggccaagatcagcacaagtccgactttgtcgatatcaacaagggcctcgcgaagatcgtcgacaccatcgattaccgcttcaacaacaacgtgacggtaacgggggtcccgacaggcctgaaggatctcgacgagctctccggcggactacagaagtcggatctcatcatcgtcggtgcccgtccctcgatgggcaaaacgtcgtttgccctcaacttgatcgacgccgcgctacagagcgaccaacagaagtctgtccaggtttacagcatggaaatgccagcagagcagctgctgttcaggcttgctgccctgctcggccacctggaccttggcaagctgatgaagggccaactgcaagaagaggattggcccaggctgaccgtcgcgatccagcgcataaacgactatggcagccgactggtcatcaacgaccagggcaacctgacgccgacagagctgcgcgccaaggttcgccgtgcagccaggaagtacggccaccccgtactgatcctggtcgactacctgcagctgatgcgctgcccaggcctggaaaaccgagccaccgagatctcggaaatctcccgctcgctgaaagcactggccaaggaaatggattgccccgtcgtggccctgtcccagctcaatcgcagcctggagaaccggccgaacaagcgaccgaacaacgcagacctgcgtgagagcggcgcaatcgagcaggacgcggacgtgatcatgttcgtgtaccgcgacgaggtctaccaccccaacaccgaggccaagggcattgccgaaatcatcatcggcaagtaccgcaacggcccgatcggcaccgtccgcgccgccttcatcgccaaccagacccgcttcgccgaccttgcaccaacttggcagggagctcttgcatga

SEQ ID NO: 341258 - DNA, 234 bp, Pseudomonas aeruginosa
atgcgtagtttccttcgcggcgcccgggaaagcgttcgccggctggtggccttcgctcaagccgaaggctggagcgtcgaccgctccgccggcggccacttgaagctcagcaagatcggctgcgcctcgatcttcatctcttccacgccaagcgacgcacgcggcgagctcaatgcccgcgccctgctccgtcgagccgacaggcagcgttccctgaaccaggagtctttctga

SEQ ID NO: 341259 - DNA, 891 bp, Pseudomonas aeruginosa
atgaaaggggttcgtcgcccaatcctgcgctaccacggaggcaagtggaaacttgctccctggatcatccagcacctggcgccacatcacacttacgtcgagcccttcggcggtgcagcctccgtcctgctccggaaagcccgcagctacgccgagatctataacgacctcgacggggacgtggtgaacctgttccgcgtcgcgcgggatcacggtgaggaactgcgccaggccctggcgcttaccccgtttgcccgggaagagttcgaagccagctacgcggaaacgtccgatccgctcgagcgcgcgcggcggatggttatccgaagcttgcaaggtttcggtaccgcagctgcgtccggcgaacgtacagggttccgctcaacctcgaccaggtccggtaccggacctgcactggactggcgcaactaccccgacacgctgaccgcgataacagaacgcctgcagggcgtggtgatcgagaaccgcgacgccctcgcgctgatggagtatcacgaccggccgaatacgctgcactacgtggatccgccctacgtccactcgacccgcagcacgaaggtgcgccacaacgccaccggcaagtcgtaccggtacgaactggacgacaaccagcacaaggagctggcggcattcctcaaacggctgcgcggcatggtggtgctctccggatatccctgccccctctacgacgagctctacatcacctggcacagagtcgaccgccacgcctatgcagacggctccagagagcgaatcgaatgcctctggctcaacagcgcagcgcttgaggggttggcacaactggacttcttccaggccagtaatgcgtctccatcgccctcattccagaccacggccgctcattactga

SEQ ID NO: 341260 - DNA, 654 bp, Pseudomonas aeruginosa
atgtgtataagagacaggcagcagttcggcgacgccccgcgccagggtcgacttggccattccgcgcggcccctcgatcagtaccccgccgatcgccggatcgaccgcggccaggcacagcgccagcttcagttcgtcggcggcgaccacggcggacagggggtaatgcacggtagcgctcatggggattcctgcggcggacggacggaaatacggaccgccaagtctatcaggccggcggcgccggtatcgaaccgtgaaacagtcgttgaaccggccgcctcgcttgcagtaagctcgggactcgttcacgggagaaacccatgccgcacacccgccatccgcacctgcattccagtgcctcgcgccctggcttgtcgttgcgcgcgcgtgcgccgcaggcaccccgtgccgcgtatttcttcgggtattggtttagccactccggcgcctgataccccaacggcgcccacggtatacgggacgcctaccctgcacacgcaaacccccggtcggctccccgaccgggggttttgtttttccggcccgtttttccggcccacaaggccacaaccacagaccaacgcacaggacatcgatcatgaccgcataccgctaccgcactggctacccgctcaacacctggcgatttag

SEQ ID NO: 341261 - DNA, 3393 bp, Pseudomonas aeruginosa
atggaacttaaagactttcccatgctgtccgaggatgttctggctctctctacggatgagcgtatcgacggtttcctggccggccaggcgatcttcctccagagctatcaggatgagtggctggcggttcagggcgactcacgtgtcagggtcaactgcgctccggctgaccatggtctatttagccgtctggtaatgcgcgatcagagccgctggctactgaccagcaaacagggcagcaagctgctggtgcagtactgcgcaccagtcgaagtgtccgccatgcagcttgaactggggatagacgagctgatcgcagatgatctctacggcaagcaggaaatcgccgataagagcatcgaccttgcttgccgatggttcgcggagcagtttctggtgcgtgggctggccgagggggactggctcaccgtcgcgcgctttagcaacagcgcctccaaaggaggcttccaactgctgggcaagggttggcgcgccgatgtggagcaacggcaggaccgtggattgctgatcaaacgccttacccgccactctcgccgtgatggtgcattctcattgctgatcggccagtttgcgttttgtgatgcctccgttgccgctgttctcaatagcgccagtcagcaggcgttgctggatgccgcgctgcgcgacagtgccagttatttggagttgtggaatctctacaacgacaaggaatggcagagtgcattgcggcaggccgagaccctgcgctcactgcgtttcgtgcaatgtgatggaggggaagatggacgtgaaaacgtctggcgtctgactccgaaatcgcaggacgactaccgggagtttcgtcagcgatggcgcgatctcgaattgccaagcgacacccagttcgacctgggtactgagcggcccgactgggctgaagagctgaccaccgacgaggcgaaggcagccgcgagcacgccgcgcggcaccgtacgctttgagcctgactgtgttgtcttcaagactgcctcaaaccggcgcgatgttcgcccgaaacaggctgagggctggctctacctctcactggcaggccagcgttccgtaggcaagaggcgccttgcggccaaacaatccattgactcgggcaagcggctgtcgcagttgaagtggcttctggagggcgttgcggtgccggcggcccggcgccggcccatcaaagggcttacgccctatgcgcaggaaaccttcaaggggggcaagccaacagagaagcaggccctggccctggatgctgcactcaatacaccagacctagccatcatcattggcccacccggtacgggcaaaacgcaggtaatcgcggcattgcagcgtcgtctggctgaggaggcagaagagcggaacattgccgcgcaggtcctgatcagcagctttcagcacgatgccgtagacaacgctctggatcgcagcgatgtgttcggcttacctggcgcgcgcgtgggcggtaagcgcagcgcgagcgatgaggcgtcgctgatcgatccctggcttgagcggcatgtggcccatttgcaggaaaaaattaccacggagtacagcaagtacccggaactggagcgcatcagggatctgtcgaccagattggcgctggctcgagttgtcggcgcatcgccagctcaacaagtggaagtgttcgaccgcattctggacggactgcgaggcctggagcaaagcggtctggtattgccgcccaggctggaaagtcagcttgaggaccatatcgagcaactaaaaaagcaggcgccaagttccgccgagagccggccggatgtagaagccttgagacgcattcgagcgttacgtgtcgagacctcctcattcgctgacgatggccccgatcgagcctgggatttgctcagctggttgaagcgtcgtggccaaggttgcagcgccgagttgctggcattgctgcaagacgctgcggatagctcgcacccggcggaatcgaccctgcatgcgcttgcggagtgccagggtcgcctactcgaacagtatttgcccgattaccgacctacggaattgaggcgtcaggcggaccctgaggggcaggctctgcttgatgaagtcgacaggcatctggagagcaaactgcgccagcgcaagcagggcgtagcctgggtgctggagcagctcgtcgacagcctggcgatggaccgcaatgctgctcaggctgtggttaacgagtactccatggtggtgggggcaacctgtcagcaagctgcaggccggcagatggcgagtctgaagtcagtggctggtctggatagctccgatattgagttcgacaccgtggtgatcgatgaggccgcccgcgccaaccctctggatctgtttgtgccgatgtccatggccaagcggcgcatcgtcctggtgggcgatgaccggcagttgccgcacatgctcgagcctgacattgaagggcaactacaggaggagcacgagctgaccgagctgcaactggcggcttttcgctccagcctgttcgagcgcatgcgcgtgaagctgcaagacctggagaaacaggacacgattcgccgggtcgtgatgctggatacccagttccgcatgcatcccatattgggggatttcgtcagcaaacagttctacgaggctgttggtctaggggcggtacgctccggcagggctgcggaagattttgtcttctcccaggatttgctggctgctctaggggagcgtgagccgtactaccgaggccgggtatgccaatggatcgacgtacctgttgcccagggcaaggatcagcgccgcgggacgagccgagtcagggatattgaggctcagcgcattgctgaagaggtggtaaggctgatgcatgccggaggtggcagcctctcgattggcatcatcaccttctatgcggcgcaacgtgatctgatcatggagaagctcgctcagcagcggatagagggtgttgcgttgatggagcgccgcaacggcgcctatgagccgcacgagcatttcaaatgggccaaaaaggtgcgaggcgatggctcagtcagcctcgaagagcgactgcgtgtgggctcagtcgacgcctttcaaggcaaggagtttgatgtcgtcttgctgtcctgcgtacgtacctaccagcaggcaaggcctgggcaagcctgcgacgatgcagccgacgatcgtgagaagcaattgaatcgccagtttggcttcctgcgtttgccgaaccgaatgaacgtggctatgagccgtcaacggcaaatgctgatttgcgtgggtgacgcggcactggcaaccagtcccgaggcggaagaggcggtgccggcattggcggccttctaccagatgtgtggaggtgagcatggcagccttcgttga

SEQ ID NO: 341262 - DNA, 729 bp, Pseudomonas aeruginosa
atgcagtttcagcgacaacgaggcgccatcgaaccaggcgttgagggtcggctcggcgcgacaggcctcggccagcgcctgggccaggcggatcaacgggtcgcgtgcggtcttccagcgatgcaggtcggcgtcgccgtagatcgtcaccggcaccacctcggcatgcgagcgcgccatgttcagcgccatgctccgccgtaccccgcgcaagcgctcgccgccgaagcgttcgcgggcgccctgggcggcggcctcgacgtcggcgcgggtgatcaggccatccgggccggagccgctcaggccggccagctcgacgccctgctggcgggcgaactggcgcaccgccggggtcgcgcgcggtgccaggtgctcgcgggtggatggtgcggagccgatgaagaaacggtcctccagggcgctaccgccgccctccaggcgccccaccacggtaccggcgtccgcctcctcgccctcgaagcccaccagcggttcgccgacgtggaggatgtcgccctcggcgccgaacagcttgcccaccaccccatcgtagggcgcggggatgtccaccagcgccttggcggtttccaccgagaccaggcgctggtcggcacgcacgctgtcgccggccttgacgtgccattcgacgatttccgcttcctgcaggccctcgcccaggtcgggcagcttgaagtgcttcatggtcgtctcccctcggctcaggcgtag

SEQ ID NO: 341263 - DNA, 213 bp, Pseudomonas aeruginosa
atgccaatcccacccgctcccttcaccctcacctgcgcgtgctgctcttggaaaaagaccatttttccccagagcgatgtgctggtactggaacgcgattggttcatcacctgccccaactgccatagcccttcgcttgaacgtcgcggcgctaatcataaggaaattctcaggacgcgcttggagcaattcctcagtgtcaataagcagtga

SEQ ID NO: 341264 - DNA, 678 bp, Pseudomonas aeruginosa
atgaacataatgaatgtcatgccgcaattgtccctgtctgaatccggtccggtgaacgaacgcggagagtccgtccatttccgtcaaggtgaccttgatggtgcctgtggtccttacagcctactgatggccctagtcaccaacggcatcatccgccgcgaggaggcgtcctatatggggctgcgcgacgggcgcactcggctaggaaagtttcacaatcgcctcaccgaattcggtggactgatcagcaacggcaccgatgagttcgatctggactggcttggtgaatgctttagtcgccagatcgaaatcgaggtcatggaaggcaatacccgcgccatggtcgagcaactggaggacgcgattcgtcagggacactcgagcatcgtcagggtcgactggcctggcggtgaaggacattggctgttagtagttggttaccaaggcaggcttgtcgaccaaggcagcgatggatcaaagattgaatgtacccacctgctctgcttggaccccttatgcgaggcgcccaaggtttccctctggaacgccgtgctcgaagttcagaccgcagacggcctggtacccaacgctggccgtttcccatcgaaccactggagtggttccactcccagcaagtgcaagatcaccagcgccctagcgattgtgaaacgtagatag

SEQ ID NO: 341265 - DNA, 624 bp, Pseudomonas aeruginosa
atgagcctggatcgcgcgaacgaaattctccgcaactacaaccaatgctacgagcagttcgacacgcttcataagtcgttgtcacgcatttttgccggcacgctgctggcgcaagaaatgagaattatctcagcctgcatagagcaggcttatgaatgcaatgtcgatgcgggttggttacctgaagaagagaacgtcttcaacgaattcgaactgctagttgcgaacatcaagcacgatggccgtggccgtcactacaaaggactgagcgatgtgcctgaacacctcaggcaagggttcgatcaggacgagcaggacttccgcgattaccttgagcagctacgggaaaattgtcgagaagcctacgacctaatctcggagcagcaggaaatcctagccgaggcactggagcggaatccgctggaggacgcctggaaccaaatcgacgaagagttcatgactagaaacgcaaagtcgatagtcaaccaagtattcgagcacctccttacggaatggcggcaatacacggtactagcatcagagctggtcaaaatggccaatgaactggacgacccggaccccgaccgcgaccgcgacctgacaaagactctgctgttcgattga

SEQ ID NO: 341266 - DNA, 129 bp, Pseudomonas aeruginosa
atgaaaaatatttttgcggttatcggcgtcattgttgtcgccaagaagggctacgaactgtatcgcgagtacagcgagatgaagcgcgagcgggatgcacgggcaacgaatcaggacgttgatggctag

SEQ ID NO: 341267 - DNA, 1062 bp, Pseudomonas aeruginosa
atgaatcgtctggacaggatcaagggttgcctgctgggtggagcagccggagatgccttgggggctccggtggagtttctcgattgggcgaccattgagcagaagtttggctcgtcaggcatccgggatttcgctcaggcctatggagtcacaggagcaattaccgatgacacgcagatgatgctgtttacggctgagggactgttgcgcgcccatgtcagacaagcatcgcgtggcctctgtcatcctccgtcagtgatccaccacgctctattgcgatggtgccttacgcagggtggcgagcctgccaccgaggtggcaaaagacggatggctgattcaggagcgtgcgctttggtctcgtcgagcccccggtatgacgtgtctatcggcactgcgtgaatgcaagtccttcggcgagctggcgagtaatgacagcaagggctgcggtggcgtgatgagggtagcgccccatgccttcttccctgaacccttcgagctggcgactgagtctgctcgcctcacgcacgggcatccgaccgggtatctcgcagccgggatatttgccgacatcctctcccgcctcctgctgtcctcctgttcgctgaaggaggcgatgctgggtagcctccaacagcatggcagtcgcgaaggcatgagcgagacacgcgagctaatcgaactcgtgttggtatttcatgaaaagcacattcggcccagccccaaggtcatcgcgttgctgggaggtggatggacagccgatgaagcactggctatcggactgtggtgtgcattaatggccgacagcttcgagcaaggcgttagctgggccgtcaatcacagtggcgacagcgacagtacagggatgatcgcagggcatctactcggcattcagttgggctgtgccggcattcccgagcgttggctagcatcgctggagctgcgcgaagtaatcgaacaggtcgccgaagatatcgatgaggtgccgcgcatttacggcggcgagtacggtgatgatcgtgctctcgacaagcagatcttccagcgatatccgggatggtga

SEQ ID NO: 341268 - DNA, 249 bp, Pseudomonas aeruginosa
atgggactgactgcaggtatctggattgcgctgataccggttgccttggtgggactgctgatgtggggtgcgtggaaactcgcacggccaactcagctacgtcaggaacttaacgcacagttcaaagcagtgctcgctgtgcatagcgcaatagtggtgcgcgaccaggacttaagcgctgccttgcgagccgagcgtgcctacgtccagcagttgcaacgccagcttgaactttgtcagcgcgactga

SEQ ID NO: 341269 - DNA, 873 bp, Pseudomonas aeruginosa
atgaaacggaagcagtcgatcgaatctgtccgctgggatctggcgctgcgttatcgcctgatcgaaaccgttgcctggtgggagggccgactcactacggggcatctgatgcagagcttcggtattagtcggcagcaggcatcgaaggacatcaacacctacatcaccgaacatgcgcctaaaaacctgacatatgacaaacacctgaagggctatgtccccagcctgaagttctcgccgaagttcatcgacaacagcgccagcgcctacctgcacctgttgagccagaacaaggagcgagcgccacacatcgagggcctggccctggcctatgcgcatacggaagtgctgaaggtgccagatcgctctgtacgtccggaggtgctgcgccctttggtaagggcttgccgtgagggacttcgtctggagtgcgaatatgtctctctggccaatccggtgccggagacacgactcatcgctccgcacaccctcatttacaccggcatgcgctggcatgtccgtgccttctgcgagaagaatcgggactatcgtgacttcgtccttagccgtttccgtggcgaaccggatgtactggatgtctccgaaaatggacgagaagatgatgtgggttggtcctccgaagtgactgtgatcattgaacctgacccacgcctgaagccagatcaaaaagctatcgtcgcgcaggattacggcatgcagcaggagcaattgctgatccccagtcgcggtgctctggtgcagtacgtgctgcagcgctatcagattgacccgaacaagatccaggcaaaggccgctgcacagcagatcgtggtggcgaacctggaggagctacagcagtggatttatcagtga

SEQ ID NO: 341270 - DNA, 345 bp, Pseudomonas aeruginosa
atgtcggaagaaaacggcttttcccaaaacttttcagaggacggcttctggaacaaggtcgtcaaatatgccaaggctgccggccaagaggtcatcgagaaggccctgtggctctactacgccgcgcaaaccccgcagaccccagcctgggcaaaagcgaccatctacggcgcccttggctatttcattctgccagtcgacgcgattcccgatgtcctcccaggcgtgggctacaccgatgacctcgggattattgctgcagcaatcactgccgtctccatgtacatcaccgaggatgtcaaacggcaggcctcgcaaaagctgcaggattggttcggcgtctga

SEQ ID NO: 341271 - DNA, 1644 bp, Pseudomonas aeruginosa
atgcaagacactcttctttccagcgcattttccgccttcgatggcatcgatgaaatctgcgcaaagtacaacgccactgggctcacccccatccgcaagctagtagcggaaaagcgcgcctcgcccaacgcctcgatcatggtctatggcgtctacaatgccggcaaaagcaccctgatcaatgccttgcttggagccgaacgcgccaaggtggccgatcgcccggaaaccgacagcgtcagccgctacccttggcgcgaattcgaaatcctcgatacccccggcatcgacgccccgatcagccatgaggaggtcacccgggaccagctgcatgcggcggatgtggtgatattcgtggtcaatccgctgggggtgatcgaagaggccaagaccctgtccaccctgctggatctggttgcgcgcgagaagaagatcgtgctggtgttcaacagcaagaaccatctcgaaccaatggtcgctgaacgtctcaaggacgaacttcgccagcgcctgcaagaaatggctgtggagcgcggaatgccacccgtgctgcaagcaattccgatccttgaggtgaatgccaagagcgccctcaaagccaagctggaaggcaaggagaatctcctggccaaatctggcctgccggccctcgaacgggatctctacaagttcctcggttcgatccagcagagcgaactgatcacctccttcatcgctcggctgaacagctttatcggtgacaccataaacctgctggatcagaacggcgactcagacagcatggtcgccatcgaccgtttctacgctgagctggcccagcgcgaagtgaacctacgggccagcctcaaggccctagcggaagccaaggcaacctttattgaacagcgtgccttcagcgtcatctccagtgcaccggacagcgctcaggagcggatcgaacaactgatccaaaacgccggcaacgaaattctggccgaactggaaatggagctgcatcgcctagcgagcgacgcctcccggctacttgacgaggtactggaaagcgttcgagtcaatggtcagatgcatacacccaaaactgggccggtcgtcgtgccggaggaaggcgaggtatctgtaaccggcactcagggctccagcttcgatttcggcgtgctggaaaccggagcccgtcagatgagcgccctgatcaaacccgagcatgtggtcagcgccctaaaggtcggcaaggatctgctgccaagcctgttcaagggcatcggcccggccaccatgggtaagatcggtgaaaaggtggtggggaaagtggttccagccatcggtctggccatccaggcaggtcaggttctctactccctcctcgccaaggatcctgaggaacaacgcctcgaggaagaggcccgcctgcgcgcccagcaggaagagcggcggaatcaactgattcgcgagatgagcgaggatgttgcgtgggagttcaagaacaccatcatcggcgtggtggacgagaacatccgcggcaatttcgctgaggtcaacggcaagctgcgagatattcgtgtcggcttctcgacagccgagcaggagcgcagtgaagatcgcgcggccctagtacaggcccaggcgatcctgcaggcccatggctga

SEQ ID NO: 341272 - DNA, 1776 bp, Pseudomonas aeruginosa
atgaaagagaattccatttcccgtgatgagctgatggcttcatttcacgggctgcaggagcagttcgatcagcaacgcagcgatatccgcgacaaggaagaagtcttcgatcaggcccgtgcgagcttctccgcgcgcctgcagaagcgccgcgacaacctgggtcaaatgctcaacagtgataatccgctaagggtgctaggcgacgatctgatccttcagttggatggaatcttcagcgcctgggagaagcaggtagtcgcccgcgccaaaggcactctctttcgcaaagactttggcgactcgctgctggtgttcatctacggcaaggtgaagtcgggcaaaagctccctgggcaactatatggcctggggccacagcgagcccggcgcctcgctcaaggcaagcgcgccgcaacccgagtatttctccacagaacgcactgatgtggccaatggcgaccaagacaaggaagccgagcagcacctgcagttccgtgtcggcgccaccgaagctaccagttccatccagggcttcaaactacctgggctgacctgggtggactcccccggcctgcactccgtcaacgcccgaaatggcgacctggccaaggagtacgttgagcatgccgacctgattctctacaccatgagctcccaggctccaggccgtgcctccgatatggcggagatcgccggactgctagctgccaacaaaaagatcatggtactgctcactggcagcgacaccactgatgaagacgaagatgaagacggcgaaatcatcaccaccgtagtgatgaaggatccttctgaccgccgcgatcagatcgcctatgtccagagcgaactggagcaactgggcaacaacgatttcagcatcctcgctgaagtgctgcccatctccatctccacccgatacgccgaactcaatccgacacccgagggcatggtcgccagcggcatgggccagctgttacatgagctgcagaatatctgccacggcccagccctcgacatgaagctgaacacgccgatggacaacctgcgcagctcgatccgcagcacggctggtgaattggccgaagtgcggagggtcgttgaaaaattctcctcaggtatcgagcgccaagacagcgacctgcagcgcgagctggccgaacttggcgccaggggtgccagcgagatgcgcgaacatattcgcagaatcttcgacgcggtcggcaacgacgacctcgaggagacgcttcgcaagaaagccaccgaggtgattgcacaactgacccaggaggccttcgcgcgaatcggcgagcagcaacagcgggggctacgccgcgccttcgacagcagccgcctgggcagtcttccagaataccaagagatcgccatcgagaaggaatacttcagcggcacccgcaagagcaccaagagctggttcggcctgggcggcgccgcggtgggcggcgcgattggcttcttccttggtggccccccaggggcagcccttggcgcatccctgggatcctccgccagtgccctgggccgatcggccagcaccgagtacacacgccaccaggtggtggttggcgacaaccgcgaagagcggcgccaggcagctctggatcactatgcgaagaaactgccagaactgctcgccgaccatgtcaattccctttacgcgcagctgcgcacggccctgcaggaatactgcaggaccctggagagcgacatgaccgaactgatgaacgatctcgaccaacttgccaaggcagaatga

SEQ ID NO: 341273 - DNA, 552 bp, Pseudomonas aeruginosa
atgcccttaccttggcttattggtgctgccgtggtcgctgcagctgcggccgtggtcaaagcggtcagcgatgacgatagcccatcctcatccaattccggagatgctgagcgccgcagacaggagcgagaggctcaactccagcgcgagcgcgacggtcttgcggcccaggtggtaagcctcaagaaagaccgcctggaagaggctcgcgcactacttgcgctctctgcggaaaccctggaacagcttccgagaaagacggtcgggctcaacacatccaacttcgagagcgctctcatggccaagctcccggccagctctgcatatgcccagagcctaagcgcgatactcgacctaaccgactacggagagaaaaacttcccccaaaaggagcgaggcgaatttctggtcaatctgcagatactggaaagtctgtatggcgccatctccgtcagcagcgaaaggcagcttgacctcgtcgcgctccgcgaggtcggcagtcgcctggacagtctgcagaacctgaaacaccaactcgaacaacagggatag

SEQ ID NO: 341274 - DNA, 864 bp, Pseudomonas aeruginosa
atgacgcaaaaatcacaaacgatcgaacagctggaaaacagttgccatagtttcctgcaggaaacctcgcaaagccctaagccagtcattgccgcctggggattggtcaaggccgggaaaagttcgctactcaacatgctttccggccacatagaggatgagttcttcaagaccggcgtggtgcgcaccaccaagctcaatcaagaactggaaacagaccactacctgctgctggatacgccaggcctcggcatcgaccaggcagacagccagcaagcctacagcgggctagacaatgcagatgtggttctcttcgtccacgctccacctggcgagttggatcaagaggaaatggagctgctgacgcaggtcaaggcgacctacgctgaggacaccgaaaagcgcttggtactagtactaagccagctggacaaggaccaggacggggcgctggaacaaatccgccagcgcatcctagaacagcttcaagagcgattcggcatccagccccaatgcttcctggtgtctaacaggcgctaccgcaaaggcgccgcccaagggcagcagacaatgatcaagagcagtggcatcccgcaactggctgcgcatctcaacgggctggttcaggacatcgccgagaaattggaaagtgtccgtgccagccgccaagcggcacgcagaacagggctgctggcggagcttgaacaggcgatcgctgccgagcggcagcagatctctcgcctgcagcagccatatgtgaccaaggtgcgtaccttcaaccggatgatgacggagcttcgtcagaatttcgtcgcgcgaacggccgagatcaccgccgtccagaaaaaaatcaacagtctctaa

SEQ ID NO: 341275 - DNA, 1044 bp, Pseudomonas aeruginosa
atgtccgaagccaaggacactctcctcaggcagctcacccttttgcgcctgatccccgaatatccgcgctacatctcctcccacacgctgcacgaaaagctgcatgaccgtggttacagggtggaactccgtaccgtacagagggacctgaaccgtctttccgcccccttctcgctgaccagcagcaagaagggggggcgcaatgaatggagctacacaaaaggcacaccgctggatctgcgagatatggaaccctcgaccgcgcttgcccttcacctagccgaaagccatctgcgcaccttgctgccacagagcgtactggacctactggggccacagttcaacaaggcacgcaactacctcgacaaccttggccagaacgacctggcccactgggccaggcgtgtccgtgcccaccccaatggcaaggcactactgcccgcccagatcgacgccgacgtctggagagcagtgtccgatgcactactggcgtgccgacaactgcgggtcgactatctcagtcgcagcaaggctgacgtgaagacactgctcatccaccccgctggcctggtttcccgccagtccatcggctacctgatcggcagtgtcgaaggctacgacgaccttcgccagttcgctctgcaccgcattcgtcaggccgactgcctcgacatcccggcccatgaacggcccgacttcgagatcgaccactacatccgccagcacctcaacaccgcagcctccatcgaacagacagagctgatcgcagacatatcgccacagattgcctggctgctcggtgaaaccccgctgagcacacagcagaatctggaaccgctggagggtagcgactggaaacggcttcgcgcttgggtaccggacgatcaggaaacgttgtggtgggtgttcgggctgggggagaacattcgggtgcatgagccgcagagatgggctgccgcaatcaaggagaagacctccaggctccaggaactctatgagcacggattagcccctcattcgccggcctcgtcagcgtcatgctga

SEQ ID NO: 341276 - DNA, 663 bp, Pseudomonas aeruginosa
ttgaacggccagcatcatggcaagcaaatcaagtacagctatattactggcaagcttaaccgatatatatctgccgaggaaaactacgacaatggcaaactcgacggaacacagaagaaattcatcaacatcttgcataccgacatcattcagcaggaatcagaaatcatctatgacaagggaatagccctctccggctggatgaagaaattcgacccagtaaatggagcagtcactcaagaaatcaagctagttccgtcaccgcacaggagcgacgaggatttctacagcggctaccccggaaatctggtgcctgatggcgtgttgaagcgaacggatgcagagggcgaagaggtctgggccaatggcattaaaatgaagtactcctacaactatggagagccgagctttcatgtgctggagagcacaacaccgcgcgaacattacagagaggtctccaaggcccagtacatggcctatggaacatctctcccacgcgaaccaggtattgcggcggcgcagccatctgtagcctcaaatagcgaaagttgcgtagacgaatggattacggcctaccgcaatgaggcaggagaagacgttctggttacgagtgagcagcttggtgagtgggatgactggtgcaaagcaggtaaaacgccctaa

SEQ ID NO: 341277 - DNA, 348 bp, Pseudomonas aeruginosa
atgccggagattgatgtcaagacactgacgggcctggttggccgggcaatcgctcggcaacgtgttcgctgtgagctcacccaggagcaagtggccgagcgcttggggattggcaatgaagcggtgtcccgcatcgagcgtgggatcgtgatgcccaatatcgaacggttggtcgcgctggcttcgattttcggttgcgagacggccgacctactgactgaagcaagtgcccgtccggaggaccaggcgcgccatctccagtccctgctcggtaccctgggcagcgaagatcggcaacttgtcatggggatggtcgaaaggcttgtggagcgcctggcccgccgttga

SEQ ID NO: 341278 - DNA, 330 bp, Pseudomonas aeruginosa
atgaccatacggtgtctgatctgtaattcgtccgccgttctttctcaacaggaagcccagaccattgcgctgctgatcggtgctctggaggggtttctgaaaggagttcagagtcccgatatagcctcaggacatactgtcgcaagcccgcttggccacaccctccgcatcatcgccgaaggtatctcgggcgtggagtctaactgggcagacgtccagggcttcatccgcgagaacaggaagtttcatttcatggggcatgagcgcctctgtctgcgctgcggggcgctgttcagcagcctatccacggaatcaccgcccgatggctga

SEQ ID NO: 341279 - DNA, 189 bp, Pseudomonas aeruginosa
atgcacctgctccgttttctgattctgctattcgtactcatcggcatcctggccagttgcagcatcgctgtcgtactgctggtactcgcgctgcgggtctggccaatcctgctgatcttcgccttgggcatcagcctactcggctggcttttccagcggatcggaatccgtatcacgtcgcaacactga

SEQ ID NO: 341280 - DNA, 498 bp, Pseudomonas aeruginosa
atgaaatcgcccacgctcaaggccggcaaaattgccggcagctacatcatcgacagccccgtcaccgaagctgacatcctacaactggcgttgcaattggccgctcggcgcctggccagagggaaaccgctgaccgatccgctgcaggttgccgagcatctacaagtactgctgcaggaccatgaacacgaggtattcgccctgttactgctcgacggcaagcatagggtcatcggtttccgagagctgttcagaggaacactggacggagccagcgtctatccccgcgaagtactcaagaccgtgctcgaacacaacgcggcgggcgtgatcctggtacacaaccatccttccggcgatccaacccccagccaggcagaccatcgcctgactaacacgctaaagactgcactggaactggtcggcacccgcacgctggatcacattgtggtcggccgcgaaggcttcatctccctggcccaacagggttacctgtag

SEQ ID NO: 341281 - DNA, 1005 bp, Pseudomonas aeruginosa
atgaaagcaacgtcgttgaacggcagcccccgcaagaaacgcccggccctgcgcctggtcagcaccaaggagctgccgcgcgaggactggctgcaaatccgcaagcaaggcattggcagttcggatgctgccgctgcggtcggtctcaatccctacaagtcgcagttggagctgtggttggagaaaaccggtcgtgatgccggcatgccaaaggccgatcctcacaatgaggaaagtccgctgtattggggcaacgttctggaacccatcgtcgcgtggcactacagcaagcgcacgaagaaaaaggtacgccgtatcaatgccgtgttgcagcatccggatccggagttgtactggatgctggccaacatcgaccgtgaagtgatcggtgccgacgacgtgcagatactcgaatgcaagactgccggcataaacggggcacgcctctggaaggaaggcgtgcctgagtatgtccagcttcaagtaatgcaccagctcgccgtcaccggcaagcaggccgcggacgtggcggtactgctcggtggccagacgctggagatccaccgtatcgagcgggatgagcagatgatcgctcgcctgatcgagctggagcacaagttctggctctatgtggaaaccgacacaccaccaccagccgatggcacggtttccgctgaagcggccctgcgctgcctgtacccagaggacaacggccaggtcgtcaacttcagcaaccatgctgggctgaccgctgccttcatcgagctgaaagccgtgcgtcagtctatttccgacaaggaaaagcgcgaggccgagctcaaacaaatgctgcagcaggccatgggagatgccagccgagcggagttctccagcggctatgtctcctggcgcaaggctaaggacagcatctgtctcgatgtcgctcaactgctccaggacaagccttacctgcaagcgaagtacccactgctaaaacccggtgcgcggcgcttcctggtcggctga

SEQ ID NO: 341282 - DNA, 969 bp, Pseudomonas aeruginosa
atggctcatctcatcgaacgtatggcgtatgtcggcgaagccccctggcatggcctgggcagccgcctctccccgaaacaaccgctggaagtctggcagcgcgaagctggcatggactggcaaatccaggagagccccgtccacttcaaagcggatgtggtcggccacctgggcagcatccactccttccctgaacagaaggtgctctaccgctccgataccaaggcgccgctctcggtggtctcccagcgttaccaggtggtgcagccgcgggaggtgctggagttctaccgcgacctcacccaggtctccggctacgagttggaaaccgctggcgtgctcaaaggtgggcggaagttctgggcgctggcacgtaccgggcagaacacttcgctgaagggcaacgacctggtcaacggctacctgctgctggccacctcctgcgatggcaccctggccaccacggcaacgccgaccaccgtgcgggtggtgtgcaacaacaccctgaccatcgccgtcgatggcgctacccgggcgatcaaggtgccgcacagcacccgcttcgacgcccaggcggtgaagaagcaactaggcatcgccgtctcgcaatgggacgagttcatgtaccgcatgcgccacctggccgagcgcaaggtgcaatggcacgaggcgatgggctacttcatgcaggtgctctgcgatgcccaacccaacaatccgttgccggatgccctaccgaacgaacgcgcgctgcgtcgggtgcaaagcctgtacgaaggccgcggtcgtggctcgcagttggaagccgccaacggtaccgcctggggactgctcaatgccgtcactgagtacgtcgaccacgaacgccgtgcccgcagcaacgagtaccgcatggactcggcctggttcggccagggggcgcagatcaagcaacgcgcgctggatgccgcgttgcagctcgccgcttaa

SEQ ID NO: 341283 - DNA, 330 bp, Pseudomonas aeruginosa
atgtcattgcagtgccctcgctgtaactcccccaagatcgcatctctgcatcccgcaatgaagatcggtgccctggtcggcacggtcggtggcgcagcgcgtggtgcatccgccgctcttgctggcggccaggccggcgcagctgtcggtgccattgccggtccgctgggcatcaccctcggctcgttgtccggcgccattctcggtggccttgccggtggtgtcggcggttgtgcgctcggcgcccagctcggcgaccagttggatcgccacgtgctcgccaacaacctctgcctgatctgcgggcatcgcttcaacctgccgacctga

SEQ ID NO: 341284 - DNA, 3132 bp, Pseudomonas aeruginosa
atgtccactgatccgttcaaggctggatcggcacttcagtcattgaaagcgttccagcgtcgcacggtcgactacgtctttgaccgcttctacaacgtcgaaaatcccgccttccaattcctcgtcgccgacgaagtgggccttggtaagacgctggtcgcgcgcggcgttatcgcccgtgctatcgagcatctgtgggacaaaaccgaccggatagacatcatctatatctgctcgaaccaggctatcgccgctcagaacctcaaccggctgaacgtccttggccgccaagcgctggctctgccgacccgtatgacgctggtgccgctgcagatgcggggcgaaagttcgctcagcgccaacaaggtcaatttcatcagcctgaccccaggcacgacgttcgaccttcgatcgtcgactggcgtcgccgaggagcgtgccctactgttccatttgctgcggcccgaggtcagttcgccacgtggactgcagaacctgttgcagtgcgacgtcggcgtcgagcgttgggaatcttggatcaagtactacgtttcgctcgacggggtcgatactgccctgattaaacgcttccgaaaggatgtctatcaggacgaggctctggccggcgacttggagaaagccatcgagctcttccggcggcgacgggctcgatacccctccgccatgacccgcactcgaaacgcagtgatcgcccgtctgcggggcaaactcagccactcctgcgtggatgcgctgcagcctgacctcatcatcatggacgagtttcagcgcttcccggatctactgcacggtgaaagcgacgccgcctacttagcgcgagagctattcaactaccgagaccataaaggcaatgccgcgcgcaccctgctgctctcggccacgccgtaccgaatgctcacacttcaaggagaccaaaccgaagacggcgagcattatgacgacttcctggagaccttgaccttcctctttggacaggcccgaggtcgggaaatggtgagcgcattggaccaagaaatgcgcgccttccggaccgcccttcatgggcttcccgccgccaggggcacggccatggcccagaaggccaaagtggaaacttctctgaggcaggtcatgtgccgtaccgaacgggtctccagcaccatcgaccgcgactccatggtctgtgaaccgaaaatggctcttaccgtccacgttgacgatctgcgccaagcgatggcggtctccggcgtagctcgagccctcgaagcaccagacgtcatcgaatactggaagtcggcgccctacctgctcaacttcatgcgcgactacgcgctgaagcgggtcatgaaggaaatggagggaaccaagccttccgctgccctggtcaacgccttggcgacggccaagagtgcctgcctcgaccacagtcagctcaacgcttacgcgccgatagaaccagccaacgggcggatgcgcgcggtaatggaggacgttttcaaggatggcctcgagcagaatctctggatcccgccggcgctcccctactacggtgatacgactccagacaccaggccgaccaaggcgctgattttttcgtcttggacaatggtaccggatgccattgccgcgatactttcctacgaggccgagcggcgtatgggcgctgggcaaaccagccgtggatattttgaccccaagcggccacgcccccttcagttccggttgacggacggccgcctggcaggtctgcgtgtcctgctattgatctatccgtcacctgctttggccgaactcggcgaccccctagcggtggtcgcgggatcttccgagcgcctgtcctacgccgacatgcgatcgcacgttgccgaacagctgaaggggaaattgaccgatatggtcgcgcgcgggtcggccgagtcagaaggtagttttgccgaatgggcgctgcccgcggccatcgacgccatggcggggaatggcgccctgcagtggatcgatgcctcggagggaatgggtagtttggccagcgaggacgcctttaaggatcacgtcgcagccatgaaagtggcagcagtcggcgatcttggctcagtgagcaccgacgccctggacctactggttgatgtggccttgggaagccctgcgatctgcgcgcttcgcgcgctgcgacgcgtggcgcccgatttggcatgggacgatccgagcctcctgagcgcggcagccaacgtcgcctggggcttccggacgctgttcaatcagcatgaggcagtcgccttgttgcggcgaggcgaagaagatcgctattggcaccgggtcctcaccttctcggcggagcagaacctccaggcagttctcgatgagtatgcacactacctcgtagatgctcagggcctaagcgcaatatcacctggagaacgagtaatcggactcggtaaagccatggccgacgcgctctcgatccgtccctcgcagattgatgtcgacaacccctcgatcgtcgaggggcgcctgaaagtagacaaattccaaatgcgtggccgtttcgccatgcgcctggcggactaccgtgacgaagaaggggccgtcgcgcggctgggcggcgtgcgcgacgcattcaattcgccgttccgtccctttgtgctagccacgacctccgtcggtcaagagggactcgatttccacccctactgctaccgtgtgtaccattggaatctacccggcaatccggtcgacttggagcagcgggaaggtcgagtccatcgttttaagggacacgccgtccgtctgaacgtggctcacaatcatggtcatgagatttgggcgcacagtgctgtttcgtctgacccctgggcgcagatgttcgctgcagcaagggcatccactggctccgacacggacctcgctccttattggctatgtgaggggccggtgaaggtggagcgacgcgtaccgatccttcccttcagccgagaagcccagcgcctcgagtggctaaagcgcagcctaactgtctaccggctagcgttcggccagccccgccaagatgatctgctggactacctcggcagacttctagaaggtgatatgacgatagatgaactggaggcactgcagatcagtcttcagccctaa

SEQ ID NO: 341285 - DNA, 1860 bp, Pseudomonas aeruginosa
atgcccaatagagccagcctggatcccgaagcacgcgtcctctacggcgaaagcctgtcggcgccgtccggctatgtgttcgacgctgcggttgccactacttactccctcgacttcgagacggccctcgccgcgccagtgagcctagcgctgttcgccgccgagaatcgcgatgagattctctgccagcccttggctctgcttgaggccgctgaacgtatcaccgatcggctcgccgtctattacgacgcgggccatatccaagctcagacccagccgcagtcccggctctgcagtctgttggagaggatgatcatagaagtcgcggctccgcagggcggcgccttccacccgaaaatctgggtcctgcgcttcaaaccgcagtcgggaagcggggtgaccaaaatgcggctattggtgctgtcgcggaatctgacccaagaccgctcgtgggacatttctctttgtctagatggcgacgttacccgtcgagtggtgccaggcaataagccgatcgtcgaccttctcaagcgcctgccacggatcaccgtgcagccagtatccgaggacgtcagggcactgaccctcgatgtcgccggtgatctcaatcgagctacatgggtgctgcccgagcattttgataccctgagcctggcagtcaacggcatcggatcagaggtttggtcaccgtcggcttgcacccgaatgggcgtcatatccccgttctgtgatgacactacccttattcaactagcgaggctaagccgcgaaaagccggtgctggtggggcgaagcgacgaactcgccgcttgctcggccgacaccctagctctttacgaacgcgtcaatgtgctcgatgacatggccgccagcgaggacggtgaagaggcagcgccggaaagcctgcaaggcctccatgctaaggcatttatacaggaggtcggctgggacaccgtcctgacagttggctctggcaatgccacccaagcggcgcttgccaaccgcaaggtggccaacaacgtcgaagtgtttgcgaccatcacgggcaaggcctccaaagtaggcagcgttgagaacatcctgggcgctcagggcttcgggcggctgctgtgccccttcgttgccggcgatatctcggcggacgccgctgcggataaggcggcagaacggcgcctggaagatgtacgtcgcgtaatctgcaaggctcgcttggcgctgcgctgcgaacgcgcccttgctgaaggtgaggacgcccccgggtggcgggtctggctgatctgcgcgcaaccgctggccgtcaccagccttgccagcgccttcgcttggccgatcacccgcggcgaggggcatcagcgtgatgtcctagctgcgctggtcacgggggaggatgtcgatcttggcatcatgcctctggcagacctcacccggttcatcgcctttcacctggctgactccggcagtgacgcccgcctgctgttcagtatcggtttaccgatggacggccttccggctgaacgccattctgcgatcttccgctcgatcatcactaaccgtgacgccttcttccgctatctgcggctactgctttctgagcttggcgacccgttcgccgcggccttggccgcgcagtcgggcggcagtgaaggcgcatggggccgcgggggagcggacgacgtgcccctactcgaagacctagtacgtgcgctctgcgccggtgatggccgcctatacgcagtcgagcgcttgatcagacgcctgaccgccgaagactccactaccgatccagtcccgacggagtttcgcgcactttgggaggccttccggttggcgatgcccgaggaggcaatccatgtccactga

SEQ ID NO: 341286 - DNA, 921 bp, Pseudomonas aeruginosa
atggagatccgcctctcccaagcgctgaaagccggcggcgagacgagcggtatcatcggtcgagacgccggggctcgacttcagcgacttccaagttccgtctattgggcaggcctaggttcctggggcatccgccagttccctggatctcgcgagacatattacgcagagctgccaacagtccgtcaccttcgacagcattccgacgtcgaggcagaaggctttgaggtacgtaagagcagctactggcatccaggcctaccgcccgcccctaccgatcttcttgaaaccgcctctttcaggctcactggcgatgaagcccagttcattcgcgaccgcttagttgcctcggcgcgaacctcactcctgacctggctcgccggccagtcgcacaatggtcaatgcgcctacatctggcagcatcccgcgctcgacgacttcccgacagaggctcgacgtctagtccagcatgcggagattttttccggcgtcatccatggtgcagcgctgctctacaaccttcaacttgcggagctgcgtgcccgcgaagactggatcgagctctatcgcggccgactggcccaatgggcggcagagttggacgaccaacgcctcgcagcctggtcactagaggacttttggcgtgcgatctcgcaccccacccacaccatccgtccagcgctgactcgcttcacccaagactgggtagcgttagctagaatgggggtctctggcctgccagactccgaggcggccagagcactggtccgcgagagggagcggcgactgaagacttcgcagtcacgcttcgcaaatcacaccgctctggatcgctggggtggggcctctggggcataccagttgtcgttccggtggaggcaggcccagtctcatctggaggatctgctaaatgcccaatag

SEQ ID NO: 341287 - DNA, 357 bp, Pseudomonas aeruginosa
gtgtcgacttccaacgaagaccagaaccacggcatccagatcgccctgcgcgcgatggaagccccgctgcgcgagatcgtcaccaatgccggcgaagagccgtcggtgatcgtcaaccgcgtcaaggaaggttcgggcaacttcggctacaacgccgccaacggcgagttcggcgacatgatcgagttcggcatcctggacccgaccaaggtcacccgcaccgcgctgcagaacgccgcttcgatcgcgggcctgatgatcaccaccgaagcgatggtggccgaggccccgaagaaggacgagccggcgatgccgggcgccggtggcatgggcggcatgggcggcatggatttctaa

SEQ ID NO: 341288 - DNA, 480 bp, Pseudomonas aeruginosa
gtggaaatcggcctgattctgggacaagacttgccgcccggccaggcaccgtattccatagaacaaatctggcaggcggtcagccagatctgtgtagccgtcgaaattgtggaatcccgctttgcgcagcgtgactccgtaggccgtctatccaccctggccgatctggctagccacggtgcgctggtctatcagccgcaaggtgtcgccgcgcaggatatggcactgctacaacctgaatgggcacgcctgcaagtggggcagcaacccttgctgcaagggccgaaccagaacccggcgggtgagctgacgcgactgctcatctggctggctaatcaaggcagccaccaccttggcgggctgcaaaaagggcaggtcatcattacgggcacctgtttacccatgctgtatgccgcccccggcgaccgaattcaggctgccattcaggggatcggcgagctgaactttatctgcgcctaa

SEQ ID NO: 341289 - DNA, 300 bp, Pseudomonas aeruginosa
atgccggttcaaaacctattggacgaactgtatgccagccgcccaggacaagaagatctagtggtcacccatggcgatgcctgcttgcccaacttcatggtgcatcaagggcagttcagcggttttatcgactgcggacgtttgggcgtggcagatcgttatcaggatctggcgctgacggcgcgcagcatagagcgcaatttgggcaaggagtggctagcgcctttctttgctttgtacggcgtggaaatggatgccgagcgcatcgctttcttctgcctgttagatgagtttttttaa

SEQ ID NO: 341290 - DNA, 318 bp, Pseudomonas aeruginosa
atggtctgcgggtttctgccccaggccagtttatggctggcggtggatgagacggattacccgctggctttcatgctgcttgagcagggccatatgcaggccttgtttgtggacccggacagccggggaacgggcgtaggcaaggctttggtgctgcacggcttgagcctgcatcccagcatgaccactgatgtcaatgaacagaatgagcaggctgtaggcttttacgaaaaaatgggcttcaagcgtattggacgctcgcccgtggatgatcagggcaagccatacccgctgattcacctgcagtatcaggtctga

SEQ ID NO: 341291 - DNA, 936 bp, Pseudomonas aeruginosa
atgctgtggctcgacggcgtgtacgtggaagccaccgagctgccgcggcgcgaactgcgcctgcaccgcgcccgtgcgcccaccaccgcgcagttgacccagctggcagctaccatcgcgcaccgggtgtgtcggcacctgacgcgcaaaggctggctcgaaggcgaagacgaatccgtgttcctgtccgacagcgcgggtagcgacgacggcatggatgggctgcggatgagttcgatgacctaccgcatcgccaccggtcgcgacgctggccgcaaggtcgtcacgctgcaaacattgcccggtgacgcaggctcgctggagggcgacgccggcaaggtcggcggcttctcgctgcatgccggcgtggccgcggaagcacacgagagccacaagctcgaaaagctgtgccgctacatcacgcgcccggcgatcagcgagcagcggctatcgatctcaccgcagggaagggtgcggtatcagctcaagacgccatggcgcaatggcaccacccatgtcgaatgggatgcggtcgacttcatcgcgaaactggccgcactggtcccgccacctcgcgcccacctgacccgtttccacggtgtgtttgccccgaatgcaaacctgcgtgcgcagctgacgccctcggggcgcggcaagcggcctgcgggcgatgcagtgccggtggacgtcagcgcccacgacgagccgcgcagccccgagcagaagcgccgtgcgatgagctgggcgcaacggctcaagcgggtcttttccatcgacgtcaccacctgcgcccactgcggcggcgcggtgcggatcgtcgccagcatcgaggaacccaccgccatccgcgccatccgcgcccacttcgagaagcacggcgcgctggagcaagcgcactaccggcccgcagcgcgcgcgccgccgccggccgcgtga

SEQ ID NO: 341292 - DNA, 405 bp, Pseudomonas aeruginosa
gtggacttcatcgccaagctggcggcactggtcccgccacctcgcgcgcatctcacccgcttccacggcgtattcgccccgaatgcaaacctgcgtgcgcagctgacgccctcggggcgcggcaggcggcctgcgagcgatgcagtgccggtggacgtcagcgcccacgacgagccgcgcagccccgagcagaagcgccgtgcgatgagctgggcgcaacggctcaagcgggtcttttccatcgacgtcaccacctgcgcccactgcggcggcgcggtgcggatcgtcgccagcatcgaagaccccaaggccattcgcgccatcctcgcccacttcgagaaacacggcgcgctggagcaagcgcactaccggcccgcagcgcgcgcgccgccgccggccgtgtga

SEQ ID NO: 341293 - DNA, 2133 bp, Pseudomonas aeruginosa
atggcacgtcgggcacggcgcgtacacgctgggcatgaacagcagttccacgctgacgaagccctcgccctcgcaggtctcgcagcgccccttggcgacgttgaacgagaaccgtccggcatcgtagcggcggcgtcgcgcttcgggcgtggcagcgaacagcttgcgcacatggtcgaacaggcccgtgtaggtggccaggttcgaccgcggcgtgcgcccgatcggtttctggtccacctgcaccagacgctgtacggcgtccacgtcgcccgccagatgcccgccggtcgcttcgatcactgccggcccttcgctggtggcgctttcggctacatcgtcttccggctcgtggcccaggtgcagcagcaccagctccggcagggcctgcgcgacgaggctggacttgcccgagccggagatgccggtgacggccgtcagcacgcccagcggaatgcgcgcattcacgccatgcaggttgtggcggtgaatgtcctgcagctccagccagccggtcgcttcgcgtgcccggcttcccggcgcggggatctcatcgaacaggtagcgtgcagtacgcgattcggcaatcttgcgcaggccatccggctcgccgctgtagagcacacggccgccacgctccccagcatccggcccgacatccacgagccattgcgcgcggcgcatcaggtccaagtcgtgctccaccacgaacaccgagttgccggcgtcgcgcagccggtcgagcgcgtcgtacagggcctggctgtcggaggggtgcaaccccgccgagggctcgtcgagcacgtacacgacaccgaacagcagggaactcaattgcgtggccagccgcaggcgctgcaactcgccggccgaaagcgtcggcgtggcccggtccagcgtcaggtaacccaggcccagcccacgcagttgacgcaggcgcgccatcacaccgccggccaggcgctgcgcggcgaggcgcttttcttccgacagcgccgaggtgcggcgcacgtcgggcgataccgcatggacggcacggccggaggccgcgcgttcggcacggtcgcgtcgggtcgcttccttgtccgtagcctcccccgctgcatgggcgcggaaatcgccctgggcaatgggttcgagcaaggcagccaactggtccagcggcatctgcatgaacgcgccgatgtccacgccggcgaaggtgaccgacagcgcctcgggcttgagccgcttgccgtgacaggtggggcacggcttgccctccatgaaccgagacacgcgctttctcatcagtgcgctttgggtattggcaaaggtgtgcagcacataccgccgggcgccggtgaaggtgcccatgtagctcggctccatcttgcgcttgagcgcggcgcgagtttcggcgggcgtgaagccggcgtacaccggcactgtcggtgtttcctcggtgaacagaatccagtcgcgatccttcttcggcaggtccttccacggtcggtcaacgtcgtagcccatgctgaccaggatgtcgcgcaggttctggccttgccaggcggggggccaagaggcgatcgcccgctcgcggatgctcagggagggatcgggcaccatgatggcctcggtcacctcgtacacatggcccaggccgtggcaggccgggcacgctccctgcggcgtgttgggcgaaaaatcctcggcgtacagcatcggctggttggctgggtaggcgccggcgcgcgaatacatcatccgcaccaggctggacagggtggtcacactgcccacggaggaacgcgcgttgctggagccccgctgctgctgcaacgccaccgccggcggcaggccgtcgatcgcatcgacgtccggcacgccggcctggtcgatcaggcgccgcgcatagggggccaccgactcgaagtagcgccgctgcgcctcggcgtagatggtgccgaaggccagcgaggacttgccggagccggaaacgcccgagaacaccaccagcgcgttacgcgggatggaaacgtccacctctttgaggttgttctcgcgcgcgccgcgcacttccaccatgccgctggccgcagcggtacaagaggattcaccgaaagaattgtttggcatgtttttatcctgtag

SEQ ID NO: 341294 - DNA, 261 bp, Pseudomonas aeruginosa
atggacccgatcctggctgcgctctcaccctcgctgctggcactcgttgaaggaagtttgtccaacgacgaagtgtcttccgacgaggaaatgcaggagtacttcatcagcaatggcctcaccgaggaacaggcacggcaggcactgacctaccgcgaccagtacctcaaccacatctacctggacggcttcacgccgatcacctcggcagacgaggcgcttcacttcaacccgcacacccggcagttcgagccggactga

SEQ ID NO: 341295 - DNA, 324 bp, Pseudomonas aeruginosa
atgtccatcatcgcttgcgacacccctcgttcaatgctggacgaacccgcatggcgggaactctgcaagacggctgctgcacacgcccagcgtggttgcggcctgtcctacgaacactacgtgacgctcttcagctcggagatcgacgcgcaagtcgatcgtttgccggaaaaccagcgctctcaggccctggaaatcgcgacccaggaatgggactacgcaacacctgccgaacggcaggaaacccaggactggctcgctgaaaacggctgctgctcgcacgggatcacgctgggttgctgcccggccggttgcggttcctag

SEQ ID NO: 341296 - DNA, 228 bp, Pseudomonas aeruginosa; identical to SEQ ID NO: 323928

SEQ ID NO: 341297 - DNA, 957 bp, Pseudomonas aeruginosa
atgggccaacaatcctggcccggcaagcccccgggcaatcgggcggctaggggcaggaacctgcacaatcccgtcacagcagcggcaggccaacttgggccgcacgtggcgaatcaccttgaagcgcgccggcacgtactccagaacttcggccacgtcatcgcccagatgacgaagttcaccgccacagcctgggcactgcgcatcgggtcgatggacgtggatttcacggggcaaatgctcgggcaatggcttgcggcgtacgggtgtacgtgggcgcgattgggctggtggtggcgaggccaatgcggcctggctgacctgcaactcttcgagcgtcagttgcagttggtcgagcatgccatcgagttgctcggaacgccgaccgaactgcatgcgccgcagcttggcgatcatcagtttcaggtgctcgatttccccgcgctgggcggtaaccaaggctttcaaggcctggatgtcgtcaggaaggaagtcggtcgcgcaagtcatggcgcgatgttactggtgttctcctgcgttgaaaatcagaccgttcgtaccggtgcggtgcgtatcggtcggcgccaatcgatgccctccaacagcatcgcgagttgtgccgtcgtcaaggagacgctgccgctggtggcttgcggccagacgaagcgcccctgctcaagccgcttgcagaacaggcacaagccatcgccatcccaccacagcaatttgatccggtcaccgcgccgtccccgaaacacgaagatctggccggagaatggatccgcttcaagctgggtttgcaccagggccgccaggccatcgaacccccgccgcatgtcggtggctccagccacgatccagatgcgagtcccgatgggcggggcaatcatcgcaacacctgctgcaagaccagttgcaaggtttgcgggtcgggcacgccctcaatgcgcaaggtga

SEQ ID NO: 341298 - DNA, 402 bp, Pseudomonas aeruginosa
atgccgtggttctggtcttcgttggaagtcgacacgcccgtggcggaagccttcgacatgcgtgccggggtctgccaggacttcagccacatcatgattgccggtctgcgcggcctgggcattccggccggttatgtcagcggcttcctgcgcaccatcccgcccgccggcaaagaacgcctggagggtgccgatgccacgcatgcctgggtgcgcgtctggtgcggcctgcaactgggctggcaggaattcgatcccaccaatgccatccccgccggcaacgaccacatcaccatcagccacggccgtgactacggcgatgtatcgcccatcagcggcgtactgaaaacctccggcgcccatgaagccacgcaggccgtggacgtgatcccgctggactga

SEQ ID NO: 341299 - DNA, 876 bp, Pseudomonas aeruginosa
atgatcgcgatcatcgaacgcgtgcatgcgtggtggtggtccacccgtccggggcggacgctggcgctttatctggagagccgggggcctttgctggcgcgggggatgtcgttctccgcggtgttctcggtattcgcggccatctatgtgttcttcgccatcttcggcatcgtgttcgagtcctcgccgctgttgcgtgatgcggtggtggaaggtctgtcgagcaccatcccgggcctgatcgataccggctccggtggtgcggtgaacgtggatgcgttgttcgacgtgcaggtgctgggcatcagcggcttgatcgtgctgggtatcctgaccttcacggccagtggctggctgcgcagtttccgggatggcgtgcggaccatcttcggcttgccgcgcaaggatcgcggtttcctgctgatgcggctgatcgacgtggcgctgattttcgcgctgggcgtgctgatgatcctgtcggcggcgttttcggtgatcagcacgcacgccttgggcctgatggcggcatggctggatccggacaatgctcatacctggggctggacgctggtggtcctgggcctggtggtggcgcttttgatcgacgtgctggtgttcttcatgttgttccgcatgcagtcgcgcatcccggtgggcaatcgcgtggtactgcgcgcggcactcctcggcgccgtcggtttcgcggcgctcaaattcctgggtgccgaattggcgagtggcgcgggcaacaacccgctgatggcgggttttgcggtgatcatcggcctgatgctgtggttcaatctggtgatgcagtggctgttgttgaccacggcgtggattgccaccggtccgcgtaccgacgcatcgccctaa

SEQ ID NO: 341300 - DNA, 405 bp, Pseudomonas aeruginosa
gtggacttcatcgccaagctggcggcactggtcccgccgccacgcgcgcatctcacccgcttccacggcgtattcgccccgaacgcgaatctgcgcgcgcaggtgacgccatcggggcgcggcaagcggcctgcgggcgatgcggcgccggttgacgcaagcgcccacgacgagccgcgcagccccgagcagaagcgccgtgcgatgagctgggcgcaacggctcaagcgggtcttttccatcgacatcaccacctgcgcccactgcggcggcgcggtacggatcgtcgccagcatcgaggaacccaccgccatccgcgccatcctcgcccacttcgagaagcacggcgcgctggagcaagcgcactaccggcccgcagcgcgcgcgccgccgccggccgcgtga

SEQ ID NO: 341301 - DNA, 801 bp, Pseudomonas aeruginosa
atgatgacttttctgacgcgtgcgcgcctggccgccgatctggcggcgctcggggtcgtgtccggtgacatggtgatggtgcatgccgcgttcggcaaggtcgggccggtgctgggcgggcccgatgcgctgatcggcgcgctgcgcgatgcggtgggggcgcagggcacggtgctggcctatgccgactgggatgccgcctacgaggcgctttgcgacgccgatggccgcgtgccggaggcctggaagccgcacgttccgcccttcgatgcggccgcctcgcgcgcgatccgcgacaatggcgtgatcccggaattcctgcgcacgacgcccggcgcctgccggtcggccagtcccgggccctcgatcaccgcgatcggggcgcgggccggctggctgaccgagaaccacgccatcgactacggctatggcgaaggcacgccgctggcgcggctggtcgaggccgggggcaaggtgctcatggtcggcaatccgcgcgacacgatcaccctgctgcaccacgcggagcacctggcgcgcatccccaacaagcgcatcaagcgggtggaggtgccgttcgcgacgccggaggggaccgtgtggcgcatggtcgaggagttcgataccggctcgccggtggtcgacggactcaacgaggactatttcgccgacatcgtcgaccagttcctggccaccgggcaggggcgcgtggggcaggtgggcgccgccgagacgctgcttctcccggccccggcgatcgttggcttcgcggtagagtggctggaagcgcggttcgcgtag

SEQ ID NO: 341302 - DNA, 306 bp, Pseudomonas aeruginosa
atggcatcacatcgcatcgaaacctactgtcagagcctggcgttccccatcggggcgctcatcttcagcaagggcattgaccgcctggtccgctcgggtcgcctcgacccgatcccgtacttcaggcgccacacccgtggcgactggggcgacgtcaacgtccagcaatggcaggccaacagcaccgcgcttcaatcaggcgcatcgctggcatcgcactacgtgatccatccggggctggccattcgcatcgttaccgacgcggagcgccacgccaccgtcatcgttctgccgtccgaggactga

SEQ ID NO: 341303 - DNA, 240 bp, Pseudomonas aeruginosa
gtggtctggctctactacctgatgggcagcgcgctcagggcgccggccgcctggctggcatccgccgcctttgccgtcggcgcgctgctggaactgggccagtacctggcggcgcaactgcattggcaattctccagccccgtgctgcgcatcgttctcggcagcaccgccgacggcttcgacctgctcgcctatgccctcggcgcgctgctggcatggtggctggagcgccggcgctga

SEQ ID NO: 341304 - DNA, 243 bp, Pseudomonas aeruginosa
atgatcgactggagccaggtaaagaccgctgaacagcaggcgcaaggacgctggcaggctgagtacgatgccgcagccgcggcgcgggcggatgcctaccgcttggaaagtgatccgctcaagaccgaggccgagttcgatgcgatcaaggccggtaccgagccggactacagcgcctgggtggccaaggtcgaggagatcaaggccaggtatccactgccggtggcgatcctgggcgaatga

SEQ ID NO: 341305 - DNA, 258 bp, Pseudomonas aeruginosa
atgttgcttcaagatattgtaaaaaatgaagatgtagaggatgttgtaacattcctcgggttgacatctgattaccgaaagctggaccggctttatacttacaacaagcctgatgttgtgatcagcggagagctttcagagaaatatgacgaactattccggaagggtgttctcgaagaaaagaatggaaaagttattaaaggacctaattggaaagagcctaaattcgtaacggaaaaaaaatacgggatcgtgtga

SEQ ID NO: 341306 - DNA, 633 bp, Pseudomonas aeruginosa
atggcatttaagcatgaggggccgaaggtcctattgactgaaggggtaaatgactgccacttgatttcggctctttgtaatcattataaaattcctgataggtttggactttatgagtgcgggtctgacaatcaagcaataagacgactatccgctttaattgccagctctgagaaaaaagaaattatcgggattgttattgatgcggatgcccctagtctggcaggacgttggagtgcaataaagacacgattagagcaagagggttatacagttcctgatgagcctcatgagggcggaacaatattggcctctgaaggtaagcccagaattggcgtttggctaatgccggataatcaagtgaatggaatgctggaggatttttgcgaaaggttggctcctcctgatgctataagatacgcctcggagtgtgcctctgaggcgagggctagaggggtggccacctacaaagagttacataatgcaaaagcacgaattcatacttatcttgcgtggcaggatgaaccaggaatgccacttggaagagcagtatcagcaaaagtcctagaccctggacaacctatagcaaggctgtttaaagaatttttggttaatctttttataaaggaataa

SEQ ID NO: 341307 - DNA, 867 bp, Pseudomonas aeruginosa
atgcgccacctgttttatgggcacaaactaccaaaatttggcgaagacggcctcagtctctcatcaaaaaaagataaacgctcttttaagctaaaaatagctccatatataaaggagcgcgacccagaacggatgataattacatatgttcctctctcaaaagaagatgtgagagcgatggatgaaagcttgtatgagaatttcgttatcctcgaaaaaggtagtgagataattagacttataagctccgactctgacatgagagagatggagagaagaatgaggatttcaaaaaacaagttcccccaagagaactgcttatttgtgcctacatatgggttggatgaagaggagatagcgagcttatgggacagtataagtctaaccgagcttgaggatgctgtgattaggggattgagacttattgagccgaaagtagaagcaattgcttttgttggaggggatcggcgctcaagagttcctctagtaaagctaaaaggccagattgagcctatgccattaagaagtcttggcgacggcatgagaaaaatatttcaaatcgtactgagccttgccaactcaagagacggggtcttactagtagatgagtttgaaaatggacttcactggagtgttcaagaggaagcctggaagttagtatttgaactttccagagcgttaaatgtacaggttttcgctactactcacagcagagactgtatcaatgggtttgagagcgcatggtcaacagatacagactcaggtagcttccgaaggatcgctaaagatggcgaaaaagttcattgcaaagagtataagcttgagcttttgaaagattctctcgagacggacgtcgaggtaagataa

SEQ ID NO: 341308 - DNA, 333 bp, Pseudomonas aeruginosa
atgccaatcgcgacgaccgttcccgacgtggatgacttgaaacggcacatgcgcatcaggcacagccaagacgatgagtatctggaggagaagctggcggcggccatagaccaggcggcgcagttcctaaaccggccaattccttggccagaagatccggatgcgtcccctgtcgtttttgcgccggttccgccgagtattcgggcggccatactgattcaggctgcggaattgtgcgccaacggggaggcctcagtggtgggttcgatctacaccgtgattcccactgctcggaacttgctcaacccgtacagggtgaaaatgggggtgtga

SEQ ID NO: 341309 - DNA, 180 bp, Pseudomonas aeruginosa
atggagcttcgtgctatccagccggtgtaccgcggtggccggctgatacagcctggtgagccgttcaccaccactgcagaagatggtaagtcgctgatccaggaaggcaaggcgcgcgaacctcatgtcaagaagcccagtgccaagccggctaaggctgattcaactgaagagaagtag

SEQ ID NO: 341310 - DNA, 186 bp, Pseudomonas aeruginosa
atggaattgaaagcgctgcgccccatcttggtggataggctcgggactattgccgagggcgcgaccttcgaaaccgacgaccaacacgccaggcaactgatcgggaaaggctatgcggtggaggccaaagaagccgacgcagatgactctccgctacgccgccgcaaatctggcaagaaggagtaa

SEQ ID NO: 341311 - DNA, 159 bp, Pseudomonas aeruginosa
atgctttcctctgacgaacaggctgacttggccgccgcgctggtagcaactgccgaaacgcttggtcaggagatgagcgccaatgccgcgaagctgatggccaaggatctcgcggattatccgggggatgcgatccgtagcgctctgcaggcgagctga

SEQ ID NO: 341312 - DNA, 261 bp, Pseudomonas aeruginosa
atgactgacgtaatcgaaaagatcgtttcgaagctcaacgagcagaagggtgaactcctgggcgtgcacgccatgcttgccgctgtcgctcgctcacttccgcaaagccaactcgcggtactcctcgaggagttcgataccgagatcgcggtggcgcgctcaacgctcgcgtattcacccgtgccggaagaggtcatttctggtctcgagaattacgtccagatgtggaacgcaattcggattgagccaaaccacgactga

SEQ ID NO: 341313 - DNA, 387 bp, Pseudomonas aeruginosa
atgcacgcaaccatcaactgcggcggatggatcggccgccagggcctcggcctggctccccgcgaactcgaagctacggcctggagcgccagcgaactgaccgcaaaggaagtcgcgcggcgcatgggtatcgcccctgggactgtcgagaaacgtctcgacgacgcgaaattcaagatgggcgtgcgcagcgtgcgcgggctcgtcctcgaagccttccgccgcggaatcatctcgccggccgtcttcgtgctcgcattcctcgtcgccggccacccgctgatcgatgacgaccacatgaacaggacccgcaggccgagcaacgagcgacgactcaccgacgcccgcaccattcgccggatcgaagaaatcaccatcaacgcgtag

SEQ ID NO: 341314 - DNA, 576 bp, Pseudomonas aeruginosa
atgatgcatcgcgtctacttgtccggccccatgaccggcattcccgatttcaactaccccgcgttcaacgcagaggagaagcgcattcgcgccctcggttacttcgtcgagaacccggcggtcaacatggtctaccgtggcgcgccgtgggaggcgttcatgcgcgatgggatcaagcgcttgatggactgcgacattctcgcgttgctccccggctgggagcggtcccgcggggcgaacatcgagcgcggtctggctatcacactcggcatgcgcgtcgtcgacgccgaggcactccctccgcccgatttcgtctgcaagtgccgcacaattcagttcacctgctgctcggtaccgagcgacaacgatccgttcgtgtgtcgccgcctggccggcatgccggcatacctctccccggaggatcaactggcaaccgcacgccaggcgctcgaaaagatcgccgcactcaccgacgtctctaccggcggtatcggtatggacgtgctcaagatcgccaagcaagccatttccacgtgccgccctcctgaggaaacgccatgcacaccctcaacctga

SEQ ID NO: 341315 - DNA, 222 bp, Pseudomonas aeruginosa
atgagtgaggtccatagcatcacaaccgagcaccttgccggtgcttcagccctggatggcgaggaactgaccctcgcccttctgcgagagaacgaagacctgatcaagcagaacaagcgcctcggcaagaggaagccgcatccatggctgatgttcttctttggggcggcctacggggccgctgtcgcagggatcaccgtcgtctactggagcctgtcatga

SEQ ID NO: 341316 - DNA, 132 bp, Pseudomonas aeruginosa
atgcatcacccgcagatcattggtctggtggtggccgataaactggattgccgtctccataggcgcaccaatcgtcatctggcggctctggcgtctttcccgcaggaggaagtccaatggctgaagaactga

SEQ ID NO: 341317 - DNA, 825 bp, Pseudomonas aeruginosa
atgcagaaaggccaccctcgggtggcctttctgcatggcacgtgggcctgtagggcgaataaccgcttgcggttatccgccgttgtggcgggatctcggcggataacgccggtggcgtattcgccccacggaacggagccccctccagggtggccttccagtgtggcacgtgggcctagggcgaataaccgcttgcggttatccgccgtcgtggcgggatctcggcggataacgccggtggcgttattcgccccacggaacggagccccctccagggtggccttctgcatggcacgtgggcctggtggggcgaataaccgcttgcggctatccgccgttgcggcgggatgccggcggataacgccggtggcgttattcgccctacggaacggagccccctccagggtggccttctgcgtggcacgtggacctggtagggcgaataaccgcttgcggttatccgccgttgcggcgggatgccggcggataacgccggtggcgttattcgccctacggaacggagccccctccagggtggccttctgcgtggcacgtggacctggtagggcgaataaccgcttgcggttatccgccgttgcggcgggatgccggcggataacgccggtggcgttattcgccctacggaacggagccccctccagggtggccttctgcgtggcacgtggacctggtagggcgaataaccgcttgcggttatccgccgttgcggcgggatgccggcggataacgccggtggcgttattcgccctacggaacggaggtcactccagggtggccttgctgcatggcacgtgggcctggtag

SEQ ID NO: 341318 - DNA, 3810 bp, Pseudomonas aeruginosa
atgagattccatcctgacggcccctccattccagacatcctcctagagcgctgtgatgctggccgcgttgtatttctctgcggtgcaggcgtttcattgcaatcaggaatgccgacttttgtaggtctcacgcagtacgtcattgagcactttgatcccccagccgactcagaagtcatggctgcgtttcgaccatgggtggaggggcagtccgcagcgaatgtccctctcgatcaaatcttcaaccttcttcatctggaatacggcaaggatgaagttaacgcgctggtcacagagcggctgagtgctcctctagaaataaatgacttcgggcgtgagcacggtctgatcaagcggatctcttcgagccagagcggcgtgccgcagattgtcacgacgaacttcgaccgattgttcgaggccgggcaggacggggagcatttggttctgcacgtgccgcctgcttttccagacctgaactacggatcgaaaatagaggggatcacgtatctacacgggcggctggtggaagccgcctctgaaagtcatccctacgttctgagcagcgcggacttcggacgtgcctacctttcagaaggatgggccactagcttcatcaggcacctcctcgaacgatataccgtcgttttggtcggctatcaggcggaagacccacccataaaatatcttcttcagggcctcaatcatgacggtcagtatgatcggtctaggctttatgcctttgaccgcgggcttccggaagagatcgaagtcaagtggcgagaccgaggcgtcacagccatagcctattccaatcatccagacctatggcggagcctggaggcctgggcagaccgggccgatgatccacgcaggtggcgtgcatccataattgctaagagccagcagaacccgaaggatctggcgccttatgagcgtggccaagttgcacatgtccttcgcaccgtgcagggggcgagactgttttcggaggctgacccagcacctcacccggaatgggtgtgtgtaatggatgcgaatatccgatcagccaaacagagccgcagctatggtgctgatgcagaaactttcgaccctagcgccgcttatggacttgatgacgatctgctggggctcactgaggatgatcgaagactgggtgtcagcaacgacaatctccttatctggcgtgatgaggacgatagcccgcatgacgtccatcgattgggtgaccggcagcccgagggcttcgaggcggtcccgaaaaggctaggtcatctcatgacttgggtcagaaagtcgcttgatagccctgtgcttgcgtggtgggcgattcggaaaaacggacttcacccgcgattgctgcatgagattgactggcagatagagcacgggacggatcttcacaagcgagctcgacacacttggcgtctgattcttgagcaccatcgagactctcgcaatcgtcagatcaatggcgactggttcagtctgaagaagctgatagcgaaagagggctggggacccagcgtccttcgagagttcaggcgagtaaccctgcccagagttgatatccgctcgccatttggcttagcgcaatccaaaccaccatcttcaacatgggaggaaattcacctcagtgacctcggtgagttcgacgtcaagttccttgaccggcataacgaggttctagaaatcccagacgatatgttgccggcggtagtttccatcctgcaggagcagctaacgattgcctccggtctccttgttgatatcgagccagtctacgttgagaccccaacttgctatccggaccgagaggtcgtcggtagagagcgtaggaccgaagacgcagagattacgacttggttcatcgagctcttcgaccgaatgactggccttaacccagagctggcgaatgcctatgcaatggtctggcccgagacagatcagttctttttccggaagctcaagctttacgcgttcaacaagacaacggtttttgatgctgactttgttgccagctcgatattggccttcgatcaagaggccttttggagccgtgatgcagccagagagcttcttttcttgctggcggatcggtggagagagttctctcaggagcgccgagaccaaattaccgatcggatcctctcgggccctgatcagctttcccatttgactgaagaccagcaccatgatctgcgggataggctcatcgcccgatatgctcggtatctcgaaattaagggttgcgttctgacggagaactatagggagtggcttgccggaataatcaggggcatttctgaatgggacgacggttgggcgacctcgacggtgactaaatggggttcacaagcaggctgggttcgcacagacgaaaccgccgacgagcttatgagcattccagtgaatcaggtcatagccacggcgaagggagaccttaaacgcgatttaggcagcctcaccgagaagcggccctttactggtttagtgaaagccaatccgcgcaaggcattgtctgcgctgacgattgcaggaagggctgatgactacccagaggcgttctggtcctcgatgatagatgaacttcctgcagacatcccgccgagacttagacgggtatttctaaatcgagtagcgcgactcccgtatgcggttatcgccaagctgtgtcataccttgggccggtggctcgagaaaaacttggtcgcgacccttgagtttgatgatggtctcggttgggcagtctgcgatcacattgtgggtggcattctaagcggtggagcagacgcagcgaagagcgggattggcgaagtccgtcaaggagggcaagtcattcaacggtcccgacgtacacttgagcacgcaatcaacggccccgttggcatgtgtactgaggctctgtttcatgcagtgtccagggaggagaaagaggctggatcactcatccctgatcacatcaagcttcgtatagagcgccttttttcggcacctggtgagggttcggatcatgcggtgtcgatagtgagcagaagactgaactggctcatgttcgttgatcccgtctggactgaggggcgtcttattccaatgttggaatttgatcatcctgcttcggaacctgcgtggaacgggtttcttcattgtgggcgggtgccatggccgccattggccgcaatcataaaaccgcttctgcttcgtctttttccgtgggtcgaaggcttttcctggaaccaagagctctcaaacatagccgcccaatggctgggcttcatgcgggtatttcacccgaatgagcagggcggtctctcacaagttgaaatgcgttcggttttgcgggcaatgtctgatgaaactcggaatcgattcattttctggttgggtctagttggaaaggaaaacgagaatggttgggccgaacacgtcatccccttaatcaatgaggactggccgagagagcgtcgatataggactgctgcatcgatgaggtcatggatcggcttgcttgatggcgccggagatagttttccggccgtttatgaggcggtgaagcaattcctgatgccggtggagacaagcgaccattcgctttaccggtttacccgagagactcatgatgagacgccgattactgttctattccctgaaacgacgctggacctgctgaacagagttacgcctcaggttcttacccgtctgccatatgcgttaccgaaggtgctagctctgattgcggaagctgaacccgacttgacattagacgcacgctatttgcgccttatagatcttgtagagcgaagctag

SEQ ID NO: 341319 - DNA, 888 bp, Pseudomonas aeruginosa
gtgttaacgacaagggatgcagcaagacttttctcaagcaagcgcattgcagagattgcatctggaaattattcctatttgttagaagtcgcagaacactatcaagactcgctcaaaagcaaattcactgcaactgaagttatcgatcatgtttattccgaaatatcgaaagactacagaagtgaatatttcttcaagaatactgttgctgaacgactgttactaggccgccactctgtaaacacagcaactgtactcccagaattcagagtcggccgaagcaaagccgactgcgtaatattaaacggcagctcaacatgctacgaaataaagtcagatttcgacaatcttgacagactcccagagcaactatccttctacagaagagttttcgacagaacatatgtagttgttgggcaatcttacttagaaaaggtacaagagctctgcgacgaggatattggcgttatagagctaacctctaggaaaagcctccgagtaattagagaggcaaaaacctctaaagaccctgtagacgtctctatcttaatgagatccttacgcgtagacgaatacaaggaaattgcttcaaaagtttccaatgcgtgcattgactatccgaacacggaaatcttttccgtttgtgaagaaatactaaaaaactctccatccgacgaagtcagagaagctttttgctccactctaaaacaaagcagaaggatcgagaaagattacatactttcacttccgcgctcattattaatggcagggataggattcaagctacgcagcgaacagcggcgtagtcttgtagagaacttaaacagaagctttagtaaggatgctctatgtactacccaattctacgaggcaagcaatttgagctaa

SEQ ID NO: 341320 - DNA, 909 bp, Pseudomonas aeruginosa
atgtactacccaattctacgaggcaagcaatttgagctaatagctctcagagagctcgcagggcacattcaatccaaccttattcgaccagtaattgaacctgtgagaggaaacatttcccctctcatcaagacaatagaagcacttactgagtcgggcatagaacccttagtaataatcaatccaagcataggcgacttcgccaaaggctcagatgggctattcgagcttctcaagtctacggagcacttcattccttgcataaaagcaaagagcgtagaagacctgtctctgttaaccgaattagagctttctctaactgacagtgctgtttttatagaaagtggactagacaagtctctagtcgacagtctccaagacgcgagctgcgtcctcgtaaacaaagacaaagttcactcaggcgcaatcaatcgcctaaacaatgtcgtactttttggggacttcttcgataagaaaatcaggaatgctgactacgaagaaaaatccttctattcctcactccatacagagtggacatcttacagaaacgcaatcggatttggtgattacactattttgagcgaagaatacagcgaggccggcggccccgcttatgtagtgactatccaccttagttacattgacaaggaagagttcgacgccatgtatgttcgacacttctcgtcgttcaatgatgactctccagcaaacccgggcggaaaattcaagtcagcgctagaagaagtctcgaattacatttccaaaaaccccaacacgtttaccgaaacgcagggactaagcgaactattaagcctgcgcgggaatcctttccctggactaggtcaagtaaagaaatactcaatgaagcaccatattgagaccacctgcgaatttgttcgaggtgcataa

SEQ ID NO: 341321 - DNA, 1029 bp, Pseudomonas aeruginosa
atgaccagatgctgcgttcggtgctttcaagattctgtcatcgtggcgaagatcacctcggaagacgaaataagtcgctgtagttattgtggaaacaatcaggtttcttgcatagacccgtcacgactctctgaaaaaattgagttatttacctatggtctacgagagagcgaaaatggttactcattctctgaaattctttccctctatggaattttcagcgaacaagtacgagaccgaaacattttaatcaatgatattttcggccctggctcagcagaaaagcgctactcttttgatttcaacatcgccagttacactgagcaatgggatgaatttaagctcgaactaaagcacaagaaccgtttctttcctaaagcgacaattcactcatctttattcagccgcttaactccgaacagcacagatgcagttctattccagctgcttgagcaactcaaaatacctatcaaccaaagggatagcttttatagagcccgagtatcagaaaagcctctaaatgcaaatgaaatggggtgcccgccgcctgacctcgtcacaggaggcagagcgaaccctattggcatcccttacctctatgtggcagacaccttaaccacgtgcatcagcgaagtaaggccaagcaactccacctgcgtacatgtctctcaagtagcacctactcaagagctttcagtactagacctaacctcgcccaggatgctctgctctgcatccgcatttggggaagagcaactgccaaccgtcctaggttttttaagtctacttgaattgttctccgcggagctttccaaaccagtcaggcccgaaaatgggaatctggaatatattccaacccagtttctttgtgagttcattaaaagcgaggcgaaatttgacggcctaatattcaacagctcatttggcgacggaaagaactacgtcttctttgatggggcaaccctcacccctagccaaccacaaaagtacgtggttaataggacgctacatgagtacgctcttgcatag

SEQ ID NO: 341322 - DNA, 1785 bp, Pseudomonas aeruginosa
atgtggtcagataccgaatctgataaggactaccttaattttggggaggtctcgcaaatcgcagtcgacatcctcacaacagaaggcatgttaccggtctctgttggagttttcggtaactggggtgccggcaaatcctctcttttgaagctaattgaggagaagcttgaacaggatgataaagactggatcgtcattaagtttgatgcctggctctaccaagggtacgacgatgcccgagcagctctccttgaggttatagctactgccttgacccatgccgcagatggaaatgcaagcctggccacaaaaaccaaaaagcttctcgcacgtgtcgatggattccgcgtaatgggcttactagcagagggagctgccctgtttgccggagttcccaccggaggccttatcgccagaggagttggcgcgctggagaatgccactaacggcattcaagatcaggaggagtacgaaagccttgggaatatagctaaagaagcgaaagagcaggctggcggcctgctgaggcctaagaaaaacaaaagccctccccagcaaattaacgctttccgggcagagtatggacagatactagatgaactcggtaagccactggtggttgttatcgataatctcgatcgctgcctacccaccaacgccatccatactcttgaagcaattcggctgttcctatttctgacaaatacagcctttgtaattgcagccgatgaagaaatgattcgatcatcagtggctgactatttcaaaggggcctctgaccggcaccagatcgattatctggacaagctaattcaagttcccattcgagtgcccaaagctggcgttcgagagattcgctcttacctatttatgttatacgccattgaccaccgcctgcccaccgacaagcttgaaaagcttcgaagcggcttggaagaagcgctgcaacagtcttggaaagacgatcccattacacgacaagacgctctgatactgactggagaatcagaagacggcgacttagccagggcattttctcgtgcagatcgtattgcaccggtactcgccaactcccctatcatccacggaaatcccagaatagttaaacgactattaaacgtcgtaaaaatgcgatcacaaattgctaaacgccgctccatgcctctagacgaagcaattataactaaattagttatatttgaacgctgcgtgggggtgaaggcaacggctgatttttaccgcctagtagatgctgagcagggaacgcctaccctgctcaagcagctggaagaaaacggtggccggatacccgaatacgccccaaaaacatggacagataaccccaccaccaaatcatttattagtgactgggctcaacttgagcctcgtcttagcggagtcgacttaagagctgcgatttatctatctcgggaaacaatgcccatcggtgcttatgtggtgggcctctccccagctggaagagaagcacttgatgcattggtaaataccaagaacacaagctcaccaactgcagaaaaaatattcgacacgctcccactagaagatcagataccggtaatggaaggagttattagccacctcagacagatatctgattggactcggcaaccaaaaggatttgccggagcatgcttactggctcgtcattcggaagatgctgccaagatactagttcgatatattcaggacttggacttgggtggcaaatacccaccgtggatggccacagctttgaaagaagaacaatggcatagggacgtttaa

SEQ ID NO: 341323 - DNA, 753 bp, Pseudomonas aeruginosa
atgggaacctcgcaatcgagtacaggcccgggaggtggttcaccactggtaccggcttgggcagatgaccaaccacaacagccattaccacctccagaagcggcacgcttcgcgccttttcgaaaatctttaggtagtgctgtatccagcggcaatcgagatgactttagaaaagctatcggacactatgctcgaaaggctagcggcggcggcggagctgcagccagaagaatgggcagcgtcactcaggcaggggcaggcctcttcggagcactggcaggactgcctgctggcacaggcgagataagtattgatcttgggagtctagccggtctgccctgcgagctagcgatttcctccatatctcaagcattgacaaccgaagatggtgactcggagaaaatccgtgcagcaatgaaccatgctttagttgaagcgctggatggcgtggaaactttcgacccccaatgcatctctgacgaagtaatagtaaacgtcatgattggatacctgtccgagagcatctttctacagatggtgatggattcagataaagcctggaacaaggcggaaaccactgcccaagcaatacgggcagaaacggagctacgagaactgataaaagttgtagtcgacaaaaaaatggcccctaagctcaccagtaatgtaagagctattagccggaagcaaatggcccaaattgaacgccaggccattattgatgcgtgggcagaatgggaggcctaccagtga

SEQ ID NO: 341324 - DNA, 1305 bp, Pseudomonas aeruginosa
gtgacacagttagtattccatcacaatactaaacacctaccttctgccagtgacacgctattacccgttcaactttatggaatcagtggaaagactagaggtgacatatccacaatcgggaatccagttctcgataggatgcaacgcctagggatacaagttccaagccaggttatggactttctaacaatcgcactttcagtgacggctgcggacacctttgtccggcggaccgatgctgaagatggttggacacgccgattcaacatacagctccctctctgggaaccggctcgatggttaccactgcaaaaggatttagaggatgcactccacttcctgagtggcgacatgtgggaatttgagttccaagaaggtggctaccctcctccaataccttatcgacagaaagaccgattccaactggtgaatctcaaaggacttgactctgtatgtcttttttcaggcggattggattcagcgattggcgcaattgatctgatggagaaaggccgcgctccgctactggtaagtcatgcttataagggggacaaaacgtaccaagataagatcgctcttgcatttaaaggacgatattctcgctttgaggtcaacgcagatcctcatttgtatacgggggaaacggacatcacgatgcggacccgtagtctcaactttcttgcatttgcagctgtcggcgcctgtgctgtacaagctgtttcccagcaagagaagatagatctattcgtaccagagaacgggtttatttcattgaatgcgccactgacgccacgccgaatcggaacgctgagcactcgaaccacccacccacactttatagaaagtattcaacgtattttcgacgcgtcggatatcccttgcagaataatcaacctttaccaattcaaaaccaaaggtcagatggtcgcagaatgcaaaaacaaaaagttgctggcaggtatcgtaaatagcacgatctcatgtagccattggaagcggtctaatcagcagtgtggcgtatgcgtgccctgcattattcgtcgcgctgctcttcatgccggaggagtcaacgataatgttgaatacgcctttgatgcgttagctgacgtcctgagtgaggttgaccgtagagatgaccttttagctttgtgcattgcagtcacacagaaagcaatccgaaaggccggaccatggattgcagatagcggccccattcctgtagcagcgtacaaagacttccagaatgtctttctgaatggacttaatgaggttgaagccctcctgaaatccgagggagtcctgtga

SEQ ID NO: 341325 - DNA, 726 bp, Pseudomonas aeruginosa
gtgaacatagacatgcattgccaccttgatctgtatccagacccatttaaagtggctgaggaatgcaggcagagaggaacatacgtactttcggttacaaccacacccaaagcgtgggaaggaacctgtcgtcttgcagagggaagtccgcggatacaaacagcgctaggcctccacccacaaatttcgcaccaacgacaccaagagctagcgttattcgatgcactgctcccgaatacgaagtatgtaggggagataggccttgatggggggagtggcttcaaagaacattgggagattcagctgaaagtatttcgacacatactcaactctgtaaatcaagctggcgggcggatcatgacgatacacagccgagcaagtgcggcagctgtattagatgagcttacaggtatagatggagtgccgatactgcactggtttacaggaacaaagagtcaattgaaaaaagcaatagatattggctgctggttctcagttggcccaggaatgttaagcactaagaaaggagtcgagctcgtctcgatgatgccacagaacaaaattttgacagagacagacggcccattcgccaagtataaaggtaatcccttgatgccttggcaatgcgatatagcagtaaacatactttcatctatgtggaaccaatcgagtgcacacacaagcataatcctaagagaaaacttaaagtccatcttatcttattga

SEQ ID NO: 341326 - DNA, 201 bp, Pseudomonas aeruginosa
atgaaacataaattgtttcgtatacagaacatggactattcccttatcgcactgcgactcggcgagcagcttcggctgcgccgtctgaatcgggggctgacgcaggtcgcgctcgcttccttggcgggcatcacccggcaaaaggtcatcgccatcgagaaaggcggcctctcggtgggaatggggggtgagcaaatttag

SEQ ID NO: 341327 - DNA, 1707 bp, Pseudomonas aeruginosa
atgccatttggcaagccactggtgggcaccttgctcgcctcgctgacgctgctgggcctggccaccgctcacgccaaggacgacatgaaagccgccgagcaataccagggtgccgcttccgccgtcgatcccgctcacgtggtgcgcaccaacggtgcccccgacatgagtgaaagcgagttcaacgaggccaagcagatctacttccaacgctgcgccggttgccacggcgtcctgcgcaagggcgccaccggcaagccgctgaccccggacatcacccagcaacgcggccagcaatacctggaagcgctgatcacctacggcaccccgctgggcatgccgaactggggcagctccggcgagctgagcaaggaacagatcaccctgatggccaagtacatccagcacaccccgccgcaaccgccggagtggggcatgccggagatgcgcgaatcgtggaaggtgctggtgaagccggaggaccggccgaagaaacagctcaacgacctcgacctgcccaacctgttctcggtgaccctgcgcgacgccgggcagatcgccctggtcgacggcgacagcaagaagatcgtcaaggtcatcgataccggctatgccgtgcatatctcgcggatgtccgcttccggccgctacctgctggtgatcggccgcgacgcgcggatcgacatgatcgacctgtgggccaaggagccgaccaaggtcgccgagatcaagatcggcatcgaggcgcgctcggtggaaagctccaagttcaagggctacgaggaccgctacaccatcgccggcgcctactggccgccgcagttcgcgatcatggacggcgagaccctggaaccgaagcagatcgtctccacccgcggcatgaccgtagacacccagacctaccacccggaaccgcgcgtggcggcgatcatcgcctcccacgagcaccccgagttcatcgtcaacgtgaaggagaccggcaaggtcctgctggtcaactacaaggatatcgacaacctcaccgtcaccagcatcggtgcggcgccgttcctccacgacggcggctgggacagcagccaccgctacttcatgaccgccgccaacaactccaacaaggttgccgtgatcgactccaaggaccgtcgcctgtcggccctggtcgacgtcggcaagaccccgcacccggggcgtggcgccaacttcgtgcaccccaagtacggcccggtgtggagcaccagccacctgggcgacggcagcatctcgctgatcggcaccgatccgaagaaccatccgcagtacgcctggaagaaagtcgccgaactacagggccagggcggcggctcgctgttcatcaagacccatccgaagtcctcgcacctctacgtcgacaccaccttcaaccccgacgccaggatcagccagagcgtcgcggtgttcgacctgaagaacctcgacgccaagtaccaggtgctgccgatcgccgaatgggccgatctcggcgaaggcgccaagcgggtggtgcagcccgagtacaacaagcgcggcgatgaagtctggttctcggtgtggaacggcaagaacgacagctccgcgctggtggtggtggacgacaagaccctgaagctcaaggccgtggtcaaggacccgcggctgatcaccccgaccggcaagttcaacgtctacaacacccagcacgacgtgtactga

SEQ ID NO: 341328 - DNA, 240 bp, Pseudomonas aeruginosa
atggcggaacgactcacgcgccgggcaatcccttccctgggggaagaaggaaccagatggagcatggtcgggcagcatcgcgccgacccttcgcccttcagggggggcctccacgtccaggaggacgccggggaaccccacctggagcgagcgccgactcagaactccaccgtcgtcgacagctggaactgccggggctcgcccatcgccacgtacagtcgattggcactggacgggtag

SEQ ID NO: 341329 - DNA, 720 bp, Pseudomonas aeruginosa
atgcacgacgccgaaagccgtcgtttcgtcatccgtgaccgaaactggcaccccaaagccctgacccccgactacaagacctccgtgccgcgctcgccgagccaggcgctggtgagcatcccgcaatcgctctcggaaaccagcgggccggacttctcccacctcaggctcggccaccacgacaacgacctgctgctcaacttcgaccacggcggcctgccccagggcgagcgcatcatcatgttcggccgggtcttcgaccagtacggcaagccggtcccgcacaccctggtggagatgtggcaggccaacgccggcgggcgctaccggcacaagaacgaccgctacctggcgccgctcgacccgaacttcggcggcgtcggccggaccctcaccgacagcgagggccactattacttccgcaccatcaagcccgggccctatccctggcgcaacggccccaacgactggcgcccggcgcacatccacgtgtctgtcagcggcccggcgatcgccgcgcggctggtcacccagatgtacttcgagggcgacccgctgatccccaagtgcccgatcatccgcacccttgccgacccggaggcggcgcagagcctgatcggccggctcgacatgagcatggccaacccgatggattgcctggcctaccgcttcgacatcgtcctgcgcgggcagcgcaagaccttcttcgagaacgcctga

SEQ ID NO: 341330 - DNA, 1350 bp, Pseudomonas aeruginosa
atgagcggaccgaaagtcgtacgaatcgtcacccgggaagaagccatcgccacctgcgagcgcgacctgcaacgcctggacaaggccctcgcgcgctgggaaaaccaggccagccggctcgcccagctcagtgacgccgagcgcgccgccgcccacgcccgccgcgccagcctgcacgccctgctcgaacaggaacgctggctggacgtgcaactacaggtgaagatcgaaagcgaattcctcaagcgcgacctcgccgaacgcgaagagcgcgccatccgccaggccgcggaatcacgccagcaacaccgccacctccaggaaaacgccagcgccctgctccaggccctcgacgccaggcccgatgccgccaacgcggcaatccggcaaaccctgcaagcgctggccgacggcgccctccgcgacgacgcggaagccctgctcgcccaaggcttcgccgccctcgccagcgcccccgccgaggaacgcctcagcgaagcccagcacgaactcgcccagcgcctgaagaccgacgaaacgcccatcaccctggaacagtggcgcgcccgccagcaacaggacgccccgcgcgaacagcgcctggcgcgcatcgaccggcacatcgccgaactgcaactgctgcaaggcgaggccagcgcccaagctttcctcgagcgactggcacgcgccgaagccgaacagcgcccggagcgccgcaacctgctgctcgacagcctggtcctcgacctcgcccaggccgcccgcgaacaccagcagcaacgccagcgcctggaacacctgcaagacctcgccagcgaagtcgccgccctcggcagcgccgaacacgccgaactgctccagcgcgccgccgcctgccagcccgacagcgatccgcagcaactcgccgaactcaccgagcgatgcaacgccatcctcaccgcccacctccagcaacaggccgccctcgcccgccgccaggccgtgctccagggcctcgccagcctcggctacgaagtccgcgaaggcatggccaccgcctgggcgcagaccggcagggtcgtcctgcgcaaacccgccacccccggctacggcctggaagtcggcggcaaggccgacaacggccgcctgcaactgcgcgccgtcgccctcaacgccaaccgcgacagccagcgcgaccgcgacatcgaaaccctctggtgcggcgaattccaacgcctccaggccctgctcgccgcccagggcggcgaactcagcgtggaacgcgcgctgggagtgggagaagtggcgttgaaggagattggcgaggaggagcagcgggagatgggggtggtgcggcagagggggttgtga

SEQ ID NO: 341331 - DNA, 1005 bp, Pseudomonas aeruginosa
atgaacctgttgcaaggcaaatggccgcgcctggccaccctgctggtggtgctggtggcggcggcactggtgttcctcgcctgggaacgctacacccgcacgccgtggacccgtgacgcgcgggtccgcgccgatgtggtgacgctgtcggcggacgtttccgggctgatcacccggttgccgctgagcgacaaccagcccgtggagaagggcgagctgctgctcagcatcgatccggcgcgctatgaactggcggtgctgcgcgccgagcgcgcggtgaacgtggcgcgggcggcgctgggcgagtcgcgcgcggcgatcgaggccagccaggcccagttgcgccagcgccgcagcgaggcgcagcggcgctcggcattgcagaagcgctcgatgctatcggtggaagagaacgaaaaggcccagaccgacgtcagcctggcccaggccgagttgctgaggaaccaggccagcctcggcctggcccaggccaacgtggagcttgccgaagccgccttgcagcaggcccgtctcgacctcgaacgtacccaggtgcgcgccccggtcagcggctacgtgaccaacctgcagacccgcgagggcgactacgcccacgccggggtgccattgctggcgctggtggaccgcgattcgttctatgtcagcggatacttcgaggagaccaagttgccgggcatccgcgtcggcagccgggcgcgggtggaactgatgagcggcgagcgcttcgacgggcgcgtgcagagcatcgcccatgccatcaccgaccgggagaatgccgagggctcgcgcctgctggcgaacatcaacccgagctatacctgggtcaagctggcccagcgaattccggtgcgcatcgccatcgatcccgcctatcgccagcgcaacaccttgcgcgccggcgtgaccgcgaccatccgggtgctgcccgcggaggacaccgcgaaagtcgattccgcggcgcccgggactgccttgcggccttga

SEQ ID NO: 341332 - DNA, 1200 bp, Pseudomonas aeruginosa
gtgggcgctgatgaccgtggtcatcgtcagccagccgctggccgggatggctctcaagcgcagcttcgcccaggtcgtcggtaccttcgccggcgccgtggtggcggtgctgatcatggcgctgttcgcccagcaaccgttgccgttcttcgtcgccctgggactctggctggcgctctgcaccgccggcggcaccttgctgcgctacaccgattcgcacgccttcgtgctcagcggcttcaccgcggtgatcgtcgccgtgctgtcgattcccgatccggaaaacaccttcatgctcgccgtggtgcgggtcaccgagaccctgctgggcgtcgcctgcgtggccctggtcagcctgctcagcgcgcgtccgcaggcggtggcgaagggctacttcgcccaggtcgacggcctgatccgcagtaccgcgcggcacgccgcggcggtgatccgcggcgacgagggcgacgagtcgttcaaccagcggcagatgcaactggtcgccagcatcaccgcgctggacggcctgcgccggcacctctatttcgacgcgccgaacctgcgccgcgccgatggcctggtgcagttgctgggcaacctgctggtgctgatggcctcgcggctgttgctgctgcgccagcatcgcctgctggtgcgggcgcactgggtcgggccgttgccggcggatatccaggcgctgctggatcgtgcgctgcgggtgctggacgcgctggccgagcaggggcgggcggtaccctccgaggtgctggaggagttccaggcggtgcgccaggccttcgatgccgcggcgacgcgcgcggagtcctacgacgaggcgctgagcccggcgctgcgcccgcaggtggcgatcctgcgctgggaatacgcgcggctgttccagcgcctgggcgaagtgctcgaactcaacgatgcgatccagtccggccgccaggccagcagtttctaccgccgtggccaggcgcaggcgctgcacctggactgggcgctggcctcgatgaacgccgtgcgcgctttcgtcgccttgtcctgcgccgcctggctgtggatcaccagcgcctggaacggcgccctcagcagcctgctgctggtcggcgtgatgtgctcgctgatggcgaccttcccgcgtccgctgctggcggcgcagaacttcctgcgcggggctgctgctggcgatcctga

SEQ ID NO: 341333 - DNA, 240 bp, Pseudomonas aeruginosa
atgatcgactggagccaggtaaagaccgctgaacagcaggcgcaagaacgctggcaggctgagtacgatgcctcaaccgcggcgcgggcaaatgcctaccgcctggagagtgacccgctcaagaccgaggccgagttcgacgctatcaaggccggcgtggaaccggactacagcgcctggatcgccaaggtcgaggagatcaaggccaggtatccgcttccggacgcgggcggcgtgtag

SEQ ID NO: 341334 - DNA, 378 bp, Pseudomonas aeruginosa
gtgcgcgtcgccaaggtctgggtcgcccatgactgcgggcagatggtcaatcccgatggggtcaggcaccaggtccacggcaacgtcatccagtccaccagccgggtactcaaggagttcgccaccttcgaccgccgtggcgtcaccagcctggaatggggcggctacccgatcctcggcttccctgaactgccggagatcgacgtactgctgctcgaccgccccgagcagccaccgatgggcgctggcgagtcagcctcggtgcccagcgccgcggccatcgccaatgcgatcttcgacgctaccggggcgcgcctgcgacaggtgccgttcactccggaacgcgtactcgcggcgctgcgcagcgcgcaggcctga

SEQ ID NO: 341335 - DNA, 987 bp, Pseudomonas aeruginosa
atgaacaaccgaaagaccaacacctacctctctcaatcgggcatagctctgcagatcgagtcactggtacaggccatcgagaacaccgacacacccgcatttcgcatcacgcagagccgttcaggctatgagcgtgtcgaagagaccaggctctcccgctacttcacacacatcaagcaaatggttgacctgttcgatgatcgggtggagtacagctatagcgaacacctgcaagcgttccggcaggcctgtcaggacataaggcttgagcgtgatccagatggtcctgtctgcttgaacgagcggggcacggattggctcagtcatcatcagagcatgaacgtcctcactgcacggatccggcagctgacctgtgagcagtggtaccggcgtaggagttgggatcgctctcgtgagtcacgtaagcaggagagggagatcactgattacgtagacgctgtgcttgaccgctactcgcgtactagcgtcgtaagaattgatctgtactaccgttctgatgctcaggccaggctgcgggttgagcatgccttcgatgatctgaagcggttagttgctgagcatgaagacaattcgatcttcgatcacctcaccggttacatccactcagtggagcagggtaatcggtttgatggtaggggttaccatgtccatgctgcgtactttttcaatggcaacgaggtgcgcggtgatatccataaggcgcagctgattggtgagctttgggagcgtatcactcgcggcaacggttgtttcaatagctgcaaccacagcaaggatcgataccaggggcggcttggtatcggcatgatttcccgtgatgatcatcgtgctcgccgggatgtacattacacgatgcgctatttggtcaaggatgagcagtcactgctggtgaagccgctgcgggcaaagtgtctgcgaaaggggcaggctggtaggcgacacgcgaacagggcatgtcgtcggtga

SEQ ID NO: 341336 - DNA, 732 bp, Pseudomonas aeruginosa
ttgaaatcgaccaatccgccggcaccgaaaatcggcttcgaccgctacatagcgctggactgggcatcggcggcgctacaggtgcgtgcaggcttggctgaactcgatgatttgaacgccctgctggatgcggccggactcggcgtggcggcccgcaagaagacacgcaccgtactgaatcgcatatggctcgaaccgcgacctgcactggccagcttcgccgagcggggtgtagccatctacaaggcaaaccctggcgtccccactgctgccttgacctggggaatggcaatcgccacttacccattcttcggcaaggtcgctgaattgctaggtcgcttgtctgccctccagggagactgtgcctcgacggaagtccatcgtcggatgagcgaagtctatggtgagcgggaaggcacctaccgcatgaccaacatggtcctgcaatcccaagcgagctggggagccattgaacgagtggaaaaaggtaagcgccttatccgcatgcagcccgtcgtgctcaacaacgagcagctggttgcctggctgatcgaggcagcactgcgctacgtaggcaagtcgctatcggtaccggccctatcgtccctggcagtgctctaccctttcatactcgatcagccattgggctaccttgcttcaaaaagccctaatctgatcatccacacccaaggaccagccaaccaggtcgttggattaaagatccacgagtaa

SEQ ID NO: 341337 - DNA, 2031 bp, Pseudomonas aeruginosa
atgacgtattcatccgtgggcaatgtcgccaatcgcagcacgctgctggctgatcgaattctgaaggaatttccatccgacctggcccggctgtggatcgtggcggacccggacaatgtactgctggacgaacaggtgctggccggactgcgtgagcgtggcttcgatgtgctgccgttcgaggacagcatcgcatttcgggccgagtacgaagaacgctatcgcgcctcctgggcggctgaggagccccatgcgcctaaagccctggtcattcaggtacgcgactccagcatcgccgatctgccatgggactacttgcgccaggggcgcaaggtcagtctctcgctcgccgaactgtttccaaagctgagctatacggtgctcaggcaactaggtagcgagatcttgccgtcactcttcgaggcgcagacgcggcacgctacccaggcgatgggcgaggccgccaccaaagagtttgtgctgacgcacatctaccgggtaagcccccacctgatcacccgaccggaggacttgtggcgtgagttgctgcgactgcactaccgcgagacgctcctccccagagcactggccgagcatatccatcaggtgttggccgaccggcctgtgttcgccagctgcccagtggccgaactgttctcaaacagaagcttcgcgctgcgcgtagtgcaggatgcctggtaccgctatttgagcaaactcggattgactggcttgcgaacggcggagccggaagcacctgactacataccgcagctcgacatcacattcgaacatcacgatatccgcgtgatcgtcgattcgatgttcctggatggcaccctacacccgctggcaattcagggcgtaccggtcagcttgccggaatgggcaaaagccggagtggtccaggaccccgccgcaatgcgcaacctggtgctggaaggtatcaagaacctcggtgaagaactgcctggcgtcacatccccgtatcgggactggacccacttcgcccggcgcctcggtgaagtgatctcgcgcttccacagtctggataccgcgcgtgcagacagcctgaagacggacatgcaggacttggtggttcgtgccgatagtgagctgcaggcttgggtacaggcgcactacgccgacttgccttcgttgcccgctgccaaggggccggtgatggtgcatcaggtaccacgttacctggcgatgcgccgatcaagcggtgaggagaaaattgcgctagtcgtcttcgacgggttggccgtcgatcagtggacacagattcgcgaaaacctggtccagcatgccccgcgcctgatgtttgacgaaaacgcctgtttcgcctggctgcccacgctgacttccgtatccagacaggcgctattttctggtttgcgcccacgtgagttcgccgagcacattgaaacgacctcgaaagaaccccagcattggacccggttctggcaggaccaaggcctccggaccaatgaaatcctgtaccggaaggcgatcaagcgcaccgatgagctgccggagctgcaagagctgctctcgaatcccggcttgaaagtggccggcctggtggtggatacagtggatgaaatcatccacggcgctgtcctcgggaaacgtggggtggctgcgcagatcaacagctggtgtgagtcagggtttgttgatcggctgtttgcaatgctgctcgaccagggcttccacatctacctgaccgccgaccacggcaacgcggaagccctgggaatcgggcgcccgaaccagggggttgcctcggagctgcgcggggagcgggtgcgcacctatcgcagtgaaacaatgattgccgagacagcggcggccataccggacagcttccgcctggatatcgcagggctgccggtcaacttcatgccgttgttcgcaggagcgcgcggagcatttgttccaaaaggcgaccaggtggtggtccacggtggcatgtccctggaagaacttatcgtaccctttgtaaaagtgagttacgtcaattga

SEQ ID NO: 341338 - DNA, 2838 bp, Pseudomonas aeruginosa
atgactcaacccctacgcgacttctccatcggcgattggtgctggttcgttcggcaagtgaccccgtgccgcatcgtcgaacgccaggacgtatggggtgagattgcctatcgcgtctggctcccggccaaaaacacggtggtacgtgcccgtgcccaggatctggatgagctggcagctgtgtgtcccgtcgttgagcagatcctgcatacggcggcggcagcaaagctgctagatgctctggaagacaatctgctgctggcccccatccagtcaagcgttgtgccgttgccccaccagttgtacgcactcaacagagccatgagccgcgaccgcattcgctacctgcttgcggatgaggtgggcctgggcaagactatcgaggccggcctgatcctgcgtgagctgaagctgcgcgggatggttcggcgagtgctggtggtggcgccgaaaggcctaatccggcaatggcaggcggagatgcgcttgcacttcggcgagcacttgcggtttatcgaagccaccgagcttgcggcctttcgtgcctggcgcaccgagggcgcccagaatgacgacaatctctggtccatgcacgaccaggtgattgtgtcgctggactcagtcaagcccatcgaggggcgacgtggctggagcctggaacaactcaacagctacaaccgcgagcgtttcgaagatctagtctccgccggctgggacctggtgatcatcgacgagtcgcatcgcatgggcggcagcaccgaccaggtcgcccgctacaaactgggcgctgccctggcagaagcggcgccctacctgttgctgctgtccgctacgccacaccagggcaagaccgatcagttcttgcgcctgatgcagttgctcgatcgcgaggctttcgttgatgagggcagcatccaccgcgacagggtgcagccctttgtcatccgcaccgaaaagcgttccgccatcaacgccgaaggccaacccttgttcaagccgcgctccacgcggctacaagcggttgcctggcaagcacggcacactgcgcagaagcagctgtatgacgcggtgactgactatgttcgccacggttacaaccaggccatggcagccaagcagcgccacatcggctttctgatgatcctgatgcagcggctggtgacttccagcaccgcagccatccgggcaacgcttgagaaacgccaggcattgctagatacgcctcagccacagaccaatctgttcgacagcatggacctggacgagtgggctgaactcgatgggcaatcgcaactcgacgtagccctgcaggccagcaactgggagcaggagaaagccgaagtcgagatgctgcttgatctggcccgggaaaccgagcgtcaaggcaccgatgccaaggccgaagcgttgctggagctgatctacaagctgcaacaggaagagaacgacccggagctcaaggtgctggtgttcaccgagtttgtgcctacccaggccatgctggccgagtttttagaaagccggggcttttccgtggccttgctcaacggtggaatggacctggatacgcgcacccgtgcccaacaggctttttcccgcgacgtgcgggtgctgatctccacagacgccggcggcgagggcctgaacctgcagttctgccatgtgatcgtcaactttgatatgccctggaacccgatgcgcctggagcagcgtatcggccgcgttgaccgcattggtcagccccatgtagtgcgtgccatcaactttgtactggaagacaccgtggaacaccgggtgcgcgaagtgctggagcagaagctggagatcattgcccaggagttcggtgtcgacaaagccgccgacgtgatggactccgtggaagtcgaaccgctgtttgatgagctgtttgtacatggcctgcaagatccagcatcgatcgacaaggaatgcgacgcggtcatcaaccaagtgcgcgagaaagtggcggcgagccgcaccgatacggaattgttgaccgacaatcacccgcttgaagcggttgagacacagaaatggcgtgaccacccggcgcagtactggctggagcgtgcggtgacaaccggcttgcccacccgtggcggcgcagcggagcagtcagaccatgcctggcgtttgcagtgggcggacggcagtgagtctttcccggtctgcttcgatgcgcgaaccgccgaacagaacccggaaatggagtggatcacgttggaagatccccgagcccgtgcgctcatcagcgatctgccgcgctgtgttgccgaccagccgctgcccgtcgttcaggtgaccggactgcctcaaaacgtgcaaggcatctggtcgctctggagcgtgagcctggcggccgccaacagctcggcaaacttcacccggcgccgcttcctgccggtttttgttaccgatgatggacgcagttttgttcccaccgccaaacggatctgggatctgttgctgaccgaagatgtttgcctggcggcagacccggacagggagaatgcagccgcactcttcgagcaatcactgacggcggccaaaggacagggggagcggttgttctccgagctgctggaggagcaccgagcctggcttgccgaagagcgcgagcgcgctcgctatgcctttgagtcacgctttcaggccattggccgaatcggcctgcctgccgttcgtgagcacaggcgaaagcgccttgaggccgaacatcaagctcgtatggcgaatctggcggaagcggaagcctgcacgcccgagctgaatgccgtactgatactgcgaattggcccggcaggaggaacttcaccatga

SEQ ID NO: 341339 - DNA, 2775 bp, Pseudomonas aeruginosa
atgaaaacgactgactcgctggacttgagatcagagtccacagctggcccggtggaatgcctgggccaaaccttccccagcgatcaggctcgtcgcgagcattacctgaatctgctggctgaaaagctgaaagacccagagttccgcaagcaggaaggttttccgcagggcaccgacgaggcgattttggccatgtccgatccgccctattacaccgcgtgcccgaacccctggttggcggagtttgttgagcattacgggaaggcctacgacccgcagcagacgtacagccgggaacccctggcgattgatgtatcggtcggcaagacagacgccctctatcgggctcactcctaccacaccaaagtgccgcacctggccattgttccgtcgatactgcactacacccagcccggcgatatcgtgctggatggctttgctggctccggcatgaccggtgttgccgcccagtggtgtggaaccgccccagccagctaccggcacgagatcgagatggcctggaagcaagagggccgcaaggctccccagtggggcgcacggcgtgttgtactgaacgacctgtccccggcggcaactttcattggtgccaattacaacattccctttgatgttgatgccttcgctaaggcaggcaagcagttgctcaaggaggtcgagcaggaaatcggctggatgtatgaaaccttgcacaccgatggcaagaccgtggcccgcatcgactacacggtgtggagtgaagttctgaactgctcagcatgcgcgggtgaaattgtttttacggaagcggctctggatgaagaaacgaaagcagtcgcggatgttttaacgtgtccgcattgcggcgcccaaggcaagaaagagcagatggatctgcgctttgaaacctttattgacccagcgacaggagcaacagaaagccggcccaagcgcatgccagcgctgatcgtgtacaagataggcaagacaacctataccaaaaagcctgacgaaactgatctggcatgcatcgagaagatttctcacctgccgatcccgagggatttgccagtggatcgctttcccgactgccagatgacgcgcgttgggcgaatgaaaacgacaaactcttcggcagttcactttatgttcctgccaagggcggcacaggcaatggcactgttgtggagcaaggcaaaagcaacctcggagcctcgtgcaagaggtatgctgctatttatggtcgaacaagctatttggggaatgtctatactcgcaagatacacgcccactcacttctcccaagtcaatcaatatctaagcggtgtttattacgttgcttctcagcactcagagtgtagcccttggtacatccttgatggaaagctggaccgcctaattaaggcattccgtaaatatctagcatgtcctgctacagctgcagttaacacagggacggcggcaagactgcccctgcctgataactctatagactacatcttcaccgacccaccctttggtgaaaacatttattactcggatctgaattttctggttgagtcctggcatgccgtaaaaacggaccccaatcccgaagcaatcgtcgatcgcgttcgtcagaaaggcatccccgagtatcaacacctgatgtatagctgcttcgcggaatactatcgggtgctcaagcctggacgctggatgacagtggtgttctccaatagcaaggctgctgtctggaacacgatccaggtagccttgcaacaaacaggttttgtcgtcgccgaagtcactgcgctcgataaaaagcaaggcagtttccagcaggttatgtcgccgaacacggtcaagcaggacctagtcatttccgtttacaagccgaatggcgggctcgaagaacgcttgaacaagcagggtgcgactgtcgactctgcttgggacttcgtgcagacccatttgcacaacttgtcagtcgtcaaagcccgcaatggtgagctggagttcattgttgagcgcgatccgcgccggattttcgaccggatggtggcctggttcgtacgccacgatgtgccggtaccgatctccaacgatgaatttctctccggtctgcgtagccgcttccctgaacgcgacggtatggtcttcctacccgaacaggtcgccgaatacgacaagaagcgcgctcaggtggcccaagcaccgcaaatggagctattcgtatctgacgagcgcagcgccatcgactggctggccgatttcctcaagcgccgcccttcgacttatcaggaagttcaccccgagttcaccactcagctgggtgctggctggaagaagcacgaagccaagccggagctgatggcactgctggagaacaacttcctgaaatacgacggcactggcgaggtaccgagccagatccacagttacctctctaccaaccacaaggatctacgtggtctggagaagagcgacccgcgcctgatcgccaaggccaaggaccgctggtacgtacccgaccctaacaaggcgcaggatctggagaagaaacgcgaaaaggctctcctcaaggagtttcaggtgtaccaggccttcaccggccgacgtctcaaggagttccgactggaagtgctgcgcagcggcttcaaggaagcctggggcaagaaggattaccagaccatcattgccgtcgccaagaagatccccgacgaggcgctgcaggaagacgaaaagctactgctctggtacgaccaggcgctgactcgtaccgagaacagcttgtga

SEQ ID NO: 341340 - DNA, 1875 bp, Pseudomonas aeruginosa
atgaccagggaagaactgctggagcgcctgcagtccatcgaatgggacgacatcgagttcaaggaggcctcttgggcagtgcccaaggacgccctgtcgtccgtcagcgcctttgccaacaccgccgggggttatctggtgttcggcgtcaaggaggccaacagaaccttcaccgtcaccggtgtgatagacgctgacaaactgcagaacgacttcttgggccaggtcagggatcgcaacaaggtcagcatctttttgccgatcaacggcactctccatacccttgatgaaggcacagtcattgtcttccacgtcccggaggccgggcgtagtgagaagcccatttatctcgacggcaacccaaagaaagcctacatccggcgcgggggccgggatgatacctgcacgccggatgagctgatgcggttcatgcgtgacgcggcagcggatcgctacgatgccgagccactcgatctggacatcactcggtgcttcgatcaagccacagttcgctggtatcgagaacgttttgccgcaagcaaccccggcaaggatggcgcggatgacgatcccacattcctgcgcaaatggggctttctagtggagcgcggtgggcgcttgctgcccacccgagcggccattctggtgctgggtgccgatgagtatgtccggcaagttctgccgcgcatgagcgtcgatctgcaactgtatcgctacaccgctgaggagtactcgcctagcatccgctgggccgaccgcctcatggtcgaagagaacctgatcaagtcctggcaggccgtggtcgacttctacttccggcacagcgagcggcctttttcggtcgatgcctccacgctgcggcgcgatgacgacccaccggattacatttccttccgtgaagcagctatcaacctgctgatccaccaggacttcggcgacagcactcgggtgcctgttatccgcttcttccgtgggcaaaccgaattcttcaatccgggggatgccttcgcctcacgggagcagctgctcgacccgggcgacaaggaagttcgcaaccccagcatcgtcaatgcattccgccgcataggcctgtccgaccagggcggcaccggcgtgggtgccatcttcgagagctggcgtaccctggggttcatccccccggtcatcgacaacaacaaggcggagaagagcttccgcctgcggctgtgcaaggaaaagctcatctccgaagcccagatgctcgctcaggcaagcctgggggtcagcctgtcggaacaggaagcggcggtattcgcttatttgacccgccagggccagatcgacctggcagacatcaagggcctgaccggcctgggcagcgcggcggcccgggagctggcccaacggctggctgtacaagtgatcctggaaacggcagacaacgcccccaaccagtttgtcctggccgaacacctacgcgctcgcttcgggcaagggggagcgggaagccagccggaaactctacaggtgaccgtgggcagccatgcccaggacgcgactgaacaagtacctgaacaagtcgcccaaccggccgttgaacatgtacagacacttgttcagttgaccgacacccagtggcaaatcgtcagccacgccgatgtgccccgctcgctggcggagctgatggaacacaccggctacagccagcggccctacttcaaggcccagcacatcgaaccattactcaccggcgggattctgcggatgaccgtgccggacaaaccccgctcatccaagcagcgctacgtgctgaccgaggcgggcatcaaactcagagtctggcatgccgaccagcaggccactacacaacggacaaatcaccatgaaaacgactga

SEQ ID NO: 341341 - DNA, 1890 bp, Pseudomonas aeruginosa
atggacattgagacatctggagccatcaggctgttcttccccaacccgtcattgacattggtgtattttgaagccgttgccaatgccctggatgctggcgcaactaatgtgagcatcaatattgatgtgcacgcatttgataaaccagacacactcaaaatcactgtttcggacaacggcgacggatttaccgatgaaaatttcgagcgcttcagaaagctgcttcggcctagggacaagttccacaaaggcatagggcgcttggtatttctcaattattttagtcgtgtagaggtgactagtacgtggggtaaatggcgcaggcattttattttcaaggactcgtttgatggcaatggaccattggaagcgcttgcagcggagcaaacagcccagaccaccttggagttcactggttttgccaaagaccgggttaaatcctacgacgacctgaagcctgatgcacttaaaccgctcttgattgagcagttcctgcctactttggacgcacgtaagcgtgacgggaaggcattcaggatttccatcaacttaaacaccaatgaaagcaatgtgcagaaggagttctttcctcacgaaaccacaataacgccagacgatttgccatcaatgaccaaggtcactatccaggacgatactctagatgccatctcaaccatcgacatgtactaccacattgagtcggtggcaggtaaagggcgctcacttactgcattcagtatagatggacgaacgataccggctaatctgataccgccgtcgtcgtttccagtaggctatttctgtgtctttttatttgaatctgagatattccactccaatgcggatagctcgaggcaaaagctggtattgcctgagggcatacaagaggcacgcctgtaccgtgtaatgcgtcgggagcttggtaaagttctttcagatcagatcccattgatcactgaaagaaacgaaaaaataaaagagaaatttgaggaacagtttccgcatctactcggctacttcgagacagataccgttggcttgattgaccgtgacgatgctttaaccattgcgcaacagcggtttttccgggtccagaaagagatccttcagtgcgaaaagctgagcaagtctgcttacgagaaatcgctggaactctcgtctcgcactctaaccgaatacatcttatatcgcgaaaaaatcatcgctcgcatgaaggaaatgacgaccgatgacgccgagtctgagatccacaacctcatcgtcccgcggttcaaggaattctcacaagacgctatgccttctgagatttaccagaacaatgcctggcttttggacgacaagttcatggtgttccggaccatcctgagtgagaagagtatggacaccgtcatcaatgccatacgactcgatgacgaagcggtcggcgattcgggaaggcctgatatcgccatgatcttctcagcagacccaaacgacgctgcgccggtagatgtggtggtagtagaaataaagaagaagactgacgatgaaaaggacaatttttacgcagtcaaccaactgcttgaccgagcaggaaagctggtagcgtactgccagaacattcaaagagtctggtactacgcgattatggatatcaatgacacgacagcctttcgactccgacaattcaagtggacaccctttttctcgaaaggcaaggtctactatcaagaatttgatacgccgcgccctgacggccgaattattcctacgccaacatttgtggtttctttcgatgcgatcgtagccgatgcggagtgtcgcaatcacacgttccttgaaatcctgcgtgccggaatgaagaaatatgctgatgattctagcggattgagatcttcggccgacgactaa

SEQ ID NO: 341342 - DNA, 1278 bp, Pseudomonas aeruginosa
atgatctccaaatttatcttcaagaattggaaaagccatcgtgagtcgattctgcatatcgacccattgaccattcttataggcacaaatgccagcggaaaatccaatgctttggatgcactgctgttcctgaaccgtgttgccagtggggcgcagctcaccgcagcattgcaaggtgacggtactcaaatggcggtgcgcgggggtatcgaatgggctgcacgtaggcccggcaacacgttctcgctgcaggtaactgtgcgtaccagcgagcagatggattacgagtacagactcgatggctacgtgcgcgggaaccgctgtgatttgcttgctgaacaacttatccgcgtcaagtatcgcgcgtcaaaagatggagcacgcggtagcgagagcgggcgcatcaaccttttcaccactgactcttgtgatgatgattcgcccaccattgtggcaaggctttataacgaaaagcgcggcacgcctcgtccgttgagccgagccaatgctgtgctctatcagctcatgggacaaaagccgcgccaagagattgaagatggtgtcgcagcagttctcgaagcactgaaaaatatcttcgtccttgatccgattccctcgcatatgcgcggctattcgccgttgtctgaccgcctcgagcctgacgcatgcaatatcgcaggagtgctggctgcactgccagaaggcaggaaagaggatattgaaagcaccctcacacgctacgccagcgagcttccagaaaaagacatccgcagagtgtatgcagagcctgtaggcaagttcggctctgatgccatgctgtactgcgacgaacattggggggatagcgacgaaaacgccgcagtggacgcgcgcggcatgtcggatggttcattgcgtttcctcgcgatccttacagcacttcttaccaggccgaagggaagcctcttgattgtcgaagaagtagataacggattgcatccctcacgtgcgcagttgcttctccgtatgctcaaggaagttggtggcgagcgtgaagtcgatgtagttgtcaccacgcacaaccccgcactgctcgacgcgatgggaaccgaaatggtgccattcatctcggttgcgcatcgtgacccggcgaccggggacagcctgctcacattgctggaggacatcgcagatctgcccaaactcttggcgcaaggcactgtcggccgtctttccagccgaggcctgatcgaggccagccttaatccggtgcagggcgaggaaggggcaggcgtatga

SEQ ID NO: 341343 - DNA, 3726 bp, Pseudomonas aeruginosa
atgcgctacggggatctcattcagttcgagccgattgagtcggtcatccagctgctcgacgccaatcggcccaacgaggccaagaagctcgtcgccacctatgtcatttccgatgacatggccgagcggattgccaagcagatgatcccgcaactgtccttcgatgagtcggtagaccataaaggcgtgctggtggtcggtaattacggcaccggtaaatcgcacttgatgtcggtgctgtcgctgattgccgaagatgccgcctatgttccgatgatccatcaccccaaagtggccgaggcggccggcagcatcgccggcaagttcaaggtgcaccgcatcgagatctccagccagatgtcactgcgcgacatcatcacccaggagctggaaatcttcctggagaagcagggcgtcagttacgccttccccccggtcgacaaagtcgtcaacaacaaggcagcgttcgaggaaatgatggccgcattcgacgaggtgcaccctggcaagggcgtgcttctggtagtggacgagttccttgagttcctgcgctcgcgcaaggaccacgacctggtgctggatctgtcgtttctgcgcgagatcggcgaagtcaccaaacacctgcgttttcgcttcgtggccggcgtacaggaagccattttcgacagcagccgcttccagcatgtcgccgacagcctacgccgcgtgaatgagcgcttttcccaggtgttgctcgcccgtcaggatgtgagcttcgtagtcgccgagcgtctgctgaaaaaatcggccgaccagcagcacaagattcgaacctatctcacacccttcgccaagttctacaacaacatgaacgagcggatggatgagtacgtgcgcctgtttccggttcacccggactacatcggcacattcgagcgcttgatctttaccgagaagcgcggcgcgctggtcaccctgcgcgaccaaatccaggcaatcctggaagatgaagtacccgcggaccgacctggcctgatcggcttcgacaagttctgggaaacggtcacatccaactcggtactgcgctcggacccgaacatcggcccggtactcaaggttgtcgaagtgctgggcgagcgtgtgcagaaggcgtttactcgccccgcctacaaagccatggccgtgcgagtcatcaaaggcctttcggtccaccgactgaccaccggcggcgatatctatgtgcccgtggggccaaccgccgaagagctgcgcgacaccctgtgcctgtaccagccaggcatcgaggacatgggcggcgagccggccgacgacctgctgaccgccgtgcaaactacactgcgcgagatcgtcaagacggtgaacggccagttcatctccaaggctcccgataccgagcagtactacctcgacctgaagaaagacgtcgactacgacgcgcagatcgagaagcgcgccgaagctctgtccgatgacgccctggatcgcgcctactacggcgccctgatgcagctgatggagcgcaccgaggaagatacctacgtcaccggctaccggatctggcaacaccaggtggaatggcaggaacggcgagtcgaacgcaacggctacctgttccttggcgccccaaacgaccggccgaccgcccagccggagcgcgatttctacatctacttcatccagccgttcgagccgccgcgctttcgcgacgacagccgcacggacgaagtgttcttccgtctgaaaggcctcgacgatgccatcaagcgttacctggcctgctatgccgcagctcaggagctggcatcctcggccagcggcggcgccaagtcggtgtatctggacaaggccaaggaagccctgcgcgacatgagcaagtggctgcaggacaagcagatgaccgccttcgatgtcacctaccagggcaagaccaaaaccctgcaggagtgggccaagggcgtctctatgcgcgacaagcttcgccttgggccggacgagcgcgctaatttccgcgacatcgtcaacgtcacctcaggcctggccctcggcacccattttgccgacctggcaccggaatacccgacgttctccgcgctggtcaccgaagccaaccgcaagcagctcatcggcaatgcccttaaggcgcttgccggcggtacccgcaccaaggacgccatcgtcattctggatgcaatggaaatgctcgatggcgaccgcgtcgagccgacccgatcccgctacgcccaggaggtcctcagccgcctcaccgccaagggtcacggccaggtcctcaatcgtgccgagctcatcagtggcactaccgatgtcgaattcttcgcgccggtgcgcttccgcctggagcccgatctgctggtggctgtgctgggcggcctggtgtactccggcgacatcgtgctcgccatcaccggtgacaagatcgactccggcaagctttcgctgctggtggaacgcgccctggatgacttaaagaccttcaagcacgttgaagcccccaaggagatcaacgtcgccgtcctgcgcgccctgttcgagctgctgggcctgccaagcggtttcgcgcagatggctacccagggcaaagaagagccggtcaaggagctactggaagcagtcgccaagttggtcaaccgcgtgctgaccgtgggtaccgacctgcaaacgcgcctgagcttctggggccagtccctgctgcgtgaggaagagctgcgcgactggcgcagccgcctggaagccctcaagagcttcctggaaagcctgtccccctacaacaccgtgggcaagctgaagaacttgcgcatcaccccggccgacatcggggtgcagcagaagaacctcgacgtgctctccgccgtcgagaaactgcgtgatctggtcgcagagctgggcagcgtggccggctacctgtcccaggcggaaatggtcctgccgagcgaccacccctgggtgcagcaggcccaatcagcacgcaaggatattctcgacaagctcgcccaggacaagagcgccgcccacgccgccacctaccgccaacagttggccgcgctcaagaaggactacatcaacgcctatgttgcccagcacagcaaggcgcgcctcggcgttgccgaggacaagaccaagaccgcactgcgccgtgactcgcgcatcaccacgctgcgcgccctggcgggcatctcgctgatgcccaccggacagctcaccagcttcgaagacaagctcgacaagctcaagagctgcgcttcgctggtcgaggccgagctggccaccagccccgtgtgcccgcactgcggtttccgcccggccaacgagcaaggcgacttgctgccggccgccaacgtgctcaaggccctggatgaagatctggaccgcctgctcgatggctggcagcagactctgctggacaacctcgacgaccccatcatccaggccaacttcgagctgctgaaagctaaccagcgcgatctgatcactgccttcctagcgtcgaaaacactgcccgatccggtcacgccggaatttgtggccaccatccaggaagcgctgtccggcctggagaagatcctggtcaccggggatgacatcaaacaggcgctattggccggtggttccccggccaccccggaagacctgcgccgccgctttgagtcgttcatgaccgagcgatgcaagggcaaggacgccagcaagttgcggtttatcgtggagtaa

SEQ ID NO: 341344 - DNA, 468 bp, Pseudomonas aeruginosa
atgctggagcagctcgaacaacgaattaacgaagtaggcgccttgcaaaccaagctggttctgctggtcggccgcccgggtagtggcaagagtgctttaatcggtgcgcttgcgcagcaacgcggcgcccaggtgatgagtgttggggcggccctggggcgccggctggccgtgatgtcgcagcgacagcgatcactccaggcgaatgtggtcctgcgggacctggctgatgaacatgccgatggcgacctgctcttgctcgacaatctcgagctgctgttcgaccgctcgctcaagctggatccgctggatctgctcaagcgccacgcacacggccgccgcgtggtggccgtgtggcctggagagctgcgcgagggccggcttgtctacgccgagatggggcatccggaatatcaggactacggcctggatggcctggttccatttgaaattgaatcgatggggtaa

SEQ ID NO: 341345 - DNA, 912 bp, Pseudomonas aeruginosa
atgtcgaacgaacagcttgacgacctcacccaaccgcagcgcgaccgccttgcctttgtagagctgcgggtgcgattcattggggatatccgccgccaggacctggtaacgcgcttcggaatccagtcagctgccgccacgcgggacctggcgatctacaaggaactggcgccaggcaacatcgactacgacaccaaaaccaagtactacgtcctcggcgagcatttcaaacccgtcttcgacttccagccagaacgagtcctagcgtggttgacccagggatttggcgatggcgaaccatcccggctgcgggcctgggtagctagcgagattccatccagactcacgcacccggatctggacgttctggccgccgtcacccggaccattcaccaggagcgaccgctggccatcgagtatcactccatttccagcggtcgcacccagcgcgaaatagtgccctttgccctgatcgacaacggactgcgttggcacgtccgcgcctttgatcgccagacccaggaatttcgtgattttgtcatcacgcggataaagcgcccgacagcaccaactgatgcaggtgtgcaggcccacgaacgcagcgaccaggatatccagtggacacgcattgtggagctggagctggttcctcatccggcacagccgcaccctgagatcaccagaatggattacggcatggatgacggcagcctgcgcatgaagctgcgggctgccacggcgggatacatcctgcgcaaatggagcgtggattgttcccctgatcatagcctgcaggggcctgagtatcgcctgtggctgagagaccacctagccatctatggcgtcaagagcgccttgctcgcacccggctactgctcatccaagcagcagcaagcggccgaactggactga

SEQ ID NO: 341346 - DNA, 354 bp, Pseudomonas aeruginosa
atgaacgtcatcaccggactgaacgaagcgcagatcgacagcctcgtgcgcagcagagcgtccttcgagatcaatggcctcaggggcaacttcatggccggcatcaaactggtcgaaaccaaaattgaaagccaggtactgaaatgccgggtcagaagcgacgtgaaaagtgctgcagtacagggcggcgcccttggtgtggcattcggagttctgtcaacgccggtaacgctgaccgcggcaacgctcggtatagccgcaggcctggggcacaccctggtcacctacaaccctgactacgaaatcctgaaggactatgtaaatcagcgactccgggttatcgacaaaaagtag

SEQ ID NO: 341347 - DNA, 930 bp, Pseudomonas aeruginosa
atgctggttctgacgcgtgatctcgactttatagaggatgctttttctattgtgcaggcaatgaggaggtttctgtcaggggagtcgcttacctgcgaggtatctggtgggcggctgtctatatcaagtttgggtaaggttgtgtactcgtttcttgaatatgactattgtggcttgcgtcaagctctggatggttctcgcggccatccatatctttcagtaatggagaaaatagttgatgcatatagaaatcaagctgtgtttgactggtcatttggaggtggtgcagaaggtttaaaggcacttgaggatcatgtccggctggagattgagtccgagggagggggtgatgctctgagaggagctgctagatctatagttaggggggttagaaaaaactatgctggtcttgatgcttttataagtgatcttgcctcaaaagagcagggtttgaatgcggtttcagttgatttgcgttatgttcatgatgtattttgtgagagtggggaggggcatagtgctgagttagttaggtgtgatttggatgctttgttaaagattgttgataagaagttttctagttcaatttctggctatttttggaggattgaatttggtctgggtcgtaagttttatgcaagggttgtgttttttgttgatggtgcggtagcgcagattttttttgattttttaaagggagagtcgttggttgatgtcttgaaggtctcgaagagttgtttcttgagtgtctatgattttattgatggaggtgagttcccgggcgcttgtcttggggagggtggagagtgtctgcagaaaattaaggccaatgtcgcattgcaattagcagcggatgagttgattcgagccgatttttcaaacagaagagtttatgggcggtctgggagagcaaagaaatactcactctga

SEQ ID NO: 341348 - DNA, 714 bp, Pseudomonas aeruginosa
atgacaaaatcagcaagaagggttcctgacgagctaagagacttcctaacaaaagaccaccccaaatcgcaggaaagggtcatattagctttcgacaacctctgcagggaatttatggaagactgggaagggccagaaacttaccaaatctatataaacaaacagctagagctaatagtcactggaaaattcacaccagacaaaatcgtctcaaacgaatccgcaactcagaataaagcttcaaatggaactaaaagtctaacacatcacctcatgttagccttaacttatagattgcttgctgaagaccttgaagaggagggcttgatcttcgaagcaaatcaagcgataacaagcgccaccttacaccttggcgcctgcatacccagcctcttcattgagctcggaaaaaatatcgacatttcagaaaagaacagcagcactgcagttaaacgacatcaaaaatcaagacgctctatggagcatttcagcagtttaattagggatctcgcacctcaagatggctggagctcgcgaaaacatatactaaaaaacaccacgccaaagttgattgagttcgaaagagaaataggattaaaactaaaaggggatattgatactcgattaatgcgctggatgcgtgacgaagaagcccctaggcaagccgccaacgaaactttgaaaaaacgtctcaaaaatcacctttcagagtga

SEQ ID NO: 341349 - DNA, 1368 bp, Pseudomonas aeruginosa
atggctacgattactgacaagcaaatgaacgcaaagccagccaagcctacctggctaatcgaagacgcaccgagaggttgcggtcgattcatggcacgactgcgcccaaatggcgagcgccatttctacttccgctacacgaactcaaatagtgagcgcgttttcctcccacttggaatctacgaccaggccggagtggatgggctgaccctgaaggaagccaggttgaaggcaggtgagctttcccgcctctaccaaagcgggatccgagaccttcgagaacacattcaagccgaagaggatgcccgggcctcagcaaatgaagcagagcagcggcgcatcaccgccgagagagctgcacttgaggaagcacaggctaggcgagcagcccggaagacagtccaagacctttttgaccactgggccaaggtagacttgatcaaccgcaaagacggtggcgatgaggttcgccgtatgtttaacaaggatgtcctcccgctactaggaacgaagcctcttgaggaggtgcggaaaggtcatatcactgaggtgacagacgttttgctggctcgtggcgtgaaccgcatggccaagttgatcttcagcctgatgcgccagatgttccgattcgcggtggatcgagatctacttgatcacgatccgacagcaagcattcgcaaagccaagatcggcggaaaggatgtcgagcgagaccgagtcctaagtgaagaagaaatttgcacattggctagacttacgcctgatgcaggcctgcttccttcgacagaagccgcaatctggatagccctctctacgtgctgccgtatcggagagctgatgaacgctcgctgggaaaatgtcaacatcaaggcagaatactggctcattcctgcggaagacagcaagaacggaaaagctcacaccgtgacactgtccacgttcgccagaactcagtttgaaaggcttcaagcactttcaggcgaaagcgagtggtgctaccccaatacaaaaaaaaccggccctgtctgctctaaaacagttacgaagcaactcggtgataggcaacggaaaattgatcaaggcgtgatgagcaaccgcagcgccaaatcgcaagctctaacgctcaaaggcggcaaatggactcctcacgacctcagaagaaccggtgcaactttaatgacagcactaggcatactacctgaagtagctgaacgctgcctgaatcatacggaagacaacaaagtcaaaagaacctaccagcgacatagctactctaaagagatgaccgaagcatgggccacactaggccggcatctagaaaaactaacagcacaagaacagaaaataatcactaggcagatttcctga

SEQ ID NO: 341350 - DNA, 507 bp, Pseudomonas aeruginosa
gtgacagacagcaaacaacgcataagcaagcgcaaggtggtttatgccttggtgagcgttgttgtggctggctattttgcctggcgcttccagccccgctatcacgacaacgccaatgccctcaccgtgctggtcacggtgttctccattttggcgggtttccttgtggcggtcatggctatcgtaggtagtgagcgagccctgagaggtactggctggaagcagaacatgtactacctgacccaggtgaaaaaggatctgcgccgacatgcgatcctgttttacctctacctggtgattttggcgctggcgttcttggcctcattggggctcaagtggcctgtccctattcaggtgagccttgagtgcttgctgttgttcttggcctgcttggccatgctggcttccttttctttgccaggccaactcactcagcgccatatcacggatctagagaatgtcatcaaggatcgccgtgagcaggaaatacgcaacagaaaaccatag

SEQ ID NO: 341351 - DNA, 618 bp, Pseudomonas aeruginosa
atgactgaaggcagcttccgtacggccggggttgctgtttacctccggctgctaatctccaaggccaacctgaaagcaggtgatagcgccttcgaactgcgcaaggtaacgaatcaagaaacagccgctgtccttgaggctgagggcatcaaggagctacgcctcaacaccaacatgtaccgggccactcgggagctgagcggcgctgatgaagccgacagcaaagtcacctctacccttaagtcgttcgtcggcacgcttaaagacatgtttgccgaggacatgtccgaggccaagcgtgcgcttctagccaagcactgggacgaaatgcaggtcaatacagtgattcgagctgacggtggctccagggcagaggaaattgtcttggatgtgatgaacatcgtgggccaaggcgtcatcgaagaagaagacgacagcgttgaggtcactgttatcaccaagaagaacaccgagatccgtctcggccaggtaaccccgatcaagaaggttcggctgttccgacgcagcaatgcaaacgatctggtgaatacagatgtttacaccgtcctgaagaactatcggacggaactgattacccaaaggcattggcagaagtga

SEQ ID NO: 341352 - DNA, 318 bp, Pseudomonas aeruginosa
atgttcaagctgtggaccacctatcgtctgcccggcgagtgggaaaagctcaccgtgggcggcggcgccaattggcagagcggcattcacttcaccgccacaccctggcagctggggcagacggtgaaggccaagcaggagcagtacaccgtggtcgatctgatggcacgctaccgcttcaccgagcaggtttcagcgacgctcaacgtcaacaacctgttcgacaagaagtacctcagcgcgctggataccaccttctacggtggctactacggcgacccgcgcaacgtgatgctgaccacccagtatcgcttctga

SEQ ID NO: 341353 - DNA, 984 bp, Pseudomonas aeruginosa
atgaacgccaattcccccgacgatctgcccgatgcggtactcgaccaagctattggctggctggttcgtctgcagtcgggctacgccgatgaatacacgcaagcggcatgcctacagtggcgacacgcccatccgctgcatgaaaccgcctggcaggcgctacagaccagcgaatccgcgttccggcgactggccgaggctcccggcagcgtcgcgcaagacgccctgcagcgcctgcagggcaaacgccatggccgccgccaggctctcaagatgctcggctttggcgtggcgatcaccggcctgggcggttgggggctgcgcgagcactcgccggcagactgggcctcggattacagcaccggcgtaggcgaacgccggcagttcctgctgagcgatggcactcgcctgcagctcaatacctccagcgcggtggatgtgcgtttctccaagcagcgccgaacggtccagttgctgcgcggcgagattttcatcgacaccggcaaggatatcgctgcgccggagggatatcgcagcctctgggtcgacagcaggcacgcacagctacaggccatcggcactgccttcggagtacgcgaggaggcccgggggacacgcctgcgggtcgagggaggcatcatcgccatccatcgcgccggatcgcaacccattcgagtgctggcgggtgaggaatacctgatcagcgccgatggcagccacaacgtcgtgagccctgccatgaacagcagcgcttggattcaaggccagctcgtcgccaaacgcatgcgtctggccgagctgctcgcagaactggcgcgctaccggcacggctggctcagctgcgatccagcgattgccgggctggaagtctctggcgtgtttcagctcgaccacatcgaccaagccctggatgctctcggcgattcaatgcctttgcgcattcagcgctttaccccgctgtggacacgagtgaccgctcgctga

SEQ ID NO: 341354 - DNA, 516 bp, Pseudomonas aeruginosa
ttgccatttccgcccgcctccgccacccgccacgtcgatatccaagccctgtatctcgatcaccatgcctggctgctgggttggctgcgcaagcggctgcgccacagcgagggcgcggcggacctggcgcaggacaccttcctccacatcctcggcaagccggcccccttgcaggacatccgacagccccgcgcctggctgagtgtcgtcgcccggggcctgctgatcgaccggttgcgccggcaacgggtcgagcaggcgtacctggaggccatcgctcacttgcccgaagcgcaagtgccctccccggagcatcaactgatcctcctggaaaccctggcgcatattgacgccctgctcgatgggttggcgcccaaggtgcgcacagccttcctgctgtctcgcctggaaggcctcggttacaaagagatcgctatccgcctgggcgtcagcctcagctcagtcgagaagtacatggcgaccgccatccgccactgtttcctcgcccaacgatga

SEQ ID NO: 341355 - DNA, 444 bp, Pseudomonas aeruginosa
atgctcaatggccacgccgtcaccggtgagcagctggatgactatcggcagcagtgctcggcggtgttcagcgactaccacctgttcaacgatctactggcggagactgcgccgctcctcgaacgagcccggcattacctcaggctgctggagctggagggcaaggtcgacatcgtcgacggcgcgttcagcacactcgacctgtcggcgggccagcgcaaacggctggcgctggtacatgccttcctcgaacagcggccgctgatgctcttcgacgaatgggcggcggaccaggatccgaccttccgccgggtgttctacgaggaactactgccggacctgaagcgccagggaaagacccttatcgtggtgtcccatgatgatcggttcttccaccacgccgaccagctagtccagctgcgcaatgggcgcgttgtcgactga

SEQ ID NO: 341356 - DNA, 414 bp, Pseudomonas aeruginosa
gtgaatgaggagctggcgaccggctttcgtccgctggtggttggcgatggcatcaacgactcactggcgctcaaggcgggcgtggtcggtgtggccatgggggcagggggcgccgacatcgctttggcggcggcggatatcgtgttgatcaatggcgatctgcggcgcctggggacttgtattcgcctgagtcgcctgtgtcggcgcacgctgcagatcaacgtcatcatcggcctgggctggacactggcgattgtgctggctgccgccttcggcctgctgggtgcggcgggcgccatggtggcggcactgctgcataacctcagcactttactcgtgctggccaatgccgggcggctgttgcgttatgacgaaacgctttccaaccccaatgaatcggccgtgcaagtttga

SEQ ID NO: 341357 - DNA, 1860 bp, Pseudomonas aeruginosa
gtggtctggctcaatcgctggttgccggaagcccagcgcctgcccgacgcaccgcaagccctgcgtctgcaagcggactggacgatccgcctggcgcctggcagcgactggctggagccgcgccgggtgctcgacggcggtggctcggcggcgctgctggtgcaggctccgcaagcctggccgctgcccggtctgggtaatgtacagggcgaactgcaagtccaactggatggagacgagggcgcctggttgccacgccagctgcgcagcgacttgcgcctgagccagttgcacggcgagtggttgcaggcgctgccggccgagttgcggccgagcgcgctgggcttgcgcagcgagccgctggagcgcgatgccgatagcgtcaccgcgttgcgcctggcgttcaccagcgagggcgcgagtacgctgaagctggagacgcggctcgacctgctgggcatctcgccgtgggccgccaggctggtggagggtcgcttgcaggtggacgcgccgcgcctgcaatacctgggctggaaagccgagcgactggtcgcggagattcccctggagggccggctggacgggcagcgcgccaacctctccttcggcaggggcgcgcgactgcaggcggcgtccctgaccgagccgtcgacgctgcaccttggccagccccgcctcgacctcgccgggaccgctctcgaactggcctaccagccgctggcgctgcatttcgccgggccgctgcaggcgcaggtcggacaactccgccaggccaacctcaagccgttggcctggaccttcgaggggccgctcgacaccaccctcgagcgcaccagcctgaagggacggctgagcaacggtgcggggctggcggcggacatccagctgcagcgcgatgcgaagacgcccctggcactctccgccaagctggccgaggtgttcttccgtaccggcaatccgctggccgcgaccctcgccgactggccggggctgctcgaactgggcaatgggcgcgcgaccgccgcggccggctggaagctcgacgcggcgggtggctcgtccctcgacctggacctgaccctgaaaggcctcgacggtatctacgaccgcagcgagctgaaggggctgggcggcagcctggccttgcgcctgcgcggcggtcagttgagcctggacagccccggcctgagcctggccgaggccaatcccggcctgccgctggggccggtgagtttccgcgggcgctacgaggccccgctttccgcgccgggcagcggccgcctgagctggcagacgttgcagagcggcctgttcggcgggcaggcctcggtccccgcggggagcatccgcctgggtcaggccgagcagaagttcgccttgcgtatccagggcatacaacttggcgagattttccgggtctatccggcggagggcctggccggcgaaggcaccctggacggcgagctgccgctgatgctgaaccgctggaagcccagcgtctccggcggccaggtcaaggcccgcgagcccggctacctgcgcttccgctcggcgaagatcgaggcgctggggcgcagcaacccggggatgaagctggtcgccgatgccctcgacgatttccactacgacgtcctgcaaagcagcgtcgattatcatgagaacggcaagctgttgctcggcctgcgcttgcagggcagcaacccggacctggagaaggggcgcccggtcaacctcaacgtcaacctggaggaggatatcccggcactgctgaccagcctgcaactgagcgaccgggtcagcgaaaccattcgccaacgtgtgcaggagcgcatgcagaaacgcaaggcttcggcgccatga

SEQ ID NO: 341358 - DNA, 150 bp, Pseudomonas aeruginosa
atgagtgagcgcacagggctgcgttatggcctgctcggcctgatcgtcatcgcgttgctggccgcgctggcctatttcgtcgcgcgtccccccagaccccggcggcggcccatgccgcggcggtcgaggaaaaccggttgcagtcgctga

SEQ ID NO: 341359 - DNA, 1146 bp, Pseudomonas aeruginosa
atgcagatgcaatatagctatcgagctatcgacaaagagtttcatgaaccttggcagagagctttgggaaatgtgatcgagcacgccctcaagccattgctcgacaaacacactaaagattcagcgcaacttcaaatcgtccttgatcgcgacaagatcaagcggcaatttctggccagtggctatatgcacctgcccggcaaaaagactgtcagcgttactgcatcacatgacgagctgacgcccctcgcgcagatgctcgcacagtcgttgttccgtcaggccaagaagcattttgaccgactgcatgctcaggatcaaatcaagcgcaaagcacgacgcgagcgcttgcgcgagctcaaggtgcggattgccgcaaaacccgcatcagccgcccatgaggccgaggcgacccgaatgcctctactgtcgaaacttgaggctgtcgcaaggcgtgagctggcttatctgcgggccgtcggcgatttaccgcgcgattatccgacgctgcgcgacgtggtggatgaagcgattgtccgagctgaggtggaatggcaatccgtgccgggggaaaaagaggcttacaccggtcttttgaagcatctgttcgccgtcctggataacgaagtggcaagcagccggcaatttggcgaattcgtttctctggacgcgccggtcgaaccggatgcccaagacgtcgccgaggccatggtggaagaggaagtcttcgaattttatcagcccgatgacacactcaggctggccgatatcatcgctgacagtcagcatcccgatgccgcaacgatcgcggaacaggaggagctagttgatcggtcgagcgagttcgcttttgcattcgacctgctgaaggacatgccgcgtttgtggcggcgcatttttctgcttatccgtgtggacgggctggatgccagcagcgtctctgaaatcctgctgattcctagtaaggaagatgctgtccgaaggtggctcatgcaggccgaagcattcatcgctgctcatctggaagaggccggagtaagcaaaaacgggaacgattggctccaaggcgttgattggtcggcattgtctgtgacccggagcgaggcagcctcactgtggtccaaggaggcgaaccatgaagaataa

SEQ ID NO: 341360 - DNA, 183 bp, Pseudomonas aeruginosa
gtgatcctcatcggcctgatcgcgctggcacgcaagttcgtggtcctcgaccccgacacgagtcccgccaaaatcgccgcgctggcaggcgccacactggcgcttggtaccacttactggctgctgcgcgatcgcgacgaccgcgtcgccgagaaatctgggcatgaatcgtcatcatcctag

SEQ ID NO: 341361 - DNA, 651 bp, Pseudomonas aeruginosa
atgctcaaaagaacactactcagcgccgctgtagcttcggcactgtttgctggagtcgcgaacgctgccggagtggttgctattgccacaagccccactctggaggcgaactcgcctggtgcaaccgagcagtacgggccaggacaggccaactatgtcgtcggcaagagtgtggaaaatggtgccaacctcgacagcaaggcggccaacatcaccctggctcaggagattttcggcaacaagtccgaagaaactacctttgacctacccagcgttacctacaccatcgatccagtgaaggctggaaatgccgctgcgggccacaccatcaagctgacccttggtcgtaccgtcgtgcgcttcgccaaggccgtgaccgccaaccagatcaagatcggcgccctggctgcgggtagcggcttcgtcatcaccagcggcactggcgccaccgacaacacgcttgagctgcgcctcgaccaggcgggtgccgacatgatcaagcagaccgcgaccggcggcaacgtggtgttcttcaacttccgcgagccgagcagccaggacagccagcctgccaaggtcaccaacatgcgcgctccgcttcagggcgatgccaccttcgtggcgtggctggatcctggaatccgaaagtga

SEQ ID NO: 341362 - DNA, 381 bp, Pseudomonas aeruginosa
gtgccgctggcgctgtaccacggtcgtcgcctggaagtgctggagctgggcgatgccagcgccgcccagctcggcgtggcggtggagcgcgtgcgcttgcagatggtcctggtcgccgtcggcatgaccgccatcgccaccgccgcggccggccccatcgccttcatcgccctggccggcccgcaactggcccggcgcctgacccgctcggccggggtgccgttgctgtccggcgcattgatgggcgcggtcctgctgctggccgccgacctgctcggccagcgcctggcatacgtcgccaacctgccgatcggcctgatgaccggcctgctcggcggtttctacctgctctggctactgctgcgcagccgccggatctga

SEQ ID NO: 341363 - DNA, 1509 bp, Pseudomonas aeruginosa
atggccaaggcaatcccccagctgatcgacggcgaatggcgcggcagccgttcccgcgagctggtcgaagtcaccgatccggcgacccaggacgtcctcgcgctggcgccgaaggccaccgccgacgagatcgagcaggccatcgccagcgcccagcgcgccttcgagacctggcgcgaagtcccggctcccgagcgagcgcggttgatgctgcgctaccagcacctgctcaaggaacaccacgacgaactcggcgaactgctggcccgggagaccggcaagaacctcgccgatgccaagggcgacgtgtggcgcggcatcgaggtggtcgaacacgccgccaacgtggccagcctgatgatgggcgagacggtggaaaacgtcgcccgcgagatcgacaccgccagttggatccagcccctcggtgtgtgcgccgggatcaccccgttcaatttcccggcgatgatcccgctgtggatgttcccgctggccatcgcctgcggcaacaccttcgtcctcaagccctccgaacaggatccgctgacacccaaccgcctcgccgagctgttcctcgaggccggcgcgccgaagggcgtgctgcaggtgattcatggcggccgcgagcaggtcgatgccctcctcacccacccggacatccgggcgatttccttcgtcggctcggtcgccgtcggccagcacgtgtaccgcaccggcaccgcgcacctgaagcgggtgcaggccttcgccggggcgaagaaccacatggtgatcctccccgacgcgaacaaggcccaggttctcggcaacctggtcggcgccagttgcggcgccgccggccagcgctgcatggcgatcagcgcggcggtgttcgtcggcgcggcgcgcgagtggattcccgaactggccgagcggatggccgccctgcgccccggccactggcaggacccggacgccgcctatggtccgctgatcagcccgcaggcgcgccagcgcgtgctgcgcctgatcgccgaaggcaaggcggaaggcgccgagtgcctgctcgacggctcgcagtgccaggtcgaaggctatcccaacggcaactggctcggtcccaccctgttccgcgcagtgacgccgaagatgggcctgtaccgcgaggaaatcttcggcccggtgctggcctgcctggaggtggaaagcctggaagaggccatcgccctggtcaacgccaacccctatggcaatggaacaagcctgttcacccgctccggcggcgccgctcggcgctaccagcacgcggtgcaggtcggccaggtgggtatcaacgtgccgatcccggtaccgctgccattcttctccttcaccggctggaagggttccttctacggcgacctgcacgcctacggcaagcaggctgtgcgcttctataccgagaccaagaccgtcaccagccgctggttcgacgatgaaccgacgaccgacgaatcgtcggccggcccgaacatgaccatccatctcaagtga

SEQ ID NO: 341364 - DNA, 732 bp, Pseudomonas aeruginosa
gtgcagagcaccaggctggagaggaacaggaagtgcagggagccgaagtcttccgcgcccttgccgccgccggcccagttgatcgccaccgggaacaggcacatgccgatcgaggtgatcaccgtgccggtcaccagcggtgggaagaaacgcacgatgcgcgacatgaagggggcgatgagcatgccgaagaaaccggcggcgatggtcgcgccgaagatcccggtgatgcccacgccgggcatcccggccatcgccaccatgctgccgacggcggcgaagctggcgcccatcatcaccggcatgcggatgcccatcgggccgatgcccagcgactggaccagggtggcgatgccggcgaccagcaggtcggcgttgatcaggaaggcgatttcctcgcgcgagaggccggccgcctggccgacgatcagaggcacggcgacggcgccaccgtacatcagcagcacatgctggaagcccaccagcagcagctgcgtcagcggcaggcgctggtctacgggcgagtcggggatgcggcgatcagttaccacggacatgcaacacctcaggcgtttttattgttgtcagtcgcaggcggacaccggaaaaggcaggttccggcggccgggtatttctggccgaacatccaccccaggcttcagggcgatgcggtggggtgttttatatccccgttgtgtgctcgattcaatcgattttttgtatacaaagtaa

SEQ ID NO: 341365 - DNA, 843 bp, Pseudomonas aeruginosa
atggtggtgaagcatcctgaccctcttctcgaggtaagggcttgttgcatagagagccctccattcacctcactatgtgttggttatgaggggggggtatggcgttcgaaagctttggccgaccacttattccagtggattccttatgttgctcttgatcaagaaagccagctttccatgggatcgcataatttccttgagcttctccaaagagctacagcgcatatttacaataccaaaaagactgaaaacagaggtgagatcggagaaatccttctacacatcgcatgcgttactagcttcaacacctcacccatactttgcaagctaatattaaaaacctcttcaaacgataccgttaaaggttttgatggggttcacgtcctagtaaaagacgataaagttgaactctggcttggagagtctaaattctactcagacccaagatcagcaatcagagaagccgtcaaatcaataaaagagcacatacttccagatttcctcaacacagaaaaggccatgatcatcggacatatcggccataacattccaaaaaaagaagagataactcgcttattcaaaagacaaacatcctccgatgagcttctgagaatatcagtattccctatcctcatagcatatgagagcaagagcgttgcctcctttacagagctaacagatcgatactacgaagagcttctgatcgaatcggaagctctgagacagtatttcgctgatcaatcaaagaacatgccactgcgctttcagataatttttgtccccatagaaagcaaatcagatgtaatttcaaaatttgacaagcgactggagtcattttcatga

SEQ ID NO: 341366 - DNA, 2151 bp, Pseudomonas aeruginosa
atgagcattcttgaggaactaaaaaaccttaagcaaagtgacttcctcagctccgatcaagtatttgaagcaatattcctagcaggctcactgctaaatgatagtgatcgggagagctccgagccgcttgatattgcagttagactattagccgctagacagaatggacagacgcccaacagctgctctgacgcaattgaatatcttgccgaagagtgcggactataccagtacatagacaaaaataaattcagtttagttacccagtcgataatcgagtcacacgctgtaattttgggaaaaaaattttatcttcatgcaaaacagatgcaggccctcctgcatcttttatcaggaaaaaatctgatacttagtgcgccaaccagctttggaaaaagcattttggtagacgcctttatatctattaaacgcccacatacagtggtaataatactcccaaccatagctctcatcgatgaaacgagaaggcgactaatgtcgtcatttcgcgagcactatacaatactgacctctgcgaccaagtcatacaacaaagaaaaaccaagtatattcatacttacacaagagcgattcattcttagagatgacgtggactatattgactttttatttgtagatgaattctataaactcgacccagatagagaagactctagatacgaaccgctaaacattgcattatataaggcccttaaaattaccaaacaatcctttatggccggaccaaacataaaggacatcgaaataggccctaagtggacaggaaaattcaccttccttcaaacggacttcagcactgtatctgtaaatattattgatcgatcacgcagcgaaaatagattaaatacctttctacaagacctacggggaattcgcacaggctcgtcgcttatcttcaccgcatcgcccggctctgcccagaacctactgaggataactatgctcaaggagtttgggcatgcatccaaaataggatcaagcttgggcgactggattgccagaaactaccactcggaatggtccctcgccaacggcgtacgaaggggactcgcaacacaccatggtcgcctaccaagatcactcggacaactcttcatcaacttgtttgacaagggagttatcaatactctcttttgcacatccactttaattgaaggagtaaacacgtccgcagccaacgtattcatttacgataaaaagattaatagaacaaacttcgactttttttcctttgcaaatattcgaggaagagtcggccgtatgatgcagcactttgtcggaaatgcttacctctatcatgagccgccggaagaaattgaaaccaacgtaatagttcctgttctggcagaccctggaaactcaacagactacattctcatgaacgttgactatgagtcgctctctgccgatggaaaacagagacaggatgagctcctcgagcaaaccggactcacggaacctgtacttaaagaacatggcggtctcggcataaacatgctgattctgcttcgagaaaaaataatagaagtaatggctagaagcccaaatggactaatttggagcggcatgcctagcaatgcacaacgtagaaccttagcagagctagtcgtatttgtagcaaagagcaaaaacgagcgctttggactatttacatacaagcaggtctcgtgggcatggtcccagttaagctactatcaaaagacagctgactttttaagctggtttacaattaaattttctgccgaagagattgaggaatcaatcgaccgtgcatttcaattccttcaggcgtgcgaattcaagttccctcaaaaagtaatggcaatagagtcaatagtcaaaagcctttatccaaaatcgaaaattgactatagcttttacgccgcagcacttgaaagctggttcaggccctcctggatgaagcagctagatgaaataggcgtaccccttccattgtcagagagactctcaatatatttacgaaaccctgactcctcagaagaagcaatacagcaaatatcaaaactcaataccagagaaattagtgaaatagatgtaattgatcgctacctaataagaaacatactcatagacaccaaaggggttggcgtgcagttaaaacttgcgtaa

SEQ ID NO: 341367 - DNA, 672 bp, Pseudomonas aeruginosa
atggcgatcagctcaatggcaatcaagattctatggggacgagccggaggccgatgttccatgccagactgcagagaggacctcacagcacttgtcgaaagtggctcctacattgtaggcgaaatggctcatattatcggcagcaagcctaccgctgcgcgtggaaccccagagggaggagaagatacatacgacaacctgatactgctctgccctacgcatcacactcacattgataaagcaccggcgggaacctatccgatcgaattacttcatgagtggaaacgagctcatgaagaaactattagcaatgctgctagttctgtaaaatttgaaagctttgcaaaactccgaattgcagtagttcgcctccttgaagccaacagactaatcttcgagacttatggacctcacagtagcatagctcaatcagacccagactctaatgcttacttgatctgggaacttaagcgcatcgaccagatagtgccaaacaataagaaaatcctgaatatccttgattcaaacgcagacctcattgatgaaacagttgcaattactgctatagaaaaatttcgtgtccatgcggaatcttatgaaaggcacgtttaccaccggcttgactcgtatgaattattccctaaagaactttatgagatctttccattatga

SEQ ID NO: 341368 - DNA, 1359 bp, Pseudomonas aeruginosa
atgacttacgtaatccgtcgcggagccatctactacctgaatctccggctgcccaagcatctctttccgcaccgtcacactcttcgcttgagccttgatgtgcgggacaggaagaacgctgtgtttctcgccagcgccctcacccagcgggttcatctgcacatcactgataagccactcactactctggagcagcttcgtgccctctgcatccagtggcgtgaaggagcgccagcacctatcccgttgcccatacatcgtagccagcaaacaccctcaactaccctaaccactgcggcaggaaactctccgctgcttagcacactgtcgaagatctatataaaggaaggacaacgcggcggtacatggcgagaagtcagcagcctcgacgtacagcgggcgcttcgggatttcttcgagctgatgggcgacatgccagccgaccactttacagctgaggtagcacggacactcaaggctcgactcagccggtgcccgcaatactttgcccaacgaccggagttcaaaggtatgtcgctgcgacaggtagtcgagtcagcgaaggattatcaaaccatcaccgcagtgacgatcaacaaccgtttacggaagctcaccgccttcttcaactggtgcaaatccaacggatatatcgagcagaacccattagccgggatgaaggtcatggctggcgctgcgaaagatgcgcgtctctccttcgaccgatctgaccttctggtgttgctgaacctcgacactcttcgccaagaggcccgcaagcatccttggagattctggcttcccctgctcgcccgtttcactggtgcgcgactggaggagctttgccagcttcacacgacaaacgtcatcgaagtacagggagttccgtgcattcagatcgacgacagtcatgatggacagaagttgaagaatcagagcagccgtagaactctccccatccatcctgcactgatcaccatcgggctgcgggagtatgtcgaatcgattggggcgaacggtgccacgagactatttcccgatctggaacccacacgaggcaaatacggacatgctccatcgaagtggttcagcaggtacaagaccaagatgggcataaccgatcctcggaagaccttccatagcttccggcatacgttcatcgacgatctccgagaggcaggtgtgcaggattcattaatcaagcagatggttggccatgaggatggttcggtaactttcggagtctatggaagtcgcttgcaagttaccgccatgcggcaagcactcaacgccatcgaaatagatcaagccatacggaaaatgcaagtagatattgacagccggccgaaatataggtaa

SEQ ID NO: 341369 - DNA, 807 bp, Pseudomonas aeruginosa
atgagtcaagctacaccctgcaccaccactcccaccaacaacaccaataccaccgccctactcactcccgctgaattcgaagcaatccggctttacagcgaggaaggcctgtccatcgaaaacgtcaggaagaccactggcctgccaaatcatcacgtgagagccctcctcaaaggcaaacctcgggcactgaatacgcccctcagcaagtccgtagcccgagtctatgagttagcgatccgccccctaggcatcaaggactatgagctacgtgacattctgcacgaagaatacggcagcaattgggatgagcagaaaggctgctaccacgccaagaccacccctgacaccatcaagcaggtgaaagagaaggtgcgagaccgagcacgccgtgaaggtcaatccgtcatattcgtaatggactgggtgtgcgacagcttggcaaccgaaagtcgagttttccttgagagtgccgccttgagcctcatggcacgtgtagatgagtgcgtcaatgagttcatggagcgcttcgcggcccacgcaacggaagacagcgaagaagctgatcttgcccattgcaagcaggcatacgcagcacgcagacatttgctgaagcttgtgagcggcttacacccggaaccgaattcatcgctgctggagagaacgacagcagttacagacgcgcttgatgggataagcgatctgccagcaccgccagtgccccgacaagagcctgcggggctaataccagagccatcgaacagtaatgccttcctcgactatatcgaagctcaaggctggctctag

SEQ ID NO: 341370 - DNA, 267 bp, Pseudomonas aeruginosa
ttgttcactggcgagagcaatccaacccaagagctgatgctgagcatcatggattctgtcgcccagttcgaacgagcaatgatcaaggaacgccagaaggaaggcatcgccaaggccaagcagaaaggcgtctacaagggccgtgtgaagacggttgatgacgctgctatccgtgcccatgttgcagccggaaacagcatcaggaagacggcagaagcctttggagtgaacccttccaccgtgcaacgggcgatgaaagccgagtga

SEQ ID NO: 341371 - DNA, 321 bp, Pseudomonas aeruginosa
atgaccatccacatcatgctcaccgtggacctgaacggccacgtttcgaccgaagcacgggcgaagttctacgaggtgctaaagcagtaccatctggtccgtcgcaagctcacaacggtttggactgccgagttcagtccggggtccacgaaggacggtgctgttgagtacgtccggaaagccgtggaggctgcggctgtcgcctccggggtgttcgattacgaggtggctgtgctgccgagtgacgttgctccggtaacgtgggctaagtcgccccagaagctgggcttgctcggtgctgcaaccttgctcggccggtaa

SEQ ID NO: 341372 - DNA, 123 bp, Pseudomonas aeruginosa
atgagtcagaaacgatccagcggcggtaagaaaaccgtccatcgcagttccatcaccggtcggtttgtcccggaaagctacgccaagaagcatccgaagacgaccgaaaaagagaaactctga

SEQ ID NO: 341373 - DNA, 315 bp, Pseudomonas aeruginosa
atgaatgaaaaactctttgtgttggctagccagaaaaagacgaccaaccacatcctgcacctgttgctgtgcatcccaacctttggcctttggctgatcgtttggcttgtggtggcatcgggcaacagcaggcacaacgctagaattcaagcccagatgaatcacatcctcggctacaagatgcagggcatgagcgacgtcgagacgtatcaacgagtgagctcagatgaggctgctcggaaaaagcgaagtgaccagatttttgtcgtgtcggtgatcgtggtgaccgtggcactgttcttcttgttgaagtag

SEQ ID NO: 341374 - DNA, 966 bp, Pseudomonas aeruginosa
atgactgaaaatctggtccactcttcaaccagcgggatctcggcagaattcggctattacccagcaacttgcgatatcgagagcgaacagttttccattcaaacgcttcccaaccacaggcagaccgtctcctctatcgttgaagatgtaaatgtcgtcgacggctggctctacccgagaccacagaaacgattggatttcgtgagcagaacggtccgatcaatgccctatagcagtcgcgtcttcgggctgcccaaaactcatgctttgacacttcatagaagcaagaaccaagacgacctcgactttgtagtctggtgcctatccttttttattggcatgcgcctgacgactacagaggtgggctttcttgatgcgactcctgttaagccacacaagctcgttgacttcgtccttcaccgctgcacgctaaacgaagctgtgcatttggcactcaacttcctagagcaggagcacgatgctcctcgtgcaaccaagagagtcgccgcagtcattcatgccttgttcttggcacaataccctcagagtcttccttttgagcggtttcagtacctctacatggcattagatggctgtttcaagcttctcaaagtcagagaggaagccaatgtaagcgtgtctcatgcaggacgaatccaatggatgtgtaaaaaattcaacatccccttacccgaatgggcagagagccaagcaggaccttcgcccctatcaactgcccgtaacgatgctatccatgaagccctattcttcgatgaacctttagggttctcgatttacggtggtaacaagcctgatggaaatcctaccaacgtcaccctgcaaatgagggcattggtatgtcgacttctggtcgccatcctcggaagggctgataccatatatgtcaaatccccagttaacacccgaatgatacatagccttgagttgtcagatcgcgtcacctaa

SEQ ID NO: 341375 - DNA, 636 bp, Pseudomonas aeruginosa
atgttcattcgggcctacctccgtgcatccaccgacaaacatgcaacccgtgctaagcagttgctgattgacttcgccagtgagcatggacaaaagattgcagccttctatgttgagaatgagtcgggcaccaagcttgatcgtcctgagctattcaggctgcttgaggacagccacgaaggggattgcatactcattgagcaagtggacagattgtctcacctctcgccagatgactgggcaagtttgaaagccatcatcgcagctaagagggtggtagtggtatcgctcgatctggccaccagtcatgcagctctgaagcctgctgccaccatggatgacttcactaaggggatgattgcagcggtcaatggcatgttgctggatatgctggctgtagttgctcgtaaagattacgaagatcgtcgtcgccgtcagagccaaggcatcgctaaagccaaggaaatgggtgcatataaaggcaggcaagctgatgaggatcttcatgctcgcatcaagcacgccctgtcctctggcatgagccttcgtaaggcagctaccactgtaggttgtgccctgagcacagtgcagcgtgtagcgaagatgcagctcaaacccgcctctccggacttctag

SEQ ID NO: 341376 - DNA, 2289 bp, Pseudomonas aeruginosa
atggataataatgtcgggtttattaagacaattaaggttttatctgactttgaagagttggttcggcgttttgtccagaaaatttatagcgcggatgcctacttggtaggtgggccatacgatggtggtagagatttggtctatgccgttcgagggcgggaagttaggcaggccatccagatttcgactcaagagaaaaatcttgaggctaagctaaacgaagaccttgaaaaggttgttaagctggtagatgaacattcttatccacctattttgattttcttttggtcacatcaaatatctgcaagtaaagaagatgaactgaaaacgaatgctaggcgtgattatggagtaactctggaattttatgatgctaataaagtcggccaaaaaataactaatgaataccctgatattttaaggtttttgttagaggatgttcataaatatcgtccggcttcgaatgctgatgtgaatattaaacagcgtgctttctatgattatttggttctgagtaaagatactacaagtctcaagcatgttatcgtggattcgcatatcgtctcggttctgagtggcggttgtttgacagaggcggttttggtcgaggtcttgggtgagctgggtatcagtttacctgttttcaaatctcgtgtttctctcctcaagaaagaagggcgggttgttgtgggtgaggggggctatagcctcgcagaaaatgagcttgatagagtaaaggctcttgccatgaaagatcaggcaggtagggctgaagtgctcgcagctatcgatgaaatttccaaagaatatacttctgctccagtggcagagcaaatactggaactgattcaggaagcgtatggtgcgtcagtcgatattcaaatttctgaggagagttttgagccgccaaagcttgcaatagtaaaaggagcagtagagaatattgctagccttcttaggagggtttcggatatctcagataatgatgctaagcatgcatcgcaaaagctcgtagagatttctgctaaaaatgaatatttgtcaaactactgttcaactcgattatgtatcgggctgttaaatcaatctaagcttgaaaggtacgtagaggataaaaaattcttcctgtatctagacgctccggtatttatctactatttggcagttatgcggtatagggaggacgttgatgataacgcttaccgaacggtggggcatttaagggataatattaagaggcttcgtaacaaggaggttcgagttactcttgagcactttgaggagacggtccggcatctggaaaatgctgaaaaaataagccgctttgcaagcgatgagctaatcgcgagtctcggagattcaaaaaatgtgttctttaacttgtatttgcggcttaaggagaaaaaggggcgccgatatgagttttcttcttttctcgaggacttcataggctttgagaatatcaggggaggctttcctagatttgaatctctgctgctgtgtgcccgacaatatgcagagcttgggggggtgcgcgtgctgggtgtggagcaagagcagtcggaaggcttttatagagatctgcactcaaggtttatgcggttaattcgtgtgcctagaaaatggcaaaccttcaagaatgacgtattagcatgtcaagttcttggtgatgtgagtaagcatttagatgctaacggtgtttttcagacgccattactcattacttgggattctactcagcacgcacttagacgtatatacagagaaaaatttcctcatgatgagtgggttgtctatcctcctcatcgtgcttccgaacggctctctatgattgatcttaagataaatagcgaagatcttaaggatggagttttggcaatcattgatgaagattttttcaaagatgccaggagcggaagcttattggatactctcgctattttccttggggatgatcaggctgaaagtggagctgttgttagtctcttgacaaaacttagtcgaagaataaccgaagagcctgatgatgttaggcatacggatttcgatgctcagaatactttgaatgaagtattgatttttacgcagcgggagtttaggcgggagttttctacggtaagaaagctttttgcggaagaacgatttgtgggtgatatttatacattgctttcaaataccgttaagagtgagtttggtatgcgtcagaaagaagagtatgccgaaagtcttaggactctcatcgctcagattgagtctgaggagcgtgatgggagcgaggagagaagttga

SEQ ID NO: 341377 - DNA, 732 bp, Pseudomonas aeruginosa
atgacgcccgtaatgacgagaagcatactggtatgcgtgactgcgatgcgcctcataaaccttgtctccccgcagcaaccggcgcaacaaggtcagggtggcatcaacaatgaatacccccagcaggatgagccaaccccagaagagttgcggcgagacccatgcggcttgcagggaaaggccaccaatgataacccccaagaaaccgctaccagcatcccccatgaagatccgcgcaggagggaaattccagaaaaggaaccccgtcaccgcggctgccagcagcgccgccaaccaaacgccctgggatgcctcatcggaacctacaccactgaccacgacaagcagggcagcgccaacgcacacacacacagcctcaacgctggcaatcccatcgataccgtccatgaaattgtagagattgagcatccataccagatagaacgccgcagctatgtgtccaacccaccccagatcgaccacaaggccgaaaaaggccaatgcaggcaaacctccaagccagtacagcagccagcaagcaccggcgaaatggccgagcaaacgccaacgggcagcgatatggccatgatcgtcgaggaagcccagcaatgcgatcccaatacccgcccccaggataccagtggccagatccggtttcaccgcgcccaatatcgccgcaagcagcactgccagcaggaaggagagcacgatagcgacaccgcccccccctag

SEQ ID NO: 341378 - DNA, 633 bp, Pseudomonas aeruginosa
atgtactctaggtcgcgcggatttacccttgtcgagctgatggtcattgttgtccttttgggtgtcatggtcgctttcgccattccgtcttttgtgaacctcataaaaggcaacagcatggcttccgcgcgcaatgatttgcaaaagagtctcgattatgcgcgtgcgatggccatgacaaataagaccggggcgcaggtctgcgtagctgatgggacaataaccatcagccaggctgacaaggctgaaagatttatttctagaacgagtagagacgacaagcgtgttgaatacggctataaatatagctgggctgtagttagcaatatctcggctagtgaatacaagaatattggttctaatggtcttgattcggggtgtgtcgtttttgctaataatggaaccatacctgctcttgctaaacgaaaggctccacctctggatcaggatggaaagtgtaatacaagtggtggcggcagttcgtttgtatatgagaatgggttctttggtaagtctgacggcgctacagacccggagtggcagatcatattcaacagtgctgggcactatacggtgaagcctaaagggggagacctaacaggagaggaatcctgggatacttttgactgttag

SEQ ID NO: 341379 - DNA, 471 bp, Pseudomonas aeruginosa
atgaactggaccccatggctgatcgtcgcgctggtcgcggcgctggtgctctggcgcctcgatcacgtgaccgctcagcgtgatgacctgcaggccgccgtcgagcaatccgctgagacgatcaccgccatggcccagcaggcccagcgcgacgcccaggcgcaggccaaaaccgatgccctggcccgaacctaccaagcagcactacaggcctcccatgaagaaaaccaattgcgccgcgatgctatcggcactggtgctcgcgtcgtgtacgtcaaagcccgctgtcccgcagacggagtgcaccaggcttccggagcctccggcagcgctgatgcaggaagagccgtccttgctgccgctgatggacaagttgtttctgatctccgagccggagtcgagcggcgcgaactgatgattgatgcgttgcgtaagcacatcgccggcctgccgaggtattgcagaagatga

SEQ ID NO: 341380 - DNA, 165 bp, Pseudomonas aeruginosa
atggtaggggacgccgctaggaagaacctcaagatgcaggacaaacgcgaaaaggaagctaatagaggcgtgcgtaagtccatgaaagaatgcattaaacctgaaaacatcatagacgacgatgtaaaagagtgcatcgaaggcacaagaattagagaatggtga

SEQ ID NO: 341381 - DNA, 1296 bp, Pseudomonas aeruginosa
atgcagagtgaaattctagctggacttaagaagcaacttgaggaagaaagagctgttcggattatcctgccaaaacgtttctcatttaaagagcatgatctttacgatttcaataggctactgagcttcttcaactgggacatctacgacacccctgtgcatatagacttgacggcttgccacacggcaaactatcaggctctttccctactggttatctatgcatggaggcttaaaacacaggagtgcagagttacattcatagaaaatgacaagcagaccggtgctagcagcatgtggagaaccatgggagctagaggcctgttcgcggtgataaacaacaaagggcagcaatttaaaggaaaccccttaaaacccttgtttgcagtccgtgaaatcgaagactttaagagcgttatagaatcagccgaatcttacacaaaaggctttaacgttgagtatgagagcactctaagatacgtattgggtgagttactctacaacactatggagcatggcacatgccatatggagaatggatatagaatcccatctcttgttcagtttacatggtacaagcaaagaaacgaaatccaattcataattgccgacctaggcgtgggaataaaaaaacacttagaacaagcatttcccggccaagaatctgatgaagaagcaattatgctatccttgagaccaaaagtatcaggtacatttgggaggaatgatccctacaaaaacaagaataatgctggaatgggtctatatatatcatcaaacatcataagaagactgaatgctgacatgcatatcgtctcaatgaatgggttggttcacatatcccctagagatattacacagcgaagaattgaaaacgcatggccaggcactctagttcttgtttgcataaagctggaagctgacacttcattcttgctacataaaataatgcaggaatttagagaatccgcagaaaatgagcaaagacgtggggatgacaaagaggaaaactcaagactctacctcaatatatacaatttttttggacgttacgctgaagataaagaggctgcaataaggtttagggataaaagaatattccccgctctggatgaggaaaaacaaatcgtcatagactttgaaggagtcataagctcaccacacagctttctgagcgcactactcgcatctccaataaaaagcattggcatgaatgcatacaagaaaataaagatactcaatgccaccccagacataagagaaacgatcgactttatcttggatgacaatacataa

SEQ ID NO: 341382 - DNA, 729 bp, Pseudomonas aeruginosa
atggcgactctcgtaaaaactccctccggcacctggaaagcggtcatccgtaagactggctggccaacctgctctaagtcattccgaaccaagcgtgatgccgaagactgggcacgccgcaccgaagacgagatggtgcgcggcgtctatatcgaacgcagcagctcggagcgcatgacgcttgagaaagctctcaaccgctacctcgcggaagtctctccaaccaaagcccccaagactgcgaaatctgaagccggtagcgcaaagatactgatacctcgccttggcaaatactcgctggccgctctgtctgcggacatcctggccgactaccgagactcccggctagctgagcgcagccggcgcaaaaccctagtcagccccaacacagtccggctggagctagcccttctaagtcacctatttgcggtggcaatccaagagtggcggattgggcttccgacgaaccctgttctcaacatccgtaaacctagccccggccaaggtcgtgatcgccgtctctctgccgacgaggaacgccgcctggtggcagccgtgaatgcgcacagcaaccctatgctcggctggatcgtgcgcatagccattgaaacgggtatgcgctcgtcagagatcactggcctatgctgccagcaggtcgacatgcaaaagcgcgtagtacgcctaacagatactgacctgcccccagttttagtaccgctgcctagttag

SEQ ID NO: 341383 - DNA, 1206 bp, Pseudomonas aeruginosa
atggtcggtggccaatcgcttcctggtgctgctggccaccgccatgctcacggcatggggcgtgtggggcgttcgcagcacgcccgtggatgcgctgccggacttgtcagacgtgcaggtcatcattcgcaccaactacccaggacaggcgccgcagatcgtcgagaaccaggtcacctacccgttggccaccaccatgctgtcggtgccaggggccaagaccgtgcgcggcttctcgttctttggcgactcgttcgtctatgtcttgttcgaggacggaaccgacctgtactgggcccgctcacgggtactggaatacctgaaccaggtccagggccgattgcccgccacggcgaagccggccctgggtccggacgccacaggcgtcggctggatcttccagtacgcgctcgtggatcgcacgggcaagaacgatctggcgcaactgcgtgcgttgcaggactggttcctgaagttcgaactcaagagcctgcccaacgtggccgaggtggcatcggtggggggcatggtcaagcagtaccaggtcgtgctcgacccgatcaagttggcgtcctatggcctcagtcaggctcaagtccgcgatgccctgatgggggccaaccaggagaccggcggctccgtcctggaattgtcaggcgcggagtacatggtccgcgcgagcggctacctcaagaccctggacgagttccgggagatccccttgacggcacgcggcggtgtgccggtgcggctgggggatgttgcgacgctccagataggcccggagatgcggcgtggcattgccgaactcgacggagaaggcgaggtcgccggcggcgtggtggtgctgcgctccggcaagaatgcccaggagacgatcgctgccgtcaaggccaagctcgcggagctgcagggcagcctgccgccgggcgtcgagatcgtcaccacctacgaccgcagcgcgctgatcgagcgggccattcgcaatctcacgaccaagctaggcgaagagtttctggtggtggcgctggtctgcgcactgttcctttggcatcttcgttctgcgctggtggccatcatctcgctacctctgggcgtgatgacggcgttcttggtcatgcgctaccagggcatcaacgccaacatcatgtcgctggggggggattgccatcgccgtgggggcgatggtggatgcagcggtggtga

SEQ ID NO: 341384 - DNA, 948 bp, Pseudomonas aeruginosa
atggaccgctgccgccgctgcggttccccgtggcgccagcttggcgctccagcagccaacccgacggtgattgatctgcaaggccgactgctggacatgaagcatcgaggtgttgccgtcctgccaggcttgggacgtgtcgagtgggcctccttcatgacggtcgccgatctggtcgcggcggcgatgtggcgggagacggccgactatcaccgcgagcggctgttcgagcgcatcctgcgtgatctcgacatgcctgccgacgatcgcgtactcgttgaatggccgtccaactatggagcgctgctgacgctggcgtggctgacggccgattggcccgcccggcttgaactgatgctggaagaactgcacgcccctgacatcgagagccttctcgatcagttgcccgacctggatgacggatcgcgccagcgactgcccggtctgctggggccggcatggcaccaccgccaacaggaggttcctgggaaagaatggcgagtgtggctgaagagcatcgtcgcctcgggcatggacttcaggacgatggccagaaaggaaatgcgccagggctataccgagcggctggtggtgtttgccatgctggccgagggccgcagcattgaggaggccgctgcctgggcaggcttgaagcccgagaccatagagaggtggatcgaagtcgccgtcacctacggcatccacatggtcatcgagaagccggcgcgcgtgtgcgacctcacgccggaccaggcgcacgagatcaggcaatggctggcctcggcgacctggctcctgtcgcctcgaacgggttggcgtgcagaccatgtgcgcggcgagattgcgcggcggtttgatctgaacatctcggtgagtgcagctcaaagccttctccccaaagtaagaacctctacgtcacttcctgaccatgccgagtccaggaattag

SEQ ID NO: 341385 - DNA, 897 bp, Pseudomonas aeruginosa
ttgagcggcgactatccacacctgcatccctccgcgcgcgcatgggcagacgaagacgcgccgtcgcgggtacgccgcatccgcacggataggtggatcggctacgcacgggcgcaggccgcgttggcggcaatcgaggatgtgctgtcattcccaaagcggacccggatgccgaacctgcttctgatcgggccgacgaacaacggcaagaccatgatcgtggagaagttccggcgcagccatccgcccatcgccgcggaggatgccgaggatggcatcgcccgtgtgccggtgctgaagatgcagatgccggcaggccccgacgagcggcgcttcttcggagccatcctcgaccagttgggaatggaccactggcccaaggagcgggttgccgcgcagcaaaacctggcggttcgcctgatgcgcacgaccgacgtgcgcgtgctcgtgatcgacgaattgcataacgtgctctccggtccggtgctgcagcagcggcgtctgctcaatctgctgcgctggctcggcaacgaattgcagataccgttggtcggcgtcggcactgccgaggcattacgggccatccgcagcgatgaccagcttgccaaccgcttcgagcctgtggcgttgccgctatgggacgaagacgaggcgtatcggcggctgctcagcacactggaggcgttgctgcccctgcgcaagccgtccgggctggcgcagcctgccctggcagggaagatctttgccctgtccgaaggcgtgctgggcgagatcgtctcgatcgtcacacgcgctgcggccgtcgcggtcacctcgggcgcggaggcgatctcgccacgcctgatcgagaagtctgggttcatctcgcctactggccgcagacgtgtggccgtgtga

SEQ ID NO: 341386 - DNA, 1671 bp, Pseudomonas aeruginosa
atgaccgcagccatcgacctcacgcaggtcagcgaagccgattgggccaaggcacgcgaccgactcgccgtgatccgccgtctggccaaggccaccgagcgcacgcgcgaggacgtggcccaggcagccagccagatcggatgcagcgtcagctcgacctacgacctgctggcacgctatctcgccgctccgcagttgaccagcctgctgccgcagcagcgtggccgcaagcaaggcaagtcgatgctggtgccggaggtggccgcgatcattaatcaggtcacggaggacatgtacctgacgcggcagaagccgcgggtgtctgatctggtcgcgcaggtccatatacgatgccgagcggcgggcttggcgctgcccagccggggagcgatcgagcgccggctgagtgcccgcccggcttcggaggtgacggcccagcgtcacggccgcaaggcggcgcgtgatcggtttgcgccggcagccgggtcgctggaagcgccctggccgctgtcgctggtgcagatcgaccacacgctggtcgatgtgatcgtggtggacagccagacgcgcgagccgatccagcggccctggctgacgctcgccatcgacgtctgcacgcgctgcgtggccggcttgcacctgtcgctggagcctccatcggcgacgtcggtggcgctgtgcatcagccaggccgcattgcccaaggatgcctggctggccgagcgcgggatcgacggggcctggcctgtgcatggcatccccgaacgtctgcatctggacaacgccaaggagttccgctccgaggcgctgcggcgcggttgcgagcagcatggcatcgccatcgaccatcggccggtgcgcacgccacattacggcggccacatcgagcgcctgatcggcacgatgatgggcaaggtccacctgctgccgggaacgaccttctccaacgtgcaggccaagggcgatctcgacccctccaagagcgccgtgatgaccctggaagaagtcgagcggtggctggggcacgccatcgccggcgtgtatcaccgcgaagtgcatcgggggctgggcgtgccgccgctggtggcttgggagaaaggcatctcgggcgacgatcaggttctcggccgtggcagtccgacgacggtgagcgatccacggcgcttcctgatcgacttcctgccaatcgcccggcgcctcgtgcggcgcgatggcgtgtcgctgcactccatcggctactggtcggacgtgctgtccacctggatcgggcatgccgagccgatgatcgtccgcttcgatccgcgcgacctgagccgcatctatctgctggggccggacggaacctactacgacctgacctaccgtgacttgcggcgcccgccgatcagcctgtgggaacaccgggctgcgctcaagcgactgcgcgagcaaggccatgcgcatgtcgatgaagccgcgatcttccgcgcggtgcaagccatgcgcgagatcgctgaccaggcagcgcacaccagtaaaaccgcacgccggcaaaaggagcgtcggcgcatggtccaacaaaagcaggcagtcgtcgcaccggcagcttccgctcctgtggaaaccaacgatcttcctgcgaacgggcaacagccgcatgagcagatgttcccgttcgaggaatggaattga

SEQ ID NO: 341387 - DNA, 618 bp, Pseudomonas aeruginosa
atgcggcgaatccccctgagcagacgctcccatatcactggcttccagccggtgcggcacaaggccgtcgaacatgagagcgcgcttgagcgggacttcgtgttgcttacccaattccgcgatccggccgccgaactggtttcacagcccgagacgatccacttcatggacgcgggcaagcaccggcggtacacgccggacttcctggtgctctggagcgatgggcgacgcgaactggtcgagatcaaataccgcaccgacctgcgtacccagtggtcgaacctgcgcccagcgttcgcggcggcacgcgactgggcgcatgcaaacggcgccaccttccgcatcgccacggagcgcggcattcgtggcatggagctggaaaacgcgctgcggttgattccgctgcgttcggccccgctggacgtggcggcgtgcgatgccgtgttgtccgcgttgaagtcgctgcgcgcgccgaccatcgggcagctcgtatcggcggcgcggcttgagcgcccgttggcgctcgccaccatctggcggatgctcgcgcaggggcgcttgctggtcgatgacctgtcggtggctctgcttgccagcagccccgtgcgggcgacatga

SEQ ID NO: 341388 - DNA, 198 bp, Pseudomonas aeruginosa
ttgctattgggtctgtggtttatgacggcggacctcgtctgctcatgggcgaccctgtatcgccgtctgctgctggaactgctgcgcctgctcaagccggtcctgctgtgggtgctgcgcgtgttactggtgcggctgatcctgatgctgctgatgatgtacctgggcacccaggcgttccgggcgctgctcctgtag

SEQ ID NO: 341389 - DNA, 384 bp, Pseudomonas aeruginosa
atgctggtgacgctgctgttcctggcgatgaacggccacctggtggtgttcgaggtgatcgccgagagcttcgtcaccctgccggtgggcgagggcctgagcggcaaccatttctggatcatcgccggcaagctcagctgggtgatgggcgcggcgctgctgctggcgctgccggcgatcaccgcgctgctggtggtgaacctcgccttcggcgccatgacccgcgcggcgccgcaactgaacatcttctccatcggctttccgttgaccctggtgctgggcctggtgatcctctggatcggcaccgccgacctgctcagccagtaccaggtgctggccggcgaggccctgcaattcctccgtgaactggtgcgggcgaaatag

SEQ ID NO: 341390 - DNA, 303 bp, Pseudomonas aeruginosa
atgatcatcaagttgtcaccgtacgcaccactgccaggcagcaacgagcacctgtcgctgagcaggactggtgatgtgctcaccgtgaacggtcagccgttcgacttcacaccgctaccggagggcggtgaactgccggctgaggcgattggatcggagtggttcgctggttccgtagtgcgacgcgccggccgcatccaactgatcctgcggttcccgcttgccgccgatgccagtgccgccgctcgcttccctgaaccgttgctgatcgataccgatggacctgtggagttaccgcgatga

SEQ ID NO: 341391 - DNA, 225 bp, Pseudomonas aeruginosa
atggacgaggtactgaggcaaaggttgcgggctgaactactggaagtggggtttctcaaccagtgctgccttgatctcatggaaagcatggaggctgagttcagtctcactaaggaccagcgcgagtgcatcgagcagctcagccgatttctacgggagggcatcggcaagctgaccgctctgtctgaacgggtagccgatggcgatatcgtcgtcctgtgctga

SEQ ID NO: 341392 - DNA, 420 bp, Pseudomonas aeruginosa
atgaccgaccaacgcttcaagatcgtcttctccggcgagctgatgcccgacgcatcgctcgaaaccgtgaaggacaatctcgcccgcctgttcaagagcgaaccgggcaagatcgacgccctcttcggcggtcgcccggtggtgctgaaacgcgaacttccagaggccgaggcggagcgttacctgaccgccctgcgccaggccggcgccaatgcctacaaggaagtcgacctggcggccagcctgagcctggtggaaacgcccgatcacaacccccaggtcgcggaagaaaccccagcgcaacacctgcctcccatgacctgcccgaaatgcggccatgaacagcccagcggagcggaatgttcggcttgcggcatcatcatcgagaagtacctggcgcgccaggctgagagagagtga

SEQ ID NO: 341393 - DNA, 1230 bp, Pseudomonas aeruginosa
gtggcaagactagcaccggaagatgtatttaccccacgatcaaatgaaataaaccaggaaatgtatattagccgggagtcacttgaaggcaatcttaaaagagctctaagaggaagccttcatataataatgcatggacaaagcgggacaggtaagacctggctatataaaaaagtactaaaagagcaaggcattccttatgttattgcaaatttagcaaatgcttcgcgtttcgggaagatatcgggcgagctaaaaaacattatagagagagaaggagtggcaaagaaggtcggctatgatgaaacaaaaaaagctgacataaatatcttggctgcttcaggaggaattgaacacaaagggacatatgagatagggcagcttgagcctttcgaagcatgtttaaaattcttaaacaaaaaagcaggcggaaaaaaatctattcttgttctagataacttggaggcggttttcaaggaggattttcttaaggagctggcggacttaattattctgtgtgacgatgatagatatgcagactacaatgttaagctgcttatagttggtgttcctggcgatgttcgagaatacttcttcaaaactccacaccttgctacagtttctaacagattaattgagattcctgaagtcacaagaatgaagccaaccgagtgcgatgcgctagtaaggagagggtttatcgataaacttaagtataatgttttcgatatgactaagattgaggttaatacggcctggattactgacaggataccacagtctgtacatgaatactgcctagagcttgcttatatcggtgagtccactcgaacgataaaagaagatgacatggaagctgcaacatttagttggcttatgcagtctcaaacttcaaattattcgttggttgagagccatatgaatgaacgtgatacaaaggcaggaagacggaaccaaaccttgtttgcactggctagatgcccggctgagcagtttaaatcatcagaggtcgaggatattataaggaagaattttccattctccaccgataaaacaaagcttaatgttccgcaaatgctatctcaactatctaagggtgacaagcctttgattaagcgatctcctaagggagatgcttatacatttaccgatccaaggataaaattggttttacgggcgatgctaaggaaacgagatgatgagaaagtagagaaaatccaaatcaggtaa

SEQ ID NO: 341394 - DNA, 240 bp, Pseudomonas aeruginosa
atgctcgggttcacgacgaaagccgaagctcgaaagatcggcgtctcgcaccatgggagctattacggcattccgatgtggctgggggatgtcgatagcgattgcccgctggcgttcgccaagtgggcgccgcttgaacttgtcgtctccctgttctcggtcatcgagggcatcgtcaactcgatgctcgatcaagagccgacgttcatgttcaaggttggtcggaggatcgatccgtga

SEQ ID NO: 341395 - DNA, 786 bp, Pseudomonas aeruginosa
atggcgtggtactcaaccggaaccgtggcggtgaccgcaaatagcccgaccgttaccggtgccggcacacagttctcgtccaatgcccgagtcggcgatgcatttcgcggacccgatggacgttggtacgaggtcacaaacgtggccagttcgacggtcatctcgatcaagcccaactaccagggcagcacggccagcggccaggcctatgcggtggcgccgatcctgggctacgacaaggacctgtcggatcgattcaacttgatcgccaaccagtggggggcaaccctggcggggataaagccctgggcgctctctgcaaatgcggcagcagcgcggggggatctcggcctcggcagtgcggctgtacgggaggcgctcggtagttcgggcgcgctgtactctcgagacagcattctgggcgccgtttcgcagtcgagcggcgtaccgaccggtgcggtgattgatcgcgggagtaacgcgaacggggagtatgtgcggttcgcggatgggactcaggtctgctgggctgagcgcgcgttgacagtgaccaccgccgcggcgggcagcattcacgtagacggggcacccgccaatggtttatgggcatatccggcgacattcagttcgccgccgaacacgcattgcaatgcccgacacggggggatgtgggcgaatgcgcttgttgctaccccaaactcagttacatcgattgtgatgtcgacagttgcgcgctcctcagttgccgtcaacgttgcgttcacagctattgggaggtggttctga

SEQ ID NO: 341396 - DNA, 1023 bp, Pseudomonas aeruginosa
ttgacaattaacatcgcaatcgcaacctatgactcaatcgtcttagggtgcgacagcctatcgagcatcgtcgaacaggcaattctgccgttccgaaatgacgcaacctttgccagagacgcgaatggtcaagaattgattgatgcttcaggagagaaggttgtgtccactgcgtacctgcagccgttcgtcaccaacgttttctctggagcacaaaagatgttcctcctctacgaagatgaggatacctctgtcgcggccgtaaccgctggcatggcgacgttgaatggtgtgacgattgcaggtttcgccaagaagttcagtcgcctctgtgcatcggagagccgtcgttaccggacggtagagcaggtcgcaaaggactttatggcggctgttcgtcaggagtgggaaaagcaggtcaactaccagaattgcccagaagaacagaagccctatatgccagacgttcaatttattgtcggtggctatggagcagacgatgagacgagtaaggtttacaagatattcgtcaaagatttgacgatcgaggagcagtttctttggcagacacgctcaggcgcgtgtttcggcgggcagtctgattttgtagagaggcttcttgttggggtggatggcagaattgtcgaatctgtcagtggagtgataaatcgcgagatcgaatcgcgcacccgacaagcggctcaatcggtggttgatcagctgctggccgcaggtgtcaatatccctgaaggcttcacgttcgaggcgcctcaaagagaaatgaatctcccctggtgggattgcgttgcagatattgactttggaaatctcccaacccagtatgcagttgagctagctgaattgctggtgaacttgcagtcagggatgcagcggttcgccaacggtgtagctaccgttggaggaagaacccacattggtgtgctcaagagaggcgagaaattcgcaatgctcaatgagccaaaactggttcacaaccatacgggctattcacatgacctctaa

SEQ ID NO: 341397 - DNA, 360 bp, Pseudomonas aeruginosa
atggacggtattcttagtgctatcaagcagcttattcagacggcaaccgacttctttcagcgtgcacttaaggcaattgatgaattctttaagtgggtgcaagatgcgttcgattatttttgggaactgctccctgttttaccggagtatgtgttccataggatgacttctgcggttgtgaagtttttcgagtggttgccggtgcctgacttcttcgttacagccggtaatgcgttccagggcattccgccatcggtcgtttatttcgccaatgcattccagattggtccaggcgtgaccatggtcctgggtgcgtatctgttgcgcttcattctccggcgtatcccgattatcggttga

SEQ ID NO: 341398 - DNA, 1314 bp, Pseudomonas aeruginosa
atgcgtgcattgttatgggtgttgtgtttcgcgtcggtcagtgcttttgccgaggattattactggcaactcaatggtccgacttcgcctgagaagttcggcagtcctagtgcggcgtgcgaggttggattgggcatttataaggctcaatatccttcggttgaaatggaaatcaactctcgcgaaatgagaagctcgacaaactatgtttgtacggtgtttagatattttaatggcaatcgtattgagccgaacttcactatttcggtcatgcgcaagggggcgggctgtcctgcgggtgctacatataatgcgcagacagggatttgtgaaaagcctccggagaataactgtattgctggattgagtgatttgttcagctctccgccgtctccggtatatcagttgaatggccgcaatgtggttgattccaggccgccaacgggttgcaaggctaactgcacgtatttggcgacttcatctaagtccagtggttgtttctttgttcctggctcgacgaatgagggtttctgcaattactggctgacgactgatggcagtacatgtccgactgatacgaataatccgggaatgtccggaccctcgttgaacgatacgccgccgactgatccggatgaacctccgtccgacccgaataatccggggtgtccggctggctatagctggtctggcacgacgtgcgtcaagacgcccactgatccgaccgatcccactgatccgaccgatccgactgaccccacggacccgaccgaccccactgacccgggcggtggtggtgatggcggtaccggtggcggcggtacgggcggtggtggcgacggtggaactgatggtggtggcgatggtggtacgggtggcggcggcgacggtggcggcgatggcggtacgcctggaactggtggcggtggtgatggtggtggtacgggtggcggtggcgacggttcaggggagggtggtggtactggtggcggttcgggtcttacgggtggctgcaaggacgatagctgcgcgttcgtgaagaacaaccccttcggtacggacaaggtgcctggctttgatgagtcgctacagacggcctggacggggattcagaagtcaccgataggccaggcgctgggtcgcatcaactttcccagcgggggcgcctgcccgacgcagagcatctcgctgttcggctccaacattacgttcagttcccattgtgatctgtgggcgcagatcgagccgatcttgcgggcggtgttcctagcgttctgggcgctgctttcggtccgtgtgttcttgtcagcgtga

SEQ ID NO: 341399 - DNA, 351 bp, Pseudomonas aeruginosa
atgctcgctctcatcggcctgtgccagggctattactccgaaacccgcaccatcaacggccagaacggccagacccaaatcaccgagcactctgtgctgctccaggtcgagcagccgaacaagttcgggttgatcgaacagaagatcatcgccgtccgtctctcgaagaagcatatggaaggcggcttgaacaacgcctggaaccagcagaaaggcaaggtcgtatccatgccggtcttcgtccaggcctgggcgagcagggcggggaacgctggctacgactactggctgtccggcgatggccttccgctcaatctccaggccgctcagccggtcaaagcggcttcctga

SEQ ID NO: 341400 - DNA, 258 bp, Pseudomonas aeruginosa
atggataaggcgacccatcagcaccttcgtttcgacctggagcaggacatttcccgcgtgctcgatgacgagcacctggtgcgccaggtcctggacctggtcatgcgccgagtcgtccaggaacaggcggccgaggccgttcgccggcagcgcatcaaccgagacttcaagacgttccggcgtggccggagcgtgacgccgcccgcatgggcattccgtgaaccgggcgcacgcccacaagttgaacccctgaggtaa

SEQ ID NO: 341401 - DNA, 204 bp, Pseudomonas aeruginosa
atgggtgcgctcatgaatatgaaaactcgcatcttcctgcgcacgctgcgtttcgttgcctacaactggtggctgccgttcctgctgggcaacgtttccgcgttggtcggctttgcattcaccgctgacctgatcaatgacgcgttcgtctcgtcgctcgaaacggtagtccagtcatgtgcaggggcgcgcagcgatggataa

SEQ ID NO: 341402 - DNA, 1416 bp, Pseudomonas aeruginosa
atgacacttgacgggattttggggatgctcgaccgaatccacatgttcatccgcttccgcccggagcacgtccagatgatcggcaagcccgaggctccgacgctggtcgttgacctggagtcgttgggggtgcgcatgcggtcttcgggcggcgtgctcaagcgggaggacggggagggctatgacgtggaggggctttcccatgcctgggaatcgctgccgtcgagctacacgcccatggccttcaaggtgttccatcagtccctgggcaagcgccttgatcctggtgtggagctgaaagcgtctccggccaagctgctccaggggcacaacgtcttcgggccgacctcaatccgcatgggggctgaggtcatgttgaagtggctggctggcacctatccggacctgtattcgaagctcgatgtgctgtcgattgaggtctacgccctggactgcacgttctcggcacgcatgccgaatgaacagaccgccctccaggttatccagttcatgcgcggggtcagcaatggccagacccgcaaccggggtgatgactacgagaccacggcctactggggttcgaaagaggggcgtctgcgcaagatcaaggcgtatctgaaagggccggagttccggcgtcagttggacgaaattctcaaggctgctcgcggtgccacggtcgatccggaaccgcgccaggacctggataacgctcatgtccgcgcctggaagctgtacaagcgcgagcgccacatgcccatgtcgagcctttctgctgcgcggacgctgcgggtcatgcaggaccctcggctccaggagttcgcgcggcttcttcttcgcctcgaggcgaccgtcatgcatcgctggttggagcggcggaatctgccgacgaacctgtgggagctatgtgactaccaggaggcgcttcgcgaccaggagcgctgtttcattcaggagtgttggaaagcggtaactgctgagctgttcgcggcctttgagggtatgaccatgaagcgaatcgacgatgacaaagtgctggccgcactgatcgagaagtacacgaaagtagggaagggcaagtggacgaaggcccgcgccgacaaggcaacgggaaccatcattccggcagtgtttgtgccggggaaatccagtgatgcctatgctcgcaatctgttccgtacctaccgcagcctcaaggactacgggtgggaagagaccatggcgtcaatgtctagggcctcgttctatcgccacgttgctgacctggaagcggtaggcatttccaaggcgatgctccagaacctgagtgagtacgacaacacccgcaacgttgtgccgatcctgcggttgctagaggtggatttctcggcgcagtaccccgactggtacgtcgagccgaccgtggaggccgcctga

SEQ ID NO: 341403 - DNA, 363 bp, Pseudomonas aeruginosa
gtgcacgaagaaaccaccctcgggaaagagaccatgaccatcggtgaaaacatacgcagagcgcgagaagccaagggcttgacccaacgcgaggtatgggaagcaaccgggatatcagagtccagctacaagagttacgagaagggagagagaccgccgccgggggacaagatcgtaaccctagcaagactgctaggcgtatcgaccgacgatctacttctggacgaggcagagcgggacgtatcggacgatctaagagccatcttcgtccggttcaaccacctgccagccgaagagaaagtacacgccaagattgcgctcagaggcatcctgatgagctacgagcaagaggcacttcgctga

SEQ ID NO: 341404 - DNA, 459 bp, Pseudomonas aeruginosa
atgatcgacccaaccgacaagcaaacccaaccccttcccctggagcagccaaagcgcgggcgcggtcggccagccaccggcaaagccatgtcagacgcagagcgggcgcggcgctaccgggcgaacaagaaaaagcgtgacgatcaaccgtcacgaaaaggtgccccatcgatccccaccgatggcgtaaaggaaatcctcgacggctggcagcgcacccaggaagaactcgacaaggcgctgcaacgaatcgccgagctggaagccgaattagcgttacgcatcacgaaaaatgaagaggccgaggcgaagacctgggcaattcaagagcgcaagggcaaggcgcgctggcagaccatcagcaagggcctgacccggaaagccggagaacgccagttcgacaagctgctgtcgggcctgaacgacccgcgttacagctaccgcatggttgaagaataa

SEQ ID NO: 341405 - DNA, 1266 bp, Pseudomonas aeruginosa
atggcgattgatgcatatgtgggcaagcctgggcacggtaaaagttacggcgttgtcgagcatgtaattattccgtcactgaagcaggaccggcatgtggtgacgaatatcccgcttgaagtcgatatgctgctgatggatttcggcgggactattgagcaactgcccgaagactggtttgagcgtgaagacttggccgactttgcgccgcctggttcggtcctggtcctcgacgaactctggcggcgctggcccaaggggcagaagaccaatgacgcaccgatggccgataagaagttgctggccgagcaccggcaccgcgtagacaagaaaaaccggtcgatgcgggttgtcatggtgactcaggacctcgaccagttggcgagctgggccacgttgcttgtcgaaaccacgtaccggatggtcaagaagtcgaagaccatgtttcgagtcgatatctacaacggcgtggccaagggcgacagcccgccgaagtcgaagctgctgcgcagcaccgcggggcgtttcaagccggacgtgtaccgctattacaagtcagctacgcagtcggaaacgggcagtgtcggggatgagtccaaggctgattctcgggcctcgttcctgcgttcttggggcttctggtcgctgattgggttgatcgttgtgtgcttggccgtgggtgttcctggaatcatcaagttcttcacgccgcctcagccgaaacatgctgtagcgccggcaccgatcgccaaggttgccgagcaggttcagccggctgttgcgcctggtgcgcgtgccgctcaggcggtgtatgggaggccttcggacggtccggttttgtcgtcggtgtggcggatcgccgggtatgttcatgctggcctgggcaaggctgacgcgtggcgatcgcgtgatggctacaatgcgcagcctgaccagccgatcagcaagacgtcgcgcgtcgtgatcgtttctgacaacggccgcacgcggttctggccgtttgagaagtgccggttcttcgagcgcacgcctgacttgtactgtgatatcgacggtgagcgtgtgacgttttggacgggccgaggggccgtatctacggtgatggatgcgacaagcaccgcgagcggcggcagccagcgtagcgcagcgtccgccgcgaccggtgcgcaggtgcagaccccgcattcgtttcagccgcatcagccgcagcagggaacccgcgtgaccgtagtgtctgataacagccgcttacctcgcacgctctga

SEQ ID NO: 341406 - DNA, 360 bp, Pseudomonas aeruginosa; identical to SEQ ID NO: 341397

SEQ ID NO: 341407 - DNA, 1314 bp, Pseudomonas aeruginosa; identical to SEQ ID NO: 341398

SEQ ID NO: 341408 - DNA, 231 bp, Pseudomonas aeruginosa
atgaaaaacctgaagaaactgttcgttcgtggtggttccgctgttgccgtaggtgctgccctggtcgtctcgcaatccgcctcggctgccggctgggattacagcggcctgacctccggtatcgatttctcgaccattgccaccggcgtgctggccgtcgctgcgctgctggccgccgtgtatgccggcatcaagggcgctcgtgtggtcctgggcttcctgcggagctga

SEQ ID NO: 341409 - DNA, 228 bp, Pseudomonas aeruginosa
atgatttccgccctgtcctgcgatggctccatctcgattgcgccggatggggcacccctgtgttcgggcatgtgggttttgacccaggtgccggagcagttcgacccgtcgatgttggaccccgaggcactcgcccaggcgttctcggtcgggttcggtcttgtcgcgacggtccttgtcggcgctctgggcgtcaaggccgtgctcgactttctcaaaaaaatgtaa

SEQ ID NO: 341410 - DNA, 351 bp, Pseudomonas aeruginosa; identical to SEQ ID NO: 341399

SEQ ID NO: 341411 - DNA, 258 bp, Pseudomonas aeruginosa; identical to SEQ ID NO: 341400

SEQ ID NO: 341412 - DNA, 204 bp, Pseudomonas aeruginosa; identical to SEQ ID NO: 341401

SEQ ID NO: 341413 - DNA, 1416 bp, Pseudomonas aeruginosa; identical to SEQ ID NO: 341402

SEQ ID NO: 341414 - DNA, 363 bp, Pseudomonas aeruginosa; identical to SEQ ID NO: 341403

SEQ ID NO: 341415 - DNA, 459 bp, Pseudomonas aeruginosa; identical to SEQ ID NO: 341404

SEQ ID NO: 341416 - DNA, 357 bp, Pseudomonas aeruginosa
ttgccggatgactggctggattgggcgctgactgagcgcccggagttcagcgaggcggacatgcgtaaggttggggagggcttcagggactactggtgctcggctgccggcaagggggccacgaaggtcgattggctggcgacctggcgcaactgggtgcgcaaggagagcgcaccatctgcaactccgcggaagccggcggtgggcagcaagcgctacccgttcatcccgcccaggggctaccagctcgaggatcacgagttctggcacccgcagatgacggacacggtgctgtccactcggacccacgacttcagcacccttgagcgtttgccggacggggagggcgcatgctga

SEQ ID NO: 341417 - DNA, 975 bp, Pseudomonas aeruginosa
atgatgatcgaaccttccctggcgtcgaagctcgaggccccctgcctgctcagcgtggtagtgccggtgttcaacgaggaggcggtgctgccggccttccaccagcgcctgggcgccgtgctcggcgaccttggcgacgattgcgaggtgctctatgtcgacgacggcagcaccgaccgcagcgcggcgatccttgcccagctacaggccgccgaccgccgggtgggcgtggcccgcttcacccgcaacttcggcaaggaacaggcgatgagcgccgggctcaagctgtcgcgcggcgccgcggtgatcgtcatcgatgccgacctgcaggatcccccggaactgatcccgcagatgctcgacgcctggatcggcggcgccgaaatggtcaacatgcgccgccgcagccgggccggcgaaagctggctgaagcgcgcctcggcgagcgccttctaccggctgatcaaccgcctcagcgaggtgccgatcccgcgcgacgtcggcgacttccgcctgctcgaccggcgggtggtcgatgccctttgcgagctgccggaaggcaatcgcttcatgaaggggcttttcgcctgggtcggtttccgccaggtcgatatcgcctatagccgcgccgcccgcgtcgccggccacagcaagtggcgctactggcggctgtggaacttcgccctggaaggcatcaccgggttttccaccgcgccgctgaaggtcgccggctacctcggcctgctcagcctgttggcggccctggcgaccctgctcgccgggatcttcggccagcaggagatccacgaacactggccggtgatcgccgcgctgttcctgatcggcggcctgcaactgctggccatcggcgtgtgcagcgaatacctcgggcggatgaccatggaagcgcggcgccgcccgctctacctgatcgaccgctacctgccggcgcaggtcggcggggccaatccgtga

SEQ ID NO: 341418 - DNA, 738 bp, Pseudomonas aeruginosa
atgtccatcgcgtgcgccgttgctggtggggacctggtagggatcgcccctgagcgtgctgggcgcgtggtttatttcgcaggggaagacccggaagtcgcgttggtacggcgaattcatgcgataggcctgcacctgaatcagcaggcacgcgaagctatcgcgcagaacctcacccttgagccgatcatgggcaagcgcctgaacgtgatggatgatcggcacctttcccgtgtcattgaattttgcgcgggtgctcggttgatcgtactggataccctgagccgaattcacgacaaggacgagaacagcaacggtgacatggcgaggcttgtcgccacgcttgagcacgtcgcggccagcaccggcgcatcggttctgtacttacaccatgtgagcaagggcagcgcccgcgaagggcaaaccgatcagcagcaggctgcgcggggcgcatccgctctaatcgacaatgcccgctggtgtggcttcgtcgccaagatgagtgaagacgaggcgaagcgtttgagcgaccgcgactatgaccgacggcccatcggcaacgaccgacgcggcttctttatccggtttggtgtcagcaagcagaactatgacgcgaccgctctcgaccgatggtaccaacgtcacgatggcggcgtcctggtgccggtggaactggtggaggtgaaaaaggagaacgtcctgcatgtcgtaaacgggagggacgatgagcggtggtaa

SEQ ID NO: 341419 - DNA, 747 bp, Pseudomonas aeruginosa
atgagcggtggtaatgccgtgacccctaccagtacgagcgcgcaggcacgggtgatgctctatcaacccagcctacgcccgcgcgtgcgcgaaggcgactggatggatacctctttcggccgctgccgcgtgaccggcagactaggtcagcggcacgccgatatcgtggaagcgattttgtattgcgccgaacgtcggcgcgatatctgtgatggtggtgttgagcttctcgtagacccggctcgggtgcgaaaaacgctttccgatagccggtacagctttactcagatcgaaaagctgttggccgagctaagagctgcgacgatcacaatcgagatgccccagttcgaccgctcaatcatcggcggattgattgaccacgttatcccttctcccatgacacgccctgatcccctgacgggtggggagcggaatttgtggagggttcggcttggaattgcacttgtgacgttgctcgaacatgacttgcgtttgtactacgacccagcccccattgcccgtctaattcatggcataagccaggctgttgcacgacatattctcagtcataagactgagccagtaggtggttggtatctcgacaccgtaatagtggcagtcagcggaacagggggggatatgcgaaaagcaagacacagactgaaagaggacgcgaccggattacgggctattgggttgcttctcgacggcagccggatcaggaaaaaaagtgccggtcgggcctaa

SEQ ID NO: 341420 - DNA, 783 bp, Pseudomonas aeruginosa
atgaagcagcacgttttagcggctaaaatcgctctctccatagctctcaccgttggcgtcgccgcgatgcctgcgcacgcaggtatcccggtccttgacggcacgaacctgtcgcagaccaccgtcaccgcgattcagcaggttgcgcaggttcagaagcaaatcgagcaataccggacgcagttgcagcagtacgaaaacatgctgcaaaacaccgtcgcgccggcggcctacatctgggaccaggcgcagaccaccatcaatgggctgatgcagtccattgacaccctgaacaacctcaccaatcaggccggtagcctggatgcctacctgggcaagttccaggacgtttcctactacaagtcgtcgccttgcttcacctcgtccggctgctctgacaccgaacgcgcagcgttcgagaaaacccgcgacttggcatcgcagtcgcaaaaagcggcgaacgatgcgctgttcaagggcatcaaggatcaacaggacaacctaaaggcggacgcgcgccagctcgaacggctgcaatcgaaagcgcagggcgcgcaagggcagatggaagccatcggctacgccaaccagctcgccagccagcaggctaatcagctcctgcaaatccgtggcctgctgctcgcgcagcagaacgccatcggcgcacggatgcaggcacaagccgaccgcgaagcgcagcaggaggccgcgcacaaggcatccacggaatccaggatcgggcagaccgccaacccgaaaaactggctgcaagtgaagccgtaa

SEQ ID NO: 341421 - DNA, 234 bp, Pseudomonas aeruginosa
atgaggaaatcaacggtcgttttgactgccctcctcgtcgcattggttgccggctgcgataacaaggagccggcccaaatgcccgaggtgaacgcggaaaactgcacgctcgaccgcatccagaaaatcgaggatcgggcgacacgcgagcagttcgccggcgcgtgctcccgtaggtcgggagcgattgcgccgaccgaaaatcctaagaactggctggaggtgaaaccatga

SEQ ID NO: 341422 - DNA, 852 bp, Pseudomonas aeruginosa
atgagcacaaagaaggaccggcgcgtcggttcgatgctggccgggatcgcaagcgaggcgggcggtctgaccgatgaagaacacgcgctgtttgagcgtgcgcgcgtcaagtccccggcccgtgcagcgagctttgacgacgcctctggcctcaaggtcgcccgcgtctatttgcgcgtcagcaccgacgggcaggacctggaacgccaggaaagcatcatcgagggcgcgcgggcggccggttactacgtcgccggcgtctaccgcgagaaggcatccggcgcacggtccgaccggcccgagctgctgcgcatggtcgcggacctacagcccggcgaggtggtcattgcggagaagatcgaccgcatcagccgcttgccgcttgccaaggccgaaagcctggttgccgcgatccgggccaagggcgcgcgcctggccgtccctggcgttatagacctgtcggagctggccgccgaagcccagggcgtcgctaagatcgtgctggaatcggtccaggacatgcttttgaagctggccctacagatggcccgcgacgactacgaggaccgccgcgagcggcagcgccagggcatcgagctggcgaaggatgcgggcaaataccggggccggcgggccgatccgaagcgccgcgcccaggtcatcgccttgcgccgatccggtctcagcatcaccaggacggccgagttggccggctacagcccggcccaggtcaaacggatatgggccgaggtcagccaggacgaggcggaacgcatgggggccttccaggaggacgccttgagcgaagccgatgccttggctgcggccagccaaagaggcacacgaccatga

SEQ ID NO: 341423 - DNA, 819 bp, Pseudomonas aeruginosa
atgaccaaaaagacaaccgcattcgacgtgttcgaaaaatgcgtccaagcagtccaggccggggagctgatcgaatccgtctctgcgaaggacaaggaattccacttccagaactggtttcagaagcgccttcagagcctgtccatgcacttcgagggctcgggccgcaacacctatcccgatttctgcttggtcgagcacaccgaaggctacgagatcaaggggctggcgtggccgggacgcgagcgggattacgactcgaatagccaggtgccgaccggctatcacaacggccgtcaaatcttctacgtgttcgggcgctatccggctgacctgtccggctacgcagaccagggcaacggtcgcaagcagtaccccgtcgttgacctcgttgtgtgccacggcgacttcctgaacgccgaccacaactacgtccacaagaacaagagcgtgaagggctttggcacctacggcgacatcatgatccgcgaccggaagatgtatgtcgcgccgacccccttcgcgctaaccgagggcaccacgggcctgatgaccctgatcctgccagaagacttcggtgccgatgatcgctaccaggtggtcggcaaccttacccgcgtcgaggctgagacgctggtggttggctacaacttcgacttgcgcacgaacgagctgagcgcagagcgcgtgcccaaccccaaagcaggcacccagcaccgattcgtcgcatatcggctcaatgggcaagccagcaagcccgtctcaatgaccggcaccccggtgcagcccgacgaaaataacctggcggacgaagaatga

SEQ ID NO: 341424 - DNA, 2172 bp, Pseudomonas aeruginosa
atgaacgcagttaccgacaaggtcgggcccgctcctgcgaccgccgcgaccgcactggagtgcgatttccctctggtcgagatcagccagatcgccgagcaggagagctggcgtaaggagatcaatcggccgatctaccacatccacaagtggtgggccacccggctgggatcggtgttccgtggcatcacgcttggggctctgagccagcctggcacggacacctgggcgcatttctataagacgcacgatctggccggtaaggtggtgctcgaccccttcatgggcagcggcacgacgcttggcgaggccgtcaagctgggggccaaggccatcggctgcgacatcaacccggtcagcacatttcttgtgcgccaggcgttcacgcccgcgcccgaggctcagcttcgtgccgccttcaagcggctggagcgtgacgtggcaccggagattcggcgttactaccagacccgtgatccccagaccggcgaattgatcccggtgctgtactacttctgggtcaagacggtcacgacgccggaaggcgaggtgatcccgctgctgtcccgctacgtgttcgcccaggacgcctacccgaagaagaagccgcgagcgcagatcgtatgccctggttgctggggcgtgcttgagggccgctacgacgcgaccgacacgcactgccagcactgtggtcaccactttaacccgcaggaaggtccggccgctggtcaatacgtcacaaccaatggcggccagcgctaccgaatcaaggaactgctgcccaaggatggcaccccgcctgcacatcgcatgtacgcgatgatggcgttgcgcgctgatggcactaaggtctatctgccagtgcgtgctgaggacttggcgctttacgaggaagcccagggccgccttgcgagtgagacgttgccgctaccggaaatctctgtccgcccgggccataacactgatcaagcgcgaggctacaactacacccagtggcgcgacttcttcaatgcgcgccaactgctgtgtcttgggttgctgctgcgcgaaatcctgagcatcgacgaccaggccgtgcaggaacagatgctgtgcctgttctccagcaccttggagttcaacaaccagttttgcagcttcaagggagagggcaccggggctgtccggcacatgttctcgaatcacatcctgaagcctgagcgcaccccgctggaaaactcagtgtggggcaccgacaagagcagcggtacgttcagcacactgtttgagtcgcggctgctgcgtgccaagcgctaccttgatgagcccttcgagatcgctttcgagcacgaccaggacggcaatcgtgcaggctcgcgcaagacggtggcaagcaacccgatccgcgcccgccgcgtcgagacgtggcccgaattggaggcggccgatcatggcctgttgatcctcaacggcgacagctccaagctgccggtgccagcaggatcggtggacgcggttgtgaccgatcctccttacttcgatttcgtccactactcggagttgagcgacttcttcttcgcctggctgtcgcccgtgctgcgccaacgctattcgtggatggcccgcgaggactcttccgaccagggcgaggtgcagcacaaagacccgcgtgtgttcgcccgccagctcgccgctgtattcactgaagcctgccgcgtgctcaaggatgacggcgtactggcattcagcttccatcactcgcgggccgagggttgggctgccatctacgaggcgatcagcaaggcgggcttagccgttgttgcggctcaccccgttcacgcggagctgcgagccgcgagccccaagacggcggcgaaagacccgatcagtcttgatgcgatcctcgtgtgtcgtaagaaggcgtttgccctgcaccagtcgtccgccgtccaggacgtgcgcctggcagtcgatgccctgtcgtcacggctgcaagctgctggcctacgcatctcggcgggtgatcgctttgtgatcggtgcggcccggactttgatcgcccgagctgccgacgacttgggtttcgacgagattaagctcgatctggaagcgatccgcctggctgtcgggccgagagctggcgatgccgacgacgagccccaaacggccggcgcagagctggccactgtgtga

SEQ ID NO: 341425 - DNA, 813 bp, Pseudomonas aeruginosa
atgtcggaccttagcgggagcgagcgccggaagctggaaaagctgcttgggatgggcggcgggtatgtgctcaacttctctgaccgaaccttcggcgacttcttcgacgagtaccgggtggagattgatgccgagcgctacagagcgcgcggcacgtcgaaggccaatcggatgcgtaccttctgggagttggatgcgaaccatgtggttggccgcgtcatcggtgggctgatcgactacgcgggcgacgaacagtgcttcggtgacagcaatccggtgctgattgacgactgccggaagatcgcccagcgcctactcagtgaccaaccagtggccgagctggatgcgctgacggccatcgcagatgagagggactttgaggtagttgcggagcatgttcgggaggccatcgagaagaaccagcccgagggtggcctggatcgacttcacaccttcgtcaacaagttcatccgcgtgacctgcgagccgcatggcatcgcaatcactcgtgacaagccgttgcacagcgtcttcggcgaatatgtgaaggcgttgcgcgatggcagctatcttgagtcagcgatgaccgagcgtatattgaagtccagcatttcggtgctcgaagccttcaatgatgtacggaacaacaagagcctggcccacgacaacccgatcctcaattacgaggagagcctactgatcttcaaccacgttgcagcctcgattcgattcatcaagtcgctcgaagcgaagattcgggctcaaatggcgcagactaagcaaggcggttgggacgacagcattccgttctaa

SEQ ID NO: 341426 - DNA, 699 bp, Pseudomonas aeruginosa
atgacgcaatcagcttggactcgtgacggtcggccggtggatgcggccgccatacccagcgccgagtgggaagcgttgaagcaggtcgcgcagctcggcgacttcatgatgccttgctgcaaggcgccggcggtgctcaagaccagcatcaacggcctgccgttcttcgctcatctgtcggacgagtgcggcactgcgcccgagacgagatggcataaggccggcaaggcggccgtgctggccgccttgaccagcatgggcatccagggcggtgatgaggtgccgggacgatcaccgagcggcgacaagtgggaggccgatgttctcttctcagttcctggtcgcaccatcgtgatcgagctgcaacgctcctatcagcatctgcgggacttcacgcgccgacaggagcggtacatcgcttcggccgtcgagtgctattggctggtccgcacggagaccttcatgaccttgggcaaggccacgtcgcgcctgctattgaaacgcgacttcagcaacgtgttcccaccttgcggtatcggtaccggcatgctgcccgagttaccggtggcgatgctggacactgagggcgagcagctggttcaattcggcggattcaagacggcaacggtgccggtatggctggcgggcatcctcgacggcgcttaccagtatcgcggtggctcctggaacctcggttga

SEQ ID NO: 341427 - DNA, 987 bp, Pseudomonas aeruginosa
atgaagtttaagcctagaaatttacgtgctatagctgaaatgataattggggatgccgactattttccctataggtcgagtagctatataacaaaattctttgaagaatgcgatctagaatataggcatgacggcagtacgaggtggcaatggacttctgaaaggctcagtgaacttttaaatgagccgcaaccaactgcttatagcctgccagaaaggtttatgcatgttctgagagtgttaatgcacaagtcagatgctgaaccaggagatgaaggccggagcatggctctaaacttgttaaatcagccgttaaagcgagaggggtatgaagcgtactatgatgaagatgacttattacatgttagacatgtggggacaaaaattatctcgactgctgggaatccgcatcgaccatttacccctagtgaaatagagcgtcgagaaaagctctctgaatatcttaagaaatgctcagaggatgaacttatagaggaggtactacttccgctatttaggcagttagggtaccacagaattacagcggccggtcacaaagataagtccctggagtatgggaaagatttatggatgcgctacgttctacctacgcaacacgttatttattttggaattcaagccaagattggaaaattagatgcggcaggtatgacaaaagggagtaatgcaaatgtatccgagatataccagcaagcattaatgatgctcggacatgaaatatttgactcagaaactagcaggagggtgctggttgaccatgccttcatagtttcagcaggtgagataacaaagcaagctaggaattggcttggtgaaagattggatgctacaaagcgaagccagataatgtttatggatcgtgatgatatattgaatctatatacagctaatggagttcctttgcctgtcggggctgatcccaaaaaaaactcattaagctttttagatgaggacattcccttttag

SEQ ID NO: 341428 - DNA, 624 bp, Pseudomonas aeruginosa
atgtctacgcggtcaatggataagatgcgtgatgactatatagaatgtatgggtagtgagcttggttctgttttctacgagttatctagaaaattggttcagcttcatgttgtttggcaacaatatagacaattgttcggggatagcgaagctactatagctttgcttaatagagcagctggcctttttttcagaatagtgcaggacgagctatgggatagtgtgctgcttggcatatcaaggatgaccgacccgccagcaatgagaaagaataaaaatctaacaattcaatctattcctttattgattaaagatgaatctgttcgcagtcaagtagaagctctctgcaataaagctattgcaatagctgagttcgccagagaacatcgcaacaaaagaattgcccaccaagatcatgagcacgtacttagcagtgaaacatccgctttaagtggtataagcaggaagcaagtcgaagaaatgttatcggctttgcgagatgttcttaactttctagaaaagcattaccgggacagtaccgtactgtacgaacagtttatagatgaaagtggagcaagagttctggtacaaaagttagaaagactggagcgtttgcagcgatag

SEQ ID NO: 341429 - DNA, 822 bp, Pseudomonas aeruginosa
atgattagcttcctccgaagccaagaccacgtgacgcttctcgacggtcatgtcgctcagcctgatagagtcaagattgccgattatctgtttttcaacaggcaagcggttgtcgaactcaaaacgctgaaaattgatccaaaaaataagattttggacggtgccaaagcgctaatggagtctgacgattttccgctgatctttggcgagtatgacctcgaaaccgcgataaagaacacgcctggtggacaagagcatctggacaaaattttctctaacgcaactaggatggttgagggggtgcttagaaatgccaaacaacagattgcctcatcgaaaaggctattgagccttgatcccgacaccccagggatcgcgcttatattgaatgacaccgttgaaagtattcctgcctctcggctcgctgacaagttcagctcccggctcaccggtgacggcaaagagccaggccggttctcggagattgattttataattttgattcaaactacctaccggctacagcaaagtggtggtatatcgacgcgcctgcccacctttattataagcaatcccttcaatgctcatcgccatcataaaattgagcaagaaattcagttttttctgcaagcttgggcacattcgcaaggtcataactttgaaagtacgagcgaaacctctggcctccaatttgagcacaaccacgcccctcggcctggccctcagtctttacaggaattggtagaagcacagtaccgggcacgcaggtatatgagcgaatggagcgaagatagactgatagctcatggcaaggatgtgtag

SEQ ID NO: 341430 - DNA, 156 bp, Pseudomonas aeruginosa
atggaccggtttgagctactaatctattcagtgttcggcgtgctgtgcgccttgggggtaacagccgcgattggttacaggatcgccacttacctggacaagcagcacggcaacagcaaacacagcggaacacgcccgaactcgactgccgattaa

SEQ ID NO: 341431 - DNA, 189 bp, Pseudomonas aeruginosa
atgcaggctcagactgacaatagcagcctgcagaggagcttcatgaagctgatggaagacggttgggtaaacccggtcaacggacagccgatgatggatggctgcctcgatgtcatgggcaatgcttacggcatgggctcgatgagcgacagtctgtggttcgatcacggcagcacgttcgcagactga

SEQ ID NO: 341432 - DNA, 285 bp, Pseudomonas aeruginosa
atggatctgctcgccaccattgccaacctgatggcctcaatcgtccagccgacaaaaccgctgtacaccacagtggcatatcccacccaggggaaagcagtcgtgctgcatgacggtctcaacatccgcagtgagcgcacgtggtaccagtatcccgactcgctgaccggtgaagaagagatgtcaacctacccgctcaatcttcatatcggcgataacgcggctgggtcgagcccgccatgcaggctcagactgacaatagcagcctgcagaggagcttcatga

SEQ ID NO: 341433 - DNA, 1776 bp, Pseudomonas aeruginosa
atgagtgaagagtggattctccagaccaaggaaacccgcagggtattttctaacgcggcgtgggttcctttgagggcgtcatttgagagcaagaaaggggatgtaaaagaagtaggctatgtcagtgaatatttcggctgtggctccgttgcattcccgccagagcatcgccagctggttgaggaacgtcttggatggagcgacatcggcattgggcacacggtcgcgccttatgcatacgaagatggatattatgcgtccattgaccaatatcaatacaacgataaagagccaataggcgtcaatctagtttatgaatacccgcaacctgttgttggtggcagaaaatggatactgagccctgatttggtagtcgcgctgcacttggtcaaagagggggacagctgggtcagaccggaagagaatttcgttgtggtagctcgcgagacagtgagtgaagatggcgagcatcgtcagatagaaataaaaagagaatttttactcgactatctagcggccagaaatctgtcgctccgccttgcgtactaccgacagagggtagaaaacgtccccgtatttgaggacagcgcatattcaaatttgcagcctcacaatgaggaaagagataacggtaagttcaccctaatcgttcgcaagcttgatgacgtttttgggggaagctgggcgatgtttcgagcctggcgaacggacgtagatgaggatgaagacgcccctgtgatgggccctgagaatgactcgaacactgaccatgagagttcaaaggggcatcgtggaggctataagggtgtacgggtagagggggagttttggcgtgaggaatggatagaccaccaatcaaaaagcctacgcgttcgtggagatgaagatccgaacctcccgcaattcatcgtggaaaccgacggaacgcgaatgagatcagcagagcttgataacgaggatataggccgttggctatggtttcgggccagcgtcgtgaatgagcttctgaatagccgaggatttaagttagcatggtacacggctgaaactggagctattaattccacgtcaggatataaaactcatttcgggataaatagctcggatcttatcaccgtatatgcttatgacatcgcacgactcgccccatgggagcagcatgtttgggctgggcataatgtagctcctgaaggaaaggtttcaagtgagctgctggacgcgcagatgagggcgaaaccggcatccacatatgcggttgaagaaatgttttttggaagtatgaggcttttggaagacggcttcaggcataaatatggaatatctctgttcacccatgatattgaagactccgaagcagggcagcaaatatcaagatttgcaagcaaagacagagcgtccctactcaggttagccaaggacatcattcgcgtattctcggataggctcaacatacccgagctgcgcaagatttctacacaccaagagaaatccaagctcggatcaaacaagttactccaaagtattttggctgagaaaattggagacgacaaagccaggcgagtatttgctgagattgccggtgcttatgatatgcgagtgggagatgcacaccctactggctcaaaggtaacagatgcgatcaagctcgcgggcgtcgatgaggaaaactcgtcattgcggcaaggagagcaactcattcacaacgttgggcgatcgatttggcatactgggaaattcttgttcggcgagactgatgagtcggacgagttgcaatga

SEQ ID NO: 341434 - DNA, 936 bp, Pseudomonas aeruginosa
atgccttcctcacagcgtccgggggcttcgccctcggagatcgatatcgttcaactgttccagcaattgtgggcgtcgaaatggctgatagcgctgatcgcggccttggcgaccgccgctgcgctcgcctatgcgctgttggtcgttccgacctaccaggtggatgtcctgttgcggcctatacagaccaaggccctggaggctgtcaacatcgaaggtctttacgccatgactccgcgggaagcgttggagcgcgtcggcaacgagctggcagcctactccggcaggctggagtatttcgaagcccatccagagctattccagcaattgaacaccgagggcctgtcccccgagcaggctttctggaagttcaaccaggatgccttcagcatgcagcagacggacttgaagaaggccccccaggcggcgcctttcttccgcttgtccatgcagtatccccagggcatggatggtgccgccattctcaacggcatgctcgcgtcgaccatcgagaacgagcgccagcgaatcctggacgacctccaggcacgtatcgacggtcgcctgcaattcctcgagcaggatatcgaaggcaagcgtgccagttaccaggctagcaaggaaggcaagatcgcccggttgctggaagcggacagcatccggcgggctggcttggaggatgaactcagggcgttgcgcgggcggctgaagatggtgcgcgactcgcgtatccagcagctcaacgaagccatccagatcgccacgcggctggggatcgtcaagccgacgaccccgggcgcactgggagaggtcgggcaggatggctcgcgcagcgttttccgcaccgaggtgaataaccagcagattcccctgtatttcatgggcgtcgatgccttgaccgccgagcgataccttgctcaaacgcaagggcgatga

SEQ ID NO: 341435 - DNA, 234 bp, Pseudomonas aeruginosa
atgaccaaagccatctactaccacgccggctgcgcaatctgtgtcgaagccgaacgttccttgctgccattgctcgatcgcaagcaggtggacattgaagtggtccatctcgccgaacaatcggcacgcatcgccgaggcggaaaaggtcggggtcaagtcggttcctgccctggttgtcgacggacaggtactgcaccttaacttcggtgcggcgctcagcgatctgaaataa

SEQ ID NO: 341436 - DNA, 1017 bp, Pseudomonas aeruginosa
atgaaccttagtcgcattggtctggatctggcaaaacaagtattccaggtgcacggcgttgatcgtcacgagcatgtggtatgtcgtcgccaactcaagcgggcacaggtgcgggatttctttcgccaactgccgccgtgcctggtggcgatggaggcctgcggcagtgcgcactactgggcgcgcgagttgcgggagctgggccacacggtacgcctgatcgcaccgcagttcgtaaaaccctacgtcaagggtgacaagcacgatgcacacgacgccgaggcgatctgcgaggccgccagtcgtccgagcatgcgctatgtcccggtgaagagcgcagagcagcaggccgtgcagtcgatgcatcgggtgcgcagtcgtctagtgcgggcccgcacggcgttgtgcaatgaggtgcgtggcttgctgggtgagttcgggctgatcgcgactcgacgtgggcgagcggcgacgatggccttgctcgaaacggtcatggctaccgagccggcgcccttgccggccccgatgggcgagctgttgcgtgaattgaaagatgaattgcagacgctggaggcgcgcatcgctcgactggagcgacagattcaggctcacgtacgtggcgatgcccgcatccagcgcctgctggcggtggaaggcatcggcccgatcagagccagcgcggtggcggcatccgccggtgatgcacggcaattccgcacgggccgccagtttgcggcctggctgggcctggtgccacggcagcactccacgggcgggcagcagcgcttgggcaacatcagcaagcgcggcgatacctacttgcggaccttgctcatccatggcgcccgtgcagtcgtgcgctgttgcgccaacaagaccgatgcccgcagccgctggctgcaaggtctgctgcaacggcgtcctgccaatgtcgtcgccgttgccctggccaacaagaatgcccggatcctttgggccttactcagccgggagacatgctaccggcccggttga

SEQ ID NO: 341437 - DNA, 237 bp, Pseudomonas aeruginosa
atgaccgagcagaccggaaccatctacaccgcccaggtcggcagcgccgtgctgagcatcgagcgcaacggtcgccgcgacctgccgtttaccctggactgcaaccggctgcgcaatggcagcccgtcctatctggaattgccgcgcgcctacaagaccgagcgcggcgcgaggatggcggcggcgaggatcacgggcggcggcctggagtgggtgccggcagcgcctgcggagtag

SEQ ID NO: 341438 - DNA, 285 bp, Pseudomonas aeruginosa
atgaacaatgcgacagcgcgcataccccgtctagaacagaccatcatcgacaacgcccgccaggaactggatgccatcctttccttccatcgcaggaaggccgaaggcatcggcggcgaacaactggagcaggcctgccgggactacctggcgcgctaccatgcgctctgcgcgcttctggtgttcggccacctccccgactgcggtatgagcgagccaggtgcccgcgagctgcgcgctatcgaggcggaactccacgccgtgaacaagaccgctgccaactga

SEQ ID NO: 341439 - DNA, 378 bp, Pseudomonas aeruginosa
atgaaccgccaacaatggcttgaagccaccaccgttctcgaattcgcctgtacctgtctcgtcggactcgtctgggtcgccttttcacctgtcgccgccgctaagacgggtatcgttgccttcggtttggttggtatttgggctgctctcgccctgctcggcggaatggctcagcgtggggctcgtgtcggcctcggggggctggccataactctcgccatgcatttggtcaagcccgccatactgctctacttcgtccactccatcgacgatgcggttgagggactgctcaacctggagatcgccatggggctgatcttactgtggactgtctgggggctgaccggattgaagaggagttccggctcagtcaactga

SEQ ID NO: 341440 - DNA, 645 bp, Pseudomonas aeruginosa
atggtcaccatgtcaatcatgctgtcaccttctggatcatccagattcactcccaatcatccctcagtccggccgtgccggacggatccgcggcaccaggtcacgcgctctgtgctcttcaagtggacccgctcgcaccgagccgatcccggtcaagggccgcgctcccggctggtcggaacggctgcaccgttccggcgaacggaagcacgggcgcagcgcacccttgaacgcctctcccccgaacagcctcagccggggagtgtggggcagctcctccgccccgcgctcccgagccctcggcggcaagagcgggatgacaagggcagagcccttggtgttcagatatgggggttccaaggggaattattccccttggccgcacaacgtgcggaattgctctctgcagatgggacgactcaaagccgagtcgcactgacccacgaatcgaccgctttggcatcacgtagctcccctacccaaatcctgtcaggacgcacccggagcatgatacggatcaggtcgggaagctccttcagtaactcatcagactgtttcatggcatatacctctctggttgaagctcgtgtcaggttcagcaaggaagcgcgccctgccgggcgcgcagtcagcagctcggcttga

SEQ ID NO: 341441 - DNA, 570 bp, Pseudomonas aeruginosa
ttgcctaaatttcacgtcgactctatccaggagtggcagtcattcgagcacgacggcgtagagttcgatctcgggcatctatcgtcacaccaggtagtcttcaagggcgagaagcaagactacaaattcgttgtgacttacgggctccactgctttacgaaagacgatagtggcaacaacatctcgtaccggtacgaagacggtcggcatgggcaaacggtctgcatggaacgctacgaggcctctaagcagctcaagggcatcatagagaagctggactccgctacgatctaccacacggaaggcgagcgctttttcaccatggacatgttgaacagcgctaccggtctgctggaaccgtacaaagtgtgcctagcattctttcgtgaacatcgcttactacggatccacgtcaccagcgcgtatttcgcacgcactggtgaaggctcaccggataccccgatcaacaaaaagggattcagcatctacaaggtcgcgatggatacgcaaagaaagcccaaggggcaatgccccaaggaagtacgtaatcgaccgaaagagcaaaaatga

SEQ ID NO: 341442 - DNA, 657 bp, Pseudomonas aeruginosa
atgctccttggcactggcgagggtcgccgcatcgccatcggcacgggcttgcgcttcggccgccacggccttgtcagtgtggtcgttggcactggccagcgtcgcggcgtcgccggcgtcggcatgctccttggcactggcgagggtcgccgcatcgccatcggcacgggcctgcgcttcggccgccacggccttgtcggtgtggtcgttggcactggccagcgtcgcggcgtcgccggcgtcggcatgctccttggcactggcgagggtcgccgcatcgccatcggcacgggcctgcgcttcggccgccacggccttgtcggtgtggtcgttggcactggccaacgtcgcggcgtcgccgtcttcgcgggcctgcgcctctttcttgatcgcgtcgtcagtgtggttgttcgcttcggccagagtcgccgcgtcgccggcgtggcgcgcttgggcttccgccgcaacctgctggttcgcgtgatcgatggcttgtcccagcacttccgcgtcagcttggccgcgtgcctgcgcttccgccgcgacagcttcgttcgtgtggttcatcgcctcggtccgtacgcggttatctccgtccgcccgcgcctgcgcttcggcggccacggccttgtccgtgtgtgccttggcggcggctag

SEQ ID NO: 341443 - DNA, 324 bp, Pseudomonas aeruginosa
atgcagcgattcaaggtttgggttgaacaggtaacaccggagggcgctcgagctgtatttgtcggctttaatgcatctttcgactggtcgtttgtgaatcattacttccattatttcctgggggaaaaccctttcggtatcgcagcccttgatatcaaatcgatgtactttggcgccgcgcgcagcacctgggagcagacccgctctagcgagatcgcccaaaccgtcaacccccgcaagaaaggtgaccatgacgctcttcatgacgcgctttaccaagccgaactgttcaggctgatcaaagcccagttgatgagtgactaa

SEQ ID NO: 341444 - DNA, 801 bp, Pseudomonas aeruginosa
atgatgtattcatcgcacggcatgctggccgggaggaaggttcggcgtctgggctttggaaccatgcgactgacagggcctggggtatgggggcctccctgggaccagcagaacgcgatccgagtcttacgttcagcagtagcagcaggcgtccagcatatcgacactgctgacgcatacggtccgcatgaagtggaaacacttatccacaaagcacttcatccctacagagacgatttggtcattgcaacgaaaggcggatttacccgacagggcccgggccaatggacaccgtgcggcgtgccagcctatctgcggcagtgcgtggagcttagcttgcgccgacttggcgtcgaagccatcgatctttactaccttcaccgaattgacccaaacgtaccgctcgccgatcaggtcggagagctggagcagatgcgcgcggagggtaagatcaaagcgctgggactgtccaaagtgaccatcgcgcaagctgttgaggcggccaagattgcgccaatagcagccatccagaactctttcagcttgatcaatactagctcagatgacgttgtgcgatggtgcacgaccaaccacattgccttcgtaccctatgctcccctgggagctggtcgatgccttactggagccactcatggcgatctagatggtccagcgacaccgggaagtgcccttcgctggctgcttgattattcgccagcgatgttccccataccagggacatcaaacgccttacatctggcggagaacatgagggctgctgacgtagagcagacggattag

SEQ ID NO: 341445 - DNA, 615 bp, Pseudomonas aeruginosa
atgacagacgcggatttccggtggccctccgagcccatcgtaattgtggacgttgaaggaaatggccacacgccccctgacctcgtggagctagctatcgcatcgttcccagtcgttgagggtgaagagccttcgagttggctcatcaagccgccgaaccctatcacttggcaggccaaacgtgtgcacggcatcggcaactcgagcgtgaaaggttcacccgtttgggaggagctgcggggcgatgtcgaacagcagcttcagggcaaatggttcgtcgcgcataatgcctccatcgactatgaagtgatgaaacgtcacttgcccgattgggctccggtcggagtgatagataccctgaagctcgcacgccatgtgtatccggatgctgaaagccatagcctctctgcgcttctggctatgaccggcctggacagtgaggtctctggtgagctacatcgcgccggggaggatgctcgtgtcactgccctcctcctgagccgcttgctcaaagattcgctcatcaagtcctggatagagctgtgcaaaatcgcgcagctcaagattcagatcgaaaaggaagagccagcaccagaacaaggaagcttgtggtga

SEQ ID NO: 341446 - DNA, 1137 bp, Pseudomonas aeruginosa
atggacaagaacgttgcgatcatcaatgccacgcagttgccactggttaaccccagcctgagagatcccgtcgagtatcgcaagagcggcttaagcctgaaccacatcgtaggatgcccgttggattgcagctactgcgtaaggcatctgttcggtaacttcgatcagcgtaagcctcaagcgttgatgcctgatgaggaggcgtttgaacgattcgtctcgcatcgcttcttccagcctcacatcacgccaattcagctgtttaatcgggcgactgatccgatgcttccagaagtgaaaggccatacccataaccttttgcacttgctggatcaggcagggttgactaacaacgtgcttgtcatcacgcgttggcgagtgacgtctgaggactgcgagcgcttcaacgctctgagcaatatcaagctgacgatattggtgacctactctgggattgacgaccctagggtcgagccaatcaaatcttcgatcgcggctaatagcctacgtacccttttcaagcatgcgcaacgttatcggacgttgctttattggcggcctattgtcccgggactcaacgattctgagcagcacattactcgggctgctcagttgtccaaatacgcccatgcgacggtattcagcggattattctaccggcgagagattgccgagtattaccgaagccagggtattcctgaaccctacacctcgactgcaaggcgcaagctgttgccgctggaggaagaacaacagctgctgaggctgtatcagtcacacgcttcaggtacaccaatcttccgcaagacctcctgtggggtggcctatgctcatcagcagcccgactacaatggccactttgggatcaccgagctttgtggcacctgcccttccgcccaatattcaacgtgtgaggccgtctggaagaagcctgatgagacgcttctcaacagcctttgtcagcagctgggcgttgtgggtgagccggtgatcacagatcgcgccatcattgttcgcggtctcgatgaacaacgacggtacttcatgcaacacacacttggatatcaagtgcacgatgccgacaagccgcatcagtatgatcgccatggacgcgcggaagcgcagaggaatatctga

SEQ ID NO: 341447 - DNA, 1056 bp, Pseudomonas aeruginosa
atgcctaaccatctaactcttgcggttgctggcggtagaaaaactcaaggactggtcgatcattgcaaagcattgcctactgatcggcacgtacttctcgttacattcactcaaaccaatcagcaagaactgattcaacggctcagctctcaggtcggtgaccgccatagcatggaggttatgggctggtacaccttcttgctacgccatttcgcaaagccgttcctgccattcaaattcccaggtgagcgggtagggggcttcagtttcgaaggacgccccggacagtttgcgaaaggcaggcacaggtttatggacagcagtaatcatctgtatgcctgcgagctcggccgtctcgcgagtgaactgatggcagcgacgccgggactggaatgcctttacgacgagattctgatcgacgaggtccaggatctcagtggctatgactgggagattgtgcatgggctactgcattcacgagtcgacattcgcatggtcggcgatgtgcgccaggcggtgctctcaactaacccgagggggcagaaaaacaagcagtacggttacgcaggtgcacttgagtggtttttagagcgcgaagcagatggcctgctaagtatcagctacgcgactacaacctaccgttgccgagccgagattgcggcgttctcggacactatttttgataagtcatggggtttcccagagaccatctcagagaaccacgtagagtctgagcacgatggtgtgttcctagtgcattcgaagcatgtcagccagtacgtcgagagctaccagccccagtgtctgcgtaacaccgcatcttcgggcaaagatttcactttagacttcatgaattttaaggtttcgaagggagccacattcgagcgtgtgttgatcgtgccaacggcgccgatcaggacatttatacagaagcaggagtgcttggaggctacgcccgcagcggcgttctacgtagcaacaacaagggcaagacaaagcttggcaatcatcatcgataatccaggcaaatccaagctgccagtgtgggtgccatga

SEQ ID NO: 341448 - DNA, 1857 bp, Pseudomonas aeruginosa
atggcacgacccattgctgaccttatccacttcaactctacaactgtcacggcaagcggagacgtttattacggccctgggggaggtaccggcattggccccattgccagacctatagagcacggcttggattcgtccactgaaaatggctggcaagagtttgaaagttatgctgatctgggcgttgaccccagacgctatgttcctcttcaggttaaagaaaaacgcagggagatcgagcttcagttccgagatgccgagaaaaaacttgaggcgtcggtacaagccgagctggataaggctgatgccgctcttggtccggcaaagaatcttgcaccattggacgtcatcaaccgcagtctgaccatcgttggaaacgccctccagcaaaagaatcaaaaactactgctgaatcagaagaagattaccagcctgggtgcaaagaatttccttacccgtacggcggaagagatcggtgaacaagcggtgcgagaaggcaatattaacgggcctgaagcctatatgcgcttcctcgacagggaaatggaaggtctcacggcagcttataacgtaaaactcttcaccgaagcgatcagtagtctccagatccgcatgaatacgttgaccgccgccaaagcaagtattgaggcggccgcagcaaacaaggcgcgtgaacaagcagcggctgaggccaaacgcaaagccgaagagcaggcccgccagcaagcggcgataagagctgccaatacctatgccatgccggccaatggcagcgttgtcgccaccgccgcaggccggggtctgatccaggtcgcacaaggcgccgcatcccttgctcaagcgatctccgatgcgattgccgtcctgggccgggtcctggcttcagcaccctcggtgatggccgtgggctttgccagtctgacctactcctcccggactgccgagcaatggcaggaccaaacgcccgatagcgttcgttacgccctgggcatggatgccgctaaattggggcttcccccaagcgtaaacctgaacgcggttgcaaaagccagcggtaccgtcgatctgccgatgcgcctgaccaacgaggcacgaggcaacacgacgaccctttcggtggtcagcaccgatggtgtgagcgttccgaaagccgttccggtccggatggcggcctacaatgccacgacaggcctgtacgaggttacggttccctctacgaccgcagaagcgccgccactgatcctgacctggacgccggcgagtcctccaggaaaccagaacccttcgagtaccactccggtcgtaccgaagccggtgccggtatatgagggagcgacccttacaccggtgaaggctaccccggaaacctatcctggggtgattacactaccggaagacctgatcatcggcttcccggccgactcggggatcaagccgatctatgtgatgttcagggatccgcgggatgtacctggtgctgcgactggcaagggacagcccgtcagcggtaattggctcggcgccgcctctcaaggtgagggggctccaattccaagccagattgcggataaactacgtggtaagacattcaaaaactggcgggactttcgggaacaattctggatagctgtggctaatgatcctgagttaagtaaacagtttaatcctggtagtttagctgtaatgagagatggaggggctccttatgtcagagagtcagaacaggctggcgggagaataaagatcgaaatccaccacaaggttcgagtagcagatggaggcggcgtttacaatatggggaaccttgttgcagtaacgccaaaacgtcatatagaaatccacaagggagggaagtga

SEQ ID NO: 341449 - DNA, 264 bp, Pseudomonas aeruginosa
gtgaacgcggcgggcacgtcgttcctgctgttttcccttggcgccctggtgccggtggcgccgttcctgttcctcgacggtgccgcggcgctggtcgcaagcctgctgtccagcctgcttgcgctgctgttcagcggcgcggtcaccgcccgtttcaccgggcggccgctggcgttctcggcgttgcgccaggtgctggtcggtacccttgccgcggccttcacctatgggttgggcaccgcgctcggcgtgggcctgggctga

SEQ ID NO: 341450 - DNA, 195 bp, Pseudomonas aeruginosa
atgttcgccatccccgacctggtcggcggtaccgacggcatcatgatcggcaacctgatcaagagccagttcctcgactcccgcgactggccgttcggcagcgcgctgtcgatcgccctgaccggctgcatcctgctgctggtcgccctcggcatgggcgccgcgcgcgcccgcaagggaggcgcccatgcgtag

SEQ ID NO: 341451 - DNA, 543 bp, Pseudomonas aeruginosa
atgacagcctcagactccgccgccgatgaaaccggcgaccttcgccacgaagcgcacgcctgggtgatcagcctgacctccggacgcgtcacccagggcgacgcgcgggccttccgccagtggtgtgcgcgcagcccgcaacacctgcgagcgttcgtcgaggcgcgcgatctctggcaggcactcggcagtgccgccgctctgccgctggagccgccggccgtggcgcagatcgcgccgaggcgtttcggtcgtcgctggttcgtcggcggtgcgctggccgcctcggtggcgttgttcgtcttgcgcccgtcgctgctcgaccatggcctgggcggcgccgactacgtcacggcggtcggcgagcagcgccaggtgcaggtgagcggcgagacgcggatcgagatgaacacccgcacccgcctgaacgtgcggcgcaatcaagagcagcaggaaaccatcgaactgctcggcggcgaggccgagatcatcgccagccacccgccgcagagcagcctgcgggtgatggccgggagcgcctag

SEQ ID NO: 341452 - DNA, 321 bp, Pseudomonas aeruginosa
atgcaccgttcatcgcaggttctgccggccctgatcctgggcctggccatgaacgccaccctggccgacgagccgacgccgccggcgaactgcatcaacaccgaggtcaacggctaccaggctttgtcctatgaatgcctgagccagcagatggccgatcctgacagcgcggccagggcccgccgcgaacaggagctggattccgccgccatcgtccggcgtccgccaaaccagctcggcctgtacaaccaatcggcgacgcgcattcgcctgggcacctcgttcggcaactcagtggaagcgcagcggccgcctcgctaa

SEQ ID NO: 341453 - DNA, 411 bp, Pseudomonas aeruginosa
atgacaattgcgatcggccgcgcgcagcagaccgaaacctggctggcccggcacatggatgggctgatcgtgccggcgccgcccgaggacgggcttgaagcgctgacggccgaatggcgcgtacaggtcgcaggtacatgcggcgagggcgtgagcaagccgcttgggattgcgggctttctggacttggcggacaaccccgccgcgcccctggagcgcatccgcggtggcattcgcagcggcatcgatgggctggcggcctttctgcggcgcgcggccgatgccggtgtggctcatgtcgcactcaatccaaagatcagccgacggccctatgcggacgtcatggaagaactggccgaggcgcttgtgcggccggccagcaaggcgtccctcgagtctgcagtgcagtga

SEQ ID NO: 341454 - DNA, 990 bp, Pseudomonas aeruginosa
gtgacctattaccgccagcgcgcatcggccggcctgatcgtcagcgaaggggttccggtctcgcgcgagggcatgggctacttgttcacgcctggcttgtatacggagcagcaggtcgcgggctggcggctggtgaccaacgcggtgcacgaggccggcggccgcatcttcgcccagctctggcatgttggacgcatctcgcacgtctcgctgcaggaggcaggcgcgtctcccgtgtcttccgtcgcccggcgagcagagaattcgcaggcttacgcctggatcgtgcaaggcctggccggccaggtgccggcaagcgccccgcgcgccttggccgaggatgaggtgccgcgggtcacgcgcgacatcgtggctgccgccaggggcgcgatcacggcgggcttcgacggcattgagctgcacgcagccaacggctacctgttcgagcagttcatcaatggcgagctgaacacgcgcctggatcgctacggtggctcgatcgccaaccggttgcgctttttgctcgatacggtggacgccttggccgaggcgattggcgcgcaacgggtcggcgtccggatttcgccgttcggccgcctgaacgacatgcgggccttcgacgatgaagcgcagacatggttgactgcggcaaacgagctaagcaaacggaacctggcgtatgtccatctgagcgaccagtgcaccattggcggcagccctgtcggcgatttcttgcaggctttccgcgacgcttaccgcggcaccttgatcgccgccggcggatttgacaagccgcgcgcagaacaggcactgcaacgcggcgtgctcgatctcattggcttcggggccccgttcatcgccaatcccgatctcgtcgagcggcttgccaacgactggccgctggccgcggtcgatcgttcgaccctgtacggcctgcacggtgagcatggctacaccgactatcccccgtacgcaggcgatgccgcctga

SEQ ID NO: 341455 - DNA, 501 bp, Pseudomonas aeruginosa
atgatcgaccttgacattcaacggatggcagatcttgaagctatacgctcgctgcgcatacgctacagccactacctggacggcaaccacatggacgaactggctgccctgttcgcgccggacgccttgtgcgatgcggggcgtggcctgtggcagggccgggagcagattcgcgctggcctgtcggctgcctttgaagcctacgaccatgacgtcgaaggctcgtacccgttcctgcatgcggtcactaaccactggatcgagttcctcgatgccgataccgcgcagggacgctgctatctgatcgacctggagaccatgagcaagcgcgagcgcgatccgtggctcttgctgggctcctacgccgatgaataccgccgcgttgatggccgctggttcatcacccgtacgcggctggacatcttttggccggagcgccaggccggcggcggactgccgggccgggatctgatcctgcctgaggcgtacccagcaagttga

SEQ ID NO: 341456 - DNA, 822 bp, Pseudomonas aeruginosa
atgcaagaggatctgcagcaacacagaacgttcatggagcgggccatccaggagatgagcaactctcctggtagtaccaaggtcggggctgtgttggtcgtcgacggtgaaatcgtcgccacgggccacaaggtacctggctgccatgccgagcgagcagcaattgaacaggccaaggcgaacggcatcgacttgaggcaggcagttctctacaccacgctcgaaccttgcgttcaagtaaaggaaacgcaatcaaaagcctgctgctccagcctaattctcgacgagggcatcccccgggtattcatcgggtacactgacccaaaccctagggtcttgcgtcaaggctggcggagtctgcgcgacggtgcggtggaactacagtactttccccaggatctgcgcagcaatatcgaagccatagatccctttgttcacgtcttctcacagagcatcggacctactggaaccatgactgtcgatgtactcgaacccgagactgtgacgattcagttctcggcagacgactcacgcaccatggcgattcgctggtcttgggcagacaagggagtggcgtttgcctacagctctccgggcattgatgttgctctcgctagggaggcaaaagcgttttctgaagttgacgaccccagcattttcaagttcggtactcaggcgcgcgttccgattggcagcatcgtggtcttccgcaaacacgacgcctatttgctcgctaacgttattgacgctcaggcagggccgaagtacaaggacaagcactacctggtaaagttcaagtatgaagttcgcgccagaagctga

SEQ ID NO: 341457 - DNA, 1431 bp, Pseudomonas aeruginosa
atggcaggaacggaggggcaggacgacgtagagctggatgtctgggatccagagcttcggcttgatagggggaaagcggatgacggggaggagtaccgggatctgtacatgcagactttcgtacgggattccaccgagccgcatcagtggcggagccagcctgaatccaggtggcatcatttggctagggtgcatccaaaaaaagtcgtcacctacccggtattttccaatccttacgcacaacggtatctatcttgccggcacgggcggttcaaaacgatcgcgtacgaactcgatgtcgagcacccgctgccaggcaacgtagatgaagcaaaatcgcatattgaaactgtgtcggccttcgacttattcaatccatgtgcctttggactcgggcttatcaaagatctggatgaagtctggcgaggacttgctggatttgccaacctcaatgccattgtgctgacgcagtcaggtggtctgcagatcgacggcgataccgtgcgaataccggtggtgcatatcgagtcaatgcgacgggcattcaaccgtacaaatcgaaaggtacgagaggttgtacggctgggcaagagaacgcatgtccggaacgtgctcctatcgcgtctggatcctgaaaggtatccgcgcgtgatgcaggtcaatcaagaaggccaactgatagaagttcgcctggaccactccaggacaagcaagaacgcggcccgttctcaacgaagagcgaccgtggacgcggtgcgcaccaacgtcgacacgctagcggccgaagcccctcaggaactcatccggctgcatgccgagattgagcgcgccaccctggcccagatgattgagaagtacgaagaaatgctcaagaaaaagctgccagaagcggaatggcagaatttttttgagcggaacatcttcatcctgactatggtttttgctcgtcctgtcagactgcttcatacccaattccatgcgaaacctgggagggtggacggaaaaggtgcgcagattggggacttcctctttgccgagcacggttttgccatggccatcgtggagattaagaaaccggccagtctactgttgcgagccaagccctaccgaaacaccgaggtttttgctcccagcgccgatttggcaggtgccgtgacgcaggttctataccaaaaaaataacattcatcagtactggctctatcataaggagagtccagaactcaaggattctcggccagatgccgtgaagtgtgtagtcatcacgggcatgttgccaaaggatgaactacagcgacggagttttgaggtgtttagaaattcaagtaaagacgttgaaatcattaccttcgacgaacttctcgccaagttgcggctgttgtcagagcaccttgcatcacctgaaactgataacagtgagccccctttctag

SEQ ID NO: 341458 - DNA, 297 bp, Pseudomonas aeruginosa
atgaacgacccgctcgcgctgccgcccggattccatttcgagccctacctgggcggacccgccctgtatttggacgacacccaagtagccagcgcctgcccggcgcgcgacgaggcgggcgcttcctggcgtctgtgcctgtgtccccggcggccgccgcgatacgagttcctggccgacgagcaggcttgccttcggtacatggccgcctgggcacgccgctgggaggccgaaatccgcgcgcggtatccggtgcccgtcgacccacctgcgacggtgccccacgaaaaaaactag

SEQ ID NO: 341459 - DNA, 1599 bp, Pseudomonas aeruginosa
atgaataaagaatggattcttcaaacaaaagaaactcgccgcacattctccagtgcgtcttggattccgctcagggcttcaatcaaccaggaagatggagttgtacaagatgctggatacatcgccgagtattttggctgtggctctgccgcatttccacaagatcaaagggagtttgttgagcagcgcctcggttggaacgacctcggaataggccatagcgtagcgccttacgcttacgatgatggccattacgcttccattgatcaatttcagtacaatgacaaagaagcaataggcgtcaacctcgttttcgaacatcctcagcctgtcgttggtggaaagaaatggatattgaaccctgacctagtagtcgcgctccgcctgataaaagatggaaccaactgggttaggcctgaagaggatttcgttgtagtagctcgcgagagtttcaatgagaagggcgagcatcagctgatcgagatcaagcgagagttcatccttgattatttggccgcaagaaatcttttgcttcgcctatcttattaccgcaaacgagtagaaaacgtaccaatgcttgagagcagtgagtacgcagggttagcgagccataaagaggagcgcgacaaaggtcaatttgaacttaatgtccgcgagatcaatgaggttttcggcggaagctgggcgctgttccgtgcttggcgaacggacgtggacgaagacgaagacgcgcctgtgatggggccagagaatgaccaaaacaccgaccatgaaagctcgaaaggtcatcgtgacggttatgaaggtactcgggttgcgggtgaattctggcgagatgaatggattgaacacaaatcccttagcataagagtgcgcggggatgcagacacgaaccttccacagtttgtggtagggactgatggccaacgcatggcatcttctgagttaaacaatgaggagatcggacgatggctttggtttcaatcaagtgtagctatcgcccttctgggccatcgcggcttcgccctggagtggtacacggcggagacgggtgctattcgttcgacctctggctacgccacgcacttcggcatcaattcggctgacttgctgaccgtctacgccaacgacatcgcacgtctcccagcttgggagcagcacatatgggcagctcataatgttgctccggacgggaaagtgtcgggagaattgttagcagcgcaagtcaagaccgaaccggcgtccacacatgcggtagaggagaagctctttgggagcatgcgaatgctcgaagaaggattccgcaacaggttcgggattgacttgttcagccacgatatcgatgacgctttggctatgcagcaggtttctcgctttcatagtcgtgaccaagcgtcactgctaaggctggcgaaagagcttgtccgcgtattctccgaccgactcaacattcgcgaccttcgcaaactttcaacccatgctgagaaagaaaagcttggctcaaataagcttctccaagatatattatctcagaaaattgggaccgataaggcccgccaagtttttgctgaaattgctgtgacctgcccccagttttag

SEQ ID NO: 341460 - DNA, 633 bp, Pseudomonas aeruginosa; identical to SEQ ID NO: 324104

SEQ ID NO: 341461 - DNA, 411 bp, Pseudomonas aeruginosa
atggtagagagccgcgccatgcgatcaccgcgcgaatccgggcccacccgccagcaagacctcggcgtcgcgcagctgggttggctcgctgcggccgtattcgtcgtctcggccggatatggggcactgatgcccttgatccccgactggctgcggcccttgatgggcgacgcggatcctgcggcgcttgcgcgccatgtcggctacctcagcggcatctacacggcgggcatcctgctgggtgcgcccctgtggggcatgctggcggacaggctggggcgtgcccgcgtgttgctggtgggcctgatcggctacgtggccagcctgctcccgctgctgcgccccgagtccctgggcgtggtcggcatctatgcgctgcgcggcgcgacgggcttttttgtttcacgatga

SEQ ID NO: 341462 - DNA, 1362 bp, Pseudomonas aeruginosa
atgcaacttcagtttctgggtgccaccggcaccgtgaccggttccaaatacctgctgtgccatggcgacgcgaccattctggtggactgcggcctgttccagggattcaagcagctgcgcctgcgcaactgggagccgctgccggtcgcgcccaagaccgtcgacgcggtcgtgctcacccacgcccacatcgaccacagcggctacctgccactgctggcgcgacaaggctttcgcggccgggtttactgcacgtccgcgacgcacgagctgtgcaagatcctgctcaccgacagcggccatctgcaggaggaagaggcgaagttcgccaaccggcacggtttctccaaacaccagcccgcgctgccgctgtacacccgtgaggacgccgagcgctgcctgaagctgttcgcgccacgtccgttctctcaggacttcgaggcgctgcccggactcaccgcgcggttgacgccttccgggcacatgctcggctcggccttcgtgcacctcaacgacggccggcgatccgtgctcttctccggcgacatcggccggcccaacgacccggtgctgcgcccgccggtgcaggtccccggcgccgactacctgctggtggaatccacctacggcaaccgcaagcatgaagcgtccgacgcactggcgcagctggagactgtcatcaacaagacggccgcccgtggaggggtcgtggtcatcccagcgttcgctgtcggccgagcgcagagcctgatgtacggcatctaccagctcaagaagcaagggcgcatccaccagcacctgcccgtgtacctggacagcccgatggccatcgatgccacacggctgtaccacgcccatcgcgacgagcaccggctctcgcccgaggaatgcgagggcatgtgccatgccgcgaagatcgtcaacaaggtcgaggagtccaaggcgctcagcgccggtcgtggaccgatggtcatcatctccgccagtggcatggccactggaggacgcgtggtgcaccacctcaagtcattcgcgcccgaccatcgcaacaccatcctgttcgccggctaccaggcgggcggcacccgtggcgccgcgatcgtgcacggcgcgtccaccgtccgcatccatggccaggacgtgccgatccgcgccgaggtggcctcgctcgacaacctttccgcccacgccgatgccgacgagatcctcgcgtggatgcgcggcttcacgcaaacaccgcgccgaaccttcgtgacccacggcgagccggaggcggccgatgcgctgcgcgcgcggatcgaccatgaactgggctggtcggttgccgtgcccgagtacctgcagacggtggatctggtatga

SEQ ID NO: 341463 - DNA, 1155 bp, Pseudomonas aeruginosa
atgacgtacggcgtctacgatggggctggcaatagcatctatgccacgcccggtcctgacctgtctaaacttgccagtagcaaaaagttggtcaaccgcatcaccgctgacgatttgatcgtgtggcaggaggatcagaggtcatatcgaggtgtggtgctgcaactgcctgctgacgattcagcggcgcccggctaccgcatcgtcgctgccatggacatcggctttcatctcgacttcctggcggagttcaagcgcatgctctggtgggcaaccggcttggtcatgtgtctggcgctcggtgtggcttggctggcggtgcagtggggccacctgccgattcgcaaggtcaatgaagagattcgggcgattcgctcttcaaagctggatgtgaggctggatcctcgggatgtgccgatcgaactggcggaactggtattcgccttcaacgatatgttggcgagaatcgaggaaggcttcacccggctatcacacttttccgcagacatcgcgcacgagttgcgcacgcccgtcaccaacctggtcacgcagactcacgtggcgcttggccagccgcgcagcaacgaggaatacagagaaatcctctattcaaatttggaagagtttgatcggatgggacgcatgattggtgacatgctgtttcttgcccaaacggaaaatgatccccgcaacttgcgtctgtctaccattgatctgtccgaattggtgcggagtctgttcgactatttcgaggcgctggcagaagatagcggcattacgcttggtgttaaaggggcgatcggcagcatagcggcggatcgggaaatgctcacccgggcgctgaacaatcttctctcgaatgcaattcgacacacgcctcgcggcaagagcatcacggtcttgctttcgcaggacgagcagtggacaacgatcagtgtggtcaatcccggtgagagaattcctgagcgcgatctaccaaagctcttcaaccgcttctaccgagttgatccggcacggcaacgaaatacggcgggcgccggtcttggccttgccatcgtgaaatcgattgcggaggcacatggtggctccgttgccgtgacctccagtgagcttgtcaccaggtttgacttggtattgccccatctgcggcagtag

SEQ ID NO: 341464 - DNA, 765 bp, Pseudomonas aeruginosa
gtgaccttgatcgagattgaccgtaccttgcgccagttgcgcctgtcgggcttcgccgacaccttgaacacccgcatcatgcaggcccaggccgcccagcagcccttcgtcgagaccctcgcggccttgctgcaggacgaactggatcgacgccgcaccagccagaccgagcgcagctacaagcgctctggcctggacgagcggcccacgctcgtggacttcgactggcagttcaaccccaagctgccgcgcgcggcctgcttcgagctgcacacgctgaagttcgtcgccgagggcgccaacgcgctgatcgtgggcaagcccggcaccggcaaaagccacacggccaaggcagtggcctaccaggccacgctgcaggggctgcatgtgcgctatatcgaggccgacaccgcgctggctcagtacgcactggccagtgcccaggagcaggccgccttgatcaagtcctggagcgaaccggacctgctggtcctggatgacctgttcctggcccgtcgcatcccggaggccgcggccgagttgctccaggccgtcgtgcatcgccgctacaagctgcgccgctccatcgccatcacctccaaccgcgtggtcaccgactggggcaagtacctcaaggacgtcaccatggccaccaccatcctcgaccgcctcatgcaccgctgctcaatgctggagttcgagggcaagagctaccggctcaaggaggccgccagccgcctggccctcaacaccgagccttcataa

SEQ ID NO: 341465 - DNA, 1602 bp, Pseudomonas aeruginosa
ttgaagcccaataagcgcgcgacgatcctgacgctgctcgaacgcggaaagtcccagagggagatagcccggcttaccggcatcgaccgcaagacggtcaagggctaccgggagcggtggctggccgaaggagcaaattcccccggggtggccaccggctctgaagtggccgtggccacccccggccagcaaactcccccaccctggccaccggctggcatgccggtggccaccagtcggtgtgagccccaccgcgacttcatcgaggcccaggtccggctgggccgcaacggtgtggcgatctaccaggacctggtcgaccagcacggctttgccggcgcctacaactcggtcaagcgcttcgtggccaagttgcggcacgaggagcccgagcggttcgaccggctgtcgttcctgcccggcgaggagatgcaggtggactacggcgagggggcgccgacgcgggtgccggggacggaccgctaccgcaagccccggctgttcgtggccacgctgcgctactcgcggcgcagtttccggcgcgtggtctggaagtccagccagcaggtgtgggcagaactgcacgagcaggcctggcgctacttcggcggctcgtgccgctacgtggtgctggacaacctcaaggagggcgtgctcaagcccgacctgtacgagcccgagctcaacccggtgtttgccgccacgctggcgcactacgaggtggtggccgacccggccagggtcagggacccgaaccgcaagggcaccgtggagagcgccattggccacacccaggccacggcgctgaagggaaagcgcttcgagaccatcgaggcccagaacgagcatctggagcgctgggagacgcgctgggcggcccagcgcatccacggcaccgagcgccgccaggtgcaggccatgttcgaggacgaacgcgcccacctgcagcggctgccgctgaccggcatgcagtacttcaagcaggaggagcgcaccgtttgcgacgatggctgcgtgcgcgtggaccacagcagctactcggcccgtccgatggccatcggtgccaaggtcctggtgcgcatcttcgagcggcgcatcgagatccgcgagctgaccacggggcggctggtgcgcacccacgagcgcgccgaacggccgggcacggtggtgatgccgcaggccgagcgcgtcttcaatccctcgcgcgagacgcgcttcatcctcaagcaggccgaccagatcggcccccaggcggcacgcctgtgccgcatgctgttcggcatcgaaggccgggtgggccagcgcaagctgcacggcatcgtcaacctcagccgacgctacccaagccgcttcgtgaacgccgcctgcgcggccgccatcgagcagggcatccacagctacaagcacgtcaaggcgctgaccgagcgcctggtggccgaggccctcgcatccatcgatgccgccggcgatgggaccgaccctggccgcgccgatctcgcccaggagcacgtactcatccgcgacaccgaggagtacggctcgctgttcaacctggccgccacccaggccggcgtcgataccagcgagggaggcggcctgtga

SEQ ID NO: 341466 - DNA, 930 bp, Pseudomonas aeruginosa
atgactgctggggtagatcgcttcgcggggattgatgcattcgtctcgacagctcaagccggcaatttcactgctgcagcgcaagctctgggcatgacgccttcgggcatcgccaagagcgtcgcgcgcctggaggcgcgattgggagtgaagttattgcatcgcacgacccggcgagtgagtctgacgcctgaaggtgaggcctatttggagacctgtcatcaggtgatcgaggcactccagtcaaccgagggagcgctctcgccgatcgaccgggcaccacgtggccgcgtgcacctgcaattgcccggtgcttttgggcgccggcatgtgcttcctgaactactcgccttggcaaacaagtttgatggcctcgacctatcggtggccttcaccgagcgcaccgttgatctggtcgaagcgggttacgacctggccgtacgcatcggtgacttggccgacgaagcaaatttagtggccaaacggcttggcacgcagaggctcgttatctgcgcggcgccgagctatctgcaacgctatggagcagttcttacgcccgaagagttaatgcatcgggactgcatcactggtcctcggggacggcagagacccacttggttgctccgcgtctcggaccagcgcgtacgtcggcaggaaatctatccgcgccatgagttcagtgatggtgaagcaatgctggcggcgggtctggccggctgcggcatcatgcagatgccgacatggctggtggccgaagatatacggcaggggcgcttgatccccgtgctgccggactgggcaggtggtgagatgcctatccatgcagtgtggccgcaatcgcgttacctgcagcccaaggttcgggctgtcatagccccggcggccacccaaactcccccactgatggccaccccaaactccgccacctga

SEQ ID NO: 341467 - DNA, 267 bp, Pseudomonas aeruginosa
atgcgcagccttttgcgaaagaattcgcccgcaggatcgtttagctacgccagacacccgatcttcgagcaggtgatggaggcgcagcatttgaccgtgggtctgatccttcccttggagacccatgcgggcccggcaccgaccatggccgatcatttggcgatggtgtcattttcagaagacgattgcacacaatgtcaaaagtcggctgcacggtcttttctgatgctggggatgtttcagaaagcggaaaataaagcacgctaa

SEQ ID NO: 341468 - DNA, 363 bp, Pseudomonas aeruginosa
atgggttgcgccgcgtgctttccggccatcgccagcttgggcgcggccatcggcctgggctttctacaggaatacgaaggattgttcatctccaagctgctgccgctgttcgctgtcgtggctttgctggcgaacgcattgggctggctcagtcatcgccaatggcaccgcagtctgctcggcatgatcgggccagccatcgtgttcgccggaactgtctggctgcttggcaactggtgggcagcacacctcgtatacaccggcctggcgctgatggtcggcgtgtcgatctgggacttggtttcgccggcaaatcgccgttgcggcccggacggttgcgaacttcccacgaaacaaggctga

SEQ ID NO: 341469 - DNA, 366 bp, Pseudomonas aeruginosa
atgaacgcctacacggtgtcccggctggcccttgatgccggggtgagcgtgcatatcgtgcgcgactacctgctgcgcggactgctgcggccggtggcgtgcacgccaggcggctacggcctgttcgacgaggcggccttgcagcgtctgtgcttcgtgcgatccgccttcgaagcgggcatcggcctcgatgcgctggcgaggctgtgccgggcgctggatgcagcggacggcggcgaagcggccacgcagcttgccgtgctgcgccagttcgtcgaacaccggcgcgaagcgttggccgatctggaagcgcagttggccaccctgccgaccgagccggcacagcacgcggagagtctgccatga

SEQ ID NO: 341470 - DNA, 237 bp, Pseudomonas aeruginosa
atgaacggcccggaacgcctgccgaccaagacacgcaagccgttcaccggctacctgtggggcgcgctggccgtgctcacctgtccctgtcatttgccgattctcgccgttgtgctggccggaacgacagccggcgcattcatcggggagcattggggtattgcagccctcacgctgaccggcttgtttgctctgtccgtgacgcggctactgcgggccttccggggcggatcatga

SEQ ID NO: 341471 - DNA, 990 bp, Pseudomonas aeruginosa
atgacgacctcgcagcccgccggatggacggcgaccgagttggcgcaggcggttgtgcgcgggcagcttgagttgcactaccagccgatagtcgatctgcgcagtgaccagattgtcggtgcggaagccctgttgcgctggcggcacccaaggctcggcttgttgctgccgggccagtttctccccttggtcgaatcgtccggcttgatgcctgaaatcggtgcttgggtgctgggcgcagcctgccgccagatgcgcgagtggcggatgctggcatggcaaccgttccggctggccgtcaatgtttcggcgagccaagtgagaccggatttcgacggatgggtaaagggcgtgctggctgacgccgagttgcccgccgagtctcttgaaatcgagctgaccgaatcggtcgcgttcggtgatccggcgatcttccccgccctggaagccttgcgacaaatcggtgtgcgcttcgccgccgatgatttcgggacggggtattcctgcctgcaacacctgaagtgctgcccgattactacgctcaagatcgaccagtccttcgtcgccggactcgccgacgaccaccgcgaccgaaccatcgtgcgctccgtcattcagcttgcgcacgggctgggcatggacgtggtggccgagggcgtggaaacgccgaccagtctcgcactgttgcggcaagcggcgtgcgatacgggacaaggcttcctgttcgccaagccaatgccggcggcggcattcgccgcctttgtcagtcaatggaggggtgccaccatgaatgcaaatgatccgactgccaccagttgctgcgtgtgctgcaaggaaatcccgctcgatgccgcctttaccccggaaggcgtggagtacgtcgagcacttctgcggactggagtgctatcagcgcttccaggcacgcgccaaggccgcgaccgaaaccagcgccgaacaaaacacttgcgattcgccgccgtcaggttga

SEQ ID NO: 341472 - DNA, 615 bp, Pseudomonas aeruginosa
atgctgattggctacatgcgggtgtcgaaggcggacggctcccaagcaaccgatttgcagcgcgacgcgctgatcgccgccgatgtcgatccggtgcatctctacgaagatcaggcatctggcaagcgcgaagaccgccccggcttggtggcctgcctgaaggcattgcggccgggagatacgctggtcgtgtggaaactggatcggctcgggcgcgacctgcggcatctaatcaataccgtgcacgacctgaccgggcgcggtatcggcctgaaggtgctgaccgggcacggggcggccatcgacaccacaaccgccgccggcaaactggtcttcggcatttttgctgcgctggccgagttcgagcgcgaattgatcgccgagcgcacgattgccggtctggcatcggcgcgggcacgcggccgaaaaggcggccggccgttcaagatgaccgccgccaagctgcggctggcgatggcggcgatggggcagcctgaaaccaaggtcggcgatctctgtcaggaactcggcatcacgcggcagacgctctacagacacatttccccaaaaggcgaattgcgcccagatgggacgaaactactcaaccgtatctga

SEQ ID NO: 341473 - DNA, 909 bp, Pseudomonas aeruginosa
gtggaagaatatcccatcatcgacttgtcccacctgatgccggtggcccagggcttggcccgtcttccggcggacgaacgcatccatcgccttcgcgctgaccgctggatcggctatccgcgagcagtcgaggcgctgaatcggctggaagccctgtatgcgtggccgaacaaacaacgcatgcccaacctgctgttggtcggtccaaccaacaacggcaagtcgatgatcgtcgagaaattccgccgcacccacccggccagctccgacgccgaccaggagcacattccggtactggtcgtgcagatgccatccgaaccgtcggtaatccgcttctacgtcgcgctacttgccgcgatgggcgcgccattgcgcccgcgcccacggctgccggaaatggagcaattggcgctggcactgctacgcaaggtcggcgtgcgcatgctggtgatcgacgaattgcacaacgtcctggccggcaacagcgtcaaccgccgggaattcctcaacctgctgcgtttcctcggcaacgagctgcgcatcccgctggtcggggttggcacacgcgatgcctacttggcgatccgctcggacgaccagttggaaaaccgcttcgagccgatgatgctgccggtgtgggaggccaacgacgattgctgctcactgctggccagcttcgcggcttcgctcccgctgcggcgaccctcgtcgattgccacgctggatatggcccgctacctgctcacgcgcagcgagggcaccatcggcgagctggcgcacctgttgatggcggcggccgtcgctgccgtggagagcggtgaggaagcgatcaaccatcgcacgctcagcatggccgattacaccggtcccagcgagcggcggcggcaattcgagcgggaactgatgtga

SEQ ID NO: 341474 - DNA, 636 bp, Pseudomonas aeruginosa
ttggcggtcggcacctaccacggctccgtgcacaacggcctgctccagccgccggcagcgcgctgggccgaagctatcgcgcggaccggcgtgccaaccgtcatcactcgcaccacggcttttctggtcgattttctgcccatcatccgccgcacgctgacccgcaccggcttcgtcatcgaccacatccattactacgccgatgcgctcaagccgtggatagctcggcgcgaccgcttgcctgcgttcctgatccggcgcgacccgcgcgacatcagccgcatttgggtgctggagccggaggggcagcactatctggaaattccataccgcaccttgtcgcacccggctgtcaccctctgggaacaacgacaggcgctggcgaaattgcggcagcaagggcgcgaacaggtggatgagtcggcgctgtttcgcatgatcggccagatgcgcgaaatcgtgtccaccgcgcagaaagctacgcgcaaggcgcggcgcgacgcggatcgacgccagcatctcaaggcaacggcagttcttttcaaaaccacgccaccaccggacgcggacatggctgacccgcaggcagacaaccagccacctgccaaaccgttcgaccagattgaggagtggtag

SEQ ID NO: 341475 - DNA, 603 bp, Pseudomonas aeruginosa
gtgaaatacgccgtactcggagccaccggcctgctgggacatcacgccgcgcgcgccatcagggccgccggtcacgatctggtgctgatccaccgtccttcttcgcagatccagcgtctcgcctatctggagcccgagtgccgggtcgccgagatgctcgaccacgccggcctggaacgcgccctgcgcggcctcgacggggtgatcttcagcgccggctactatccttcgcggccgcgccgctggcaggaggaagtggccagcgcgctgggccagaccaacccgttctatgccgcctgcctgcaggccagggtgccgcgcatcctctatgtcggttcggcatatgccatgccccgccatccccagggactaccgggccacgaggggttgttctacgacagcctgccgagcggcaagagttcctacgtgctgtgcaaatgggcgctcgacgagcaggcccgggagcaggcgcgcaacggcctgccggtggtgatcgggattcccggcatggtactcggcgaactggacatcggcccgactaccgggcgcgtgatcaccgccatcggcaatggcgagatgacccactacgtcgctacctgctga

SEQ ID NO: 341476 - DNA, 795 bp, Pseudomonas aeruginosa
atggatggcgttactttcaagcaagccggtcagtacgcaatgtgctgtattgagaacctgtcggacgagctcataacggctctacgggacaacctgactagaatttgtcatggcgccgacctgggtagccgcaacatggtcatcttcaaatatgaggccaccctgaagtcgttctgggatcgctactccaccaaggatctcaacacccggactggcatgcttggcgagctacttgcccacgtcataattctcaaaaaactcgacagtttcgatgtggtttctccattcttcaacatggaagaaaagcacattcgaaagggtttcgacctcgttctctacgagtccacttccaatgaagtatggatcacagaggtaaaatcaggaggcgctggtaaaaagacctcgtgcgcggccaccaaggcattactggcgaaggctcgagacgatctcaagggtcgccttgctgaggcagaaatgaaccattggctcaacgccatgaacgccgcccagaaatccattaatgacaaaacccgctacaaagaatctgtgctagaaatcctaggcatggaaggcgaaaaggcatatggaaactctgctgtagcctctgacaacaacgttgttttggtttcagcactcttcaacgatgctactcaaaaagtggaagaagcgaccatttcaggcttcacggacagccttttaactacgccaatatttaaaacagttttggtgctatccatccaaaaaggaacgcttcaaaagcttgaggacttccttcgcacagaggcaggatgctaa

SEQ ID NO: 341477 - DNA, 2481 bp, Pseudomonas aeruginosa
atgcaagagttaaccatcaaggaattggccaagacccgtttcaaagacatctacctggagcttctccgtggaggccagatgtcagatggggatatcgtgaagcttttggcgattgcagtcctgctactcaaccatcaggcgcccgagataaaacgccttggttatcgaatcacgctattctacggaaacctaactggccgatatgaaccgctttatgatgtagctgttaacagcggcctattaccggttactgctgtgattggtaagtcgttcgcacaagacgagcgactcagcaggtctttcattcaaaacattgtgagcagttacgtagacacattccgtgaccagggcatggtgctgacggagcagcaggatacgctgagagtcttcgtccaagatgagtacgagaactcttcggtcgttatcgccccgacctcctacggaaagtccgagctcatcatcaagtcagtaaaagacaacccctctaagcgcattcttattttggtgccatcaaaggcacttctagcgcagacaaagaagcgtttgatctacgcggacatcccaaagctgggtaaggtcgttacccatcctgaaatgttctcgcccgagcgaaataatcgggcttttgtccttacacaagagcgcctaaatcgcttacttaatgaatacagcaccctaaaattcgacatggtttttgtggacgaggctcacaaccttctccaaggcgatagtcgcaatgagctcttggccacaatgctatgcatcctgggggccaggaaccctaagacttcattcaagttcctgacccctttcctttgtaacgaactcaacgtccgagtgcgttacctggacatgacgcccaaaggcttcagggttgatgaatacattaaatccgagcgcttttacactcgggacttcagaactggcaaaaacgacggaaagctcaagctttacgaccatttcctcaaccaatggttagagatagatagaaagtacaagagcggcttcgatctcatcaagggcgagtcgctggccaaaaacattatctatggcaataccaaaaagaaaattgagcagttcgcactcgagctcgctgagacgctgcctaacatcgagtgcccattggttcaaacagcttgcgatgagcttgaagatgcgttcgacaaacgatatcgactgatttcgtgcctgcggaaaggggtgatgtaccaccacggctccatccccgacaccatccgactgtatctggaaaacctgttccaccaatccaaggccatgaagtatctggtttgcaactccactctgcttgaaggggtaaacctccctatcgaacggcttttcgtcttcgattattcgaaaggtcgagggaacctcacctcatcgcaatttaagaacctggttgggcgtgtgaataggttcagtgaggtgtttgcgcccgaagcaggaaccaccctcaaaaagcttgagtcgagcatctacttgctggggatggacggctacacgaacaaaaaatctaacctccagacattttacgagaaagcggtcaacgtctcgaaggttgatcaggacagtgttagtaacgttctccttgaagcgaccaccatattggagggcgaggtggctgaccgccatcgtgacgctgtatcaaggctggagaaccttcagccaggggtagtcactggtcaagaatgcaagtacgtgaagacggaggttggccggttattgatcgccaacagcgtaagcgagatcgatgtcttcacctctgaggaggagatagacgacgccatcagcatgtcggttgatgcgaacggcatgatcgacaacgccgaccgcctgctgctggagatcaagacctgcttcatcgacaagttcgatgacaagcgaaaatacagcgacctgaaacgcctccagaacaaagcgacgattgatttttacgccatgttcctagactggaagctcaaaaagtatagcgttaagcaaatcctgagatacacgcttaaatactggagcgagctccctgagaagaaaggtactgactatgtttacgtgtccaactggggcgatactaaatacggtgacagtcactatgcttactgggtcagaatttcaaccaaaaatgacgtagagaaagtcaacctcgctatcgtccgtctgaaagaagaagacgatttcttcgacaataagatttttaagttcgtagaagttctgaacggtgtaggtgctgttgatcccggcttctacaagcgcatcaagtatggcaccaccgacgatgcaaaaattaagctgatccgagagggctacagtcgcgggctggctgagctgttgctggatcgatacccacggtatgttcgcctcgacaacaatggcgaaatcgaagtcagctcaagggtcatcgggctcatgagggaaaatgaggagagcgatttgctcatctttgaagcccagatgaacctgaaatccactccagaatcagtggcgtaa

SEQ ID NO: 341478 - DNA, 210 bp, Pseudomonas aeruginosa
atgaacctacagctagaacttatgaataaaaacatatccatgctccagacagagataaaatacctgcaaattaaaatgcaagagtccagacacgtaggtgaccaagaaaagcatagccaaatgttagagcagcaaaataatgcagcctactacctcgaacatgcaacaaagacgaagaccaagataattatgaatatccataaaagctag

SEQ ID NO: 341479 - DNA, 1464 bp, Pseudomonas aeruginosa
ttgttaaagccaatcaacaaggaagcaagtgtaaatgaaagcgagaagattcttgccacgattgcttcaaatacattttttagcctatggtgctaccccagcctgtatcggtcgttaggaaaaggaaaagagcttaccgacctcaccgtgtacttcaataacacggttatactattttccgacaaggggcacgttaaattccaagagcagaatgacccaaaacttgcttggagccgatggtacagagccgcagtcaaggaatctgcaaagcaactgcatggagcagaaagttgcattaggaatcacccgaacaaaatcttcctcaacagcaaacttgatgagcgattcccttttgacttgagtaggactgacctcaaaatacacttgatagcggtaacccgaggaataggtaaacatgccaagcagcatttcgacgccataaggcccggcagccgtggctcgctcggctacctttatggagctaatgaagaacagttgctcgacaaacctttcttcgtcggcgatgtagacatgagcaaaaccttcgttcacgtgctagatgaagggggtataaaacttcttctagaagagctttgcacacctgcagactttatccgatacctcgaggttaaagaggatgcaatccgcaacaaagaccttctgatcagcgctggagaagaggaaacacttgcatgctatctccaagaggatggtggcaacgggttcggaaaaatcaccaacccacctcacaacaaaggcaacttcctaatgatacccgaaggagaatgggatcattacaggaaaacggtaatatatgccttgaggtatcaacaaagaaaagaagcaaagctatggaatgaaataatttcccgcttcgcggacgggattgtggatgcacaggtaggcgaagcaagtgacttaccgttcataacgcatgcaaatgctgtgcaggtgttggcgtcggaaaaccttctgtcgagtagtctccttgcaactgccctattcgataaattccatacagtccccagcggaacacgctcagcacgaacgacttactccgtctgtaatccaggccgagtgtacgtcttcgtatttttcccctggagtcataaattcaactcctatgatgaatataggcaggagcgaactgcctacatgcagctatacgcatgtgtagcgcgctacaagttccagaaagcaaaagaaattgtagttcttggagccgacaccaaaggccatcaagggggctctgagacaatttttgctatagatgcatctgttccgcttactggcgatgagcgaacgactgctcaacaaatcatgaaaacctacaacatactagacaacatttctcagagagcaacaccagggaacggggcgaccaagaacgttagccgaaatgctccgtgcccatgtggctctaataagaagtataagaaatgctgcttaaacccagagccataa

SEQ ID NO: 341480 - DNA, 1185 bp, Pseudomonas aeruginosa
atgcttgctgcctttggcgtgcgtgacttcaaggacgcgatccatgaggacgatgtgttttctaggctgggacacatgctgaccggctcgatggccaaggccaacgccagtgagttctccatcggtgaaagcgaggtggagtcagccacctatgaccatgcgaccggtgtgctcgcgttgagcatgtcgatcacctaccaaaagcatcaggatttagaccgcgccttccacagcagtgcatttctcctaaaagcggatgtcgagctgattcgacgcgatggcaaatggtcgctcggtgaagacggcgtttcaatcaccagtaacgattcggatcgtgcagctcactggcacgttctagtaacgaatgaggccaagaacatgtatcaaaaagaccattccccccacgaaaagccaatcgaaaagctcagcgaagatgggaagcggataaaaaacccgaacgagattactgtaaatcaacacgtcatcccccaagcgcatttgaagcaatggctaggtggtgaagacctgctcacagtcgtcgataaatcgagtggcaagcccctgaagcgctcacctaagaactcgtttgttgtttcccgtctttgggatcagcctactgaacagggcatgatcaaaatgaacgaggacaattatcagcagcaactgacgttactcgcagagaccggaagcatcgcccaatccccctggatcacagaatacttcgtgatgctggcagcacgggcctactttgccgccaaagaaaggccgctctacgactccatcatggagccgccgtcctgggcgccgtctcaggctgagcttgaagatgatgaggttgagcaggtgcatgataccgttcgaatcttcaggggcgctggaaatccacatgccacagcccgcacagttgtgagcatggcactcacccaattcttcatcagggcgcgcgagttgctgaaggacgctgtgtgggtgccttttaagacgacgggggagaaatttattctccccgactcgaacgtagccctgtacgaaaagcgcttcatggcactgcccgtgagcccggagcttgtgctgcttgacgagaagctgctcgccaagctccaagaggccggccaacttacaccggagtacctcaacaagcgcttcctggagtcttcggtgcgctactacgttgcccccaagtga

SEQ ID NO: 341481 - DNA, 1188 bp, Pseudomonas aeruginosa
gtgtcagaaaacggcgaggtggaaagagatgatcttgaactgctacgagcagatctctccaagagactgaatggatttaacagtaactatccggacgtcagtgtttatgagctgagaagctcacggctgtctagggaagagtttccggtgcctgagatgctcttgctcatgctccgaaacgtactggggtggcggtggtctggcaccggcgagaagattcgctggactgtttatggctcattcaatggcgagccgctctcgattgaactcggaaagtttggtctcaccatgcgtagctcaccagtcctagatgagagccggaggcggatcgagggccagctgaaaagtgcagtaaacctcgtcgagcaattcatcaaaccgatgatcgataaccagattaccaatggtgagttgaccatcggtaatcatcttactgagttcatgtcacgctatgaatttttccgtgacaaggcggataaagcttttcgacgcgccgaccggaaagctagagagaaacctaaggagagtggcgaatttccagagggcatcatcagtgcccttatgcatggttacagtagaagtatgagtgatcagcaggaaggattctattactcggttgccatggtcgacgcatattttagtgctttagagcacaggttgaacttgcttcgtgcctttacaggagtgcccttacccgctgagggattcaaagccttcatgtccaagacatggaacgagaaagttgacgaattattaggggagaatccatcgccaagggcgcgtaaagccctgcagggtatgcgagatatcaaagagcggattcgcaatccgttcgctcacggcggatatgaaaatgacaaaggggcgctccatgtccacatcccgacaataggagctatccccggaaatattaccaaatttgggaaaagtgctaggttttccttcattcctgtaggtgtcaacgatcataaattaaattgcacggtattcgacgaggtcgataagttgttgtccacggatcagcttgctgccccctaccggcttatggtggctggtatcgacccatcgttcaatgagaaatccttatgttcctacagggacgcgatctcgggtggagataaggctttagaaaggttcatcgaccgctggcatcatatgtgggagcgtcacgccaacatggattactag

SEQ ID NO: 341482 - DNA, 1410 bp, Pseudomonas aeruginosa
atgccgcgcgaaatccgtctcaacgccttcgaaatgaactgtgtcggccaccagtcgcccggcctctgggcgcatccgcgcgaccgctcctcgcagtacaaggacctggagtactggaccgacctggcgcggttgctcgaacgcggccgtttcgacggactgttcatcgccgacgtgctgggcatctacgatgtgctcgacggcaatggcgacgcggcgatccgccaggccgcccaggtaccggtgaacgacccgctggcgctgatcacgccgatggccgcggtgactcgccacctgggcttcggcctgaccgcctcgctgtccttcgagcatccctatcccttcgcccgccgactctcgaccctggaccacctgaccaagggccggatcggctggaacgtagtgacctcctacctggaaagcggcgcgcgcaacctcggtcagcaggcccagctcgaccacgaccgccgctacgactatgccgacgaatacctacaggtgctctacaaactcttcgaaggcagttgggaggacggcgcggtgctccgcgaccgtcgccgaaggatcttcagcgacccgggcaagattcacgagatccgccatgtcggcgagcacttccaggtacccggcatccatctctgcgaaccgtcgccgcagcgcacgccggtgctctaccaggccggcgcgtcgagtcgtggcaagcgcttcgccgccgagcacgccgagtgcgtgttcgtcgccgcgccatcgaagaccgtgctcaagcaggcggtcgccgacatccgccagcgcgtcgccgaggccggccgcgatccgcgcaaggtactggtgttcaacctgcagacggtggtgctgggcgaaaccgacgccaaggccagggccaagttcgacgaataccgcgccttcgtcagctacgaaggggccctggcgctgatctccggctggaccgggatcgacttcggccagtatcggccggaccaggtgctgcggcacatccacaccaatgcgatccaatcggcggtggaagcgttttccagcgccgatccgacgcgcacctggacggtccgcgagctggccgactgggtcggtatcggcggcttcggaccgctgttcgtcggcagcccggcgaccgtcgccgacctgttgcaggagtgggtggaggacaccgacgtggatggcttcaacctggcctatgcgctggcccacgaaaccttcagcgacgtggtcgaattgctggtgccggagttgcagaagcgcggggtgtacaagaccgaatatgcgccgggaaccctgcgcgagaagttgttcggcgacggcccgcggctgccggattcccatccggcggccggctatcgcgacctgcgggccctctgggagaaggaggccgggcgcaacgcgctgccggcctga

SEQ ID NO: 341483 - DNA, 1695 bp, Pseudomonas aeruginosa
atgtctgatctgttgcttgttccccggctcgagcctgccctcacgcgtctgaaacgcatctggccgtgggggcgcaaggcgctgatcgagcaacttcggcagcatgtcgaggaggccgatgagcatacgctgcgcatgcaggcgctgcgtcagcgcatcgaggccgagctggcaggggtcagtgccgagctgggtgcgaccactagtgatcttgagcagttgcaggccctgcacggacagttgcaggcagagcactccgcacaaacgcagcaattgcgtgagcgcacaaacgcttatgcggcactggcgcaagcccataaattgcagcgaggtgagctggagcaactgcagcgcgcgcatgcctctctggaggacgcacatgcacagctgcaagccgcgcatcagcgtcttgaggaggagcatggacaattgcaggccacagctgagttggtcgagcgccgctaccggttggtctgcaatatcctcaacggcaagccagccgaaaatcccgccctgagcgagctcaagagctggtttgcgggtgaattcgcgcgggatgtacaacggcttgagttgccagcggatgttacgagcatggtacttgagcaggcccagtccatcagtctgcatgtggaattgctgagcgactcgcccgcgctgcgtacgaaatccctggtggctgtggcgggtggcttcagcagcggcaagtcatcctttgttaccagcttcatgcacagggagcattcgcaactgttggccaagggcatccagccggtcactgcaattcccacctacgtgatgcctggccgtgaactctccatctacggtcacacgcgtaaaggggcacatgtagcgctgacgaaggacgagtacgctcagttgacgcatgacttcatcgccaacatgggcttcaacgtcaaggaggtcatgccccatgtggtgatcgaggcgccgatgctggaggtccagcacctggccttcatcgatatgccgggttacgaccctgctgcttcagacactgcggacaccgctgccgaccatggcattgccagcgccgttctgagcgaggcggatgccgtgatctggctggttgcgctggataccaacggcaccttgcctgccaacgacctggagttcctgcttcagcatgcggacgacagaccgctgtacgtggtgctcaacaaggctgatctgcgccccatgtcgacccttcaggatgtgatcgaagaaatcagggaccacctggaggacagcggcatccagtacgagggtatctgcgcctacagttccacgctcggcaaggaactgttgcatgagggcaagagcctgagtgaagtcatgcaggaatgggatcattcaaccgatgcggcgctgatgttgtacaaggagtttgagacgatggtccagaccctggatgaatatgcaaaccgacaactgcataaagtcgagaacgtcaacgagttggctcactcgattgagttggatatcttgcagatggtggggtcggaatccaaggttttcagggcggctcaaaatagacttgggcagttgaaagagctggcagagagcattttgggtgtcgagaaaagcgaagcccatcagcggctggaaaatatgcgtatgcgtggtcatcaactcctgcaagacaatttgagagcggattatcggtccccaaggcaggatgcgctggcatag

SEQ ID NO: 341484 - DNA, 2283 bp, Pseudomonas aeruginosa
atgactgttgtaaccgtcaaggaaaacgctgtgtcgctggaacagcgcatcaccaatctcgtcaatggcatggagaagctcgacgacatcgtcgaccgatatcccggtcccggctttaccgatgggctgtacggtgaaaagggcgccccgctcaaagcgaaaatcgtgcgggaggatgcgctggcaatggccagggaggggcgcaacctgcgggtaggcatcatcggtcgggtcaaagcgggcaagtcctcgctgctcaatgcgctgatgttcgccggcaatgatgtgctgcccaaggcggccactcccatgaccgcctcgttgaccatcctgcgctacaccgaccaagacatgccttatgccgaggtggagtatttccgcccggaagacgtgaacgatatgcgccagctggctgaggaatatgactcgcggttcacggtgctcctggccgagaggcagaaggcggctgaggaaagggcggcgcgcccgggcgctcgtaacgtatcgcagccggacccggagcgcctcagcgcgtcggtgaaacgcgaactggacaccgaccccaggctcggcggcgcaaaggatatgtacgcgcgaatttgcgacgcaggtggtttgggcgacaagggaggcaagacggagcgcgttgacggacgcgatcttgcggacctgcaaggcaagctggccaattatgtcgggtcaggtggacggctcacacccttcacgaagtgtctgacgttgtatctgccgataccctccctgcagggcgtggatgtggtggacacccccggggtgaatgacccggtccgctcccgtgaagagcgcaccatggaggagctgcataactgcgatgtggtcttcgtggtcagcccggcagggcagttcctgaacaggcaggatctggatctgatgggtcgtctgacctacaaggatggcgtgcgcgaggtcttcctggtcgccagccaggtcgacggacagctgttcggcagcgaacgcgataagcacgacggtcgcctgcccgatgtcctgcaggggttgcgcagcaccctggccactcaggccagcaacaccctggcggcggagaacgccaccaatcaggggctggatacgctcaagagccaactggcggagcgcctggtagttacctccagcgttgcccacgcactgctaacccagccggaaaccgagtgggatgacactgtgcgccatgtctggtcgctactgcgctcaggttacccggcggagttcacccagttggaaagcgccaggccacatctcgaggccatggccggcattggccagaccaacctaatgttggagcaggttcgcgggcgcaagcaggtcatcaccgaagaaaaggtcaatgcgtttctggagggccaggtcagggccttgcgggaaagtgtggaaggtgctcccggggtcgtatcggccaaccgtgaagccttcctaaagaccaggcccgaggatcttgaagaaaagctcagcgccatgcagtccggtcgtgagagggccattcgggtaaccaacgttgccgttggggatattgcagaggacgcaggggggagcttgcgcagccagataaacagcaaggccgatgagcttttcggcaacgcccagaatgcggcagagcaatccaaagactacgaggtcgagtatacggacccgagtttcggccgtaaggcattgagtttaattacttttggattggttagcgcagagcgcacgtccacaactgtccagaccattgacgcgaccagaattcgcagcgagcttgaggcatttcattcgtccttcagtacccaaatggtcacgattgtcgaccgcactcggcagggactgcgaagtacgatcgagacgggcgttctggcggcgttgcgggagtataaggttgtagaggatcgagatatcgacacctcccgcctggcgcaggcatgccgtgccgctctgcgcgaagtgagtgaatttgatgatccggagttgcctccggtgccatctaggctgatgcaaaatggcaccctgagaggaagcgacgccagccggtttgaaagtgccgccctcgagtatcttcatgagctaaggaaggctgctagccaggaagcccgaaagctaacaagagcttttgaggaacgtctgaaggctgcggatgtgggagcccggctcttcgatcattacgaagagcagctcaacggactccgggcgcagatccaggagaaggaaaagaccctgcagcgctacgatgagctgctggccgagctgaaggagctgcaacgccatgtctga

SEQ ID NO: 341485 - DNA, 1713 bp, Pseudomonas aeruginosa
atgctgaaaactcaaaataatcttctcgattacctgaagaaattggcgcaggtcatcgagaaagcccgtacggctgaggtggaaattaatggtgagcctgcacagattcaggcgtttgcgcaggcggttgccgagcgcgaattgctggtgcccgtggtgggggcattcagcgccggtaagtcttcactgctcaatgccattatgggcagcagtatcctgcccatggatatcaagccggaaacggctattccaaccgagttgcgccacgacacccatgagcgtattgaggcgttttttaccgatgggcgtaccgagcaatatggcgtcgaccagttgccagccctgcaggcccgagcggaacagctcaagttcctgcgcctgcacctcaatcgcccggccttgaaggagctggcgccgctggtgctggtggatatgccaggcttcaactcgccgttggatgcgcacaacaaagccatcgaccgttacatcggtgatggcgtgcactatctgtttgtggtcagtgttgaagaaggcgcactgcaccagcagatcatcagcaacatggaccaagtcaccgtcatggagcgcggcttcaccgtttgcatcaacaaggctgaccttaaacctgccgccgatgtgcagggcatttgcgattacatccgcgaacaacttggggacgagggctttgaggccgaggtatgcgctgtcagcaagaacgacattgcgtcggtcaaggcgatgctgggcagcttcgatcccgagaggattttcggcgcgatcttcgagaattcgctactcggccataaccagtacatgcagggcattctggacaccgcactgaaagggctggaaagcagcaaggaggccaacgcgcggaagatcaaggacatggaagatgccctggttgctctggagcaggagcgtcagcagcagtctgaggccagccagggaggtaacctggagggggctgcggatgacatcttgcgtgcggtgcgcaaccgcctggccggctccgtggatatgttggcccaggctgccctgcgcagtcaggatgagatgactcgcatcatctccaacgaggtgcgcagttgccttacctctgggctcaaaagcgccaccaacagcatgtccgcccggatggtcgccgagttcagccagcacgtcagtggctccctgcgcacggacgtgaatctgtcccagaaccagaacaattggacggacagcttgctgcaaacgctgcaatcgcagttgctgcccggcctgctttccggcctaggtgataaatccggcggcacgggcaccgtgatcaccagcatgatgtccggcatggccgcgatgcgattcatccccaatcccatcctgcaggtcgtggccaccattctgccgagcgtgcttggcgccattttcggcggcatcggtgaagggaagaaacttgagcaggccaaggaggccattcgcacccaagtatttccatcggttgagagccatttgcgtcctcagcttctcgaattcctgctccaggcccaggagcaaatcgtgcagtcggtctccaaggcgtttgatgagcggatcaaggcgcagaaggaggttctggagaagatcaacaaggaagctgaaagcggcaatctggaggcccggataggcgtgctgaaagatgcgctcgccgaagtccgcgccttggccgatacccatctccagaccgtcaagcactaa

SEQ ID NO: 341486 - DNA, 639 bp, Pseudomonas aeruginosa
gtgaccgctaggccgcacctgcaacaggcgcggcatgctctgcaaaaacaagaatcgattaacaacctgcagaagaaccccatgaatgccttcatccgttacatgcttgtcgcaatgctgctcgtcctgtcgcagaaaagcttcgccttgatgtgctggaaatcggacaacaagcaaaccgaagattatgtctacatcgatacgagcatcgctgttccatcggtcctccccaaggacaccgtactctggcggtctccgaactactccatatcgatcacttgcttccaggatcgcgactgggggccagagcaggtctatttctacctgagtccaaccggtcagggcgcgctgggttcggacctggaggtgggcatcaacctgaacggcgaagacctgcgctgctcgacactcgacaagtgccgaaaggagatcggcatgcacttcgatggttgctggacgggacgaggttgcgaaggcagggcgaagaagatgaccgtcaacttcaacttctttctctccaagcgggcaggtcccagtaccggtaaggaaggtcctatcacaggggtaaacgcctacccgattttccagttcgatggcgagagcgctatcaataacatagggggtacaacttccgcatga

SEQ ID NO: 341487 - DNA, 399 bp, Pseudomonas aeruginosa
atgaacgaccgcacactactcgaactggcggcgcgggcggctggaattcctgatgcattgtatttggactgtgtggcacaggatatgtaccacccgagagacggagaagcaggcattgaagtaaaccatcgggacacgcgatggagttgtttggctattgacggcgtatggaacccgcgtgatgacgatggcgacgcgctgaggctggctgtgcgtctgaacatggatatccgctacgaaagctatgactcaggtgtcgccgtcatagtgggcggcgcttgggatggcgcgccggaagcggtacacgaaatattcgaacgtgacggcccgcgtgcaactcggcgagcaatcgtccgcgccgccgccgagatcggcaagtctatgggaggtggggagtga

SEQ ID NO: 341488 - DNA, 213 bp, Pseudomonas aeruginosa; identical to SEQ ID NO: 337056

SEQ ID NO: 341489 - DNA, 324 bp, Pseudomonas aeruginosa
atgaccgacattcgagaagagtttgaagcgtggcatctggccaagcatggctatatcacccggggaaacgaggacctgggcgaaggtgcctatgggcaaggccaatgctcgcagcgctgggaaacctggcaagccagccgcgcggctctgaaggtggagttgccgccgacgatcaccgccgaagaggttgttgagcatttcaacatcgacgatgaaggcatcgacatggccgctggtattgcgcacatggtcaacggcgccatctggtcctgcgcagcgttcatcaagcaagccggaatcgaggtgaagcatggaactgcatga

SEQ ID NO: 341490 - DNA, 270 bp, Pseudomonas aeruginosa
gtgcctgacgaaatttcctatgaatccgaactggccagcaagtgccagggtgccgcccaatgcctcagctacaacggcccgaagcatgaggccgaggcgaagcacgtcctgcatgaggcatcgcacatgctggacagccacgcggttcgcgtacaccagaagcgcgatggcctgctgatcatcaatgcgcgcggcaagtccaggttcatgacttggcgtgagcgtctggcccgctggctgctcaagggtgccctggagattcggccatga

SEQ ID NO: 341491 - DNA, 288 bp, Pseudomonas aeruginosa
atgcctgagctgaagcccatcgcctgggcgacggtctacacccgtgccggaaacgaggatcgcatcgagattggtgatgccaaccctgtgcgggaatgcaatgccgaactctggggctggcagcaccggcgcgttccgctggtggaaatccccgccgaccaggtgctggtgccaatcgagctattgaagcgcttgcaggatcacatcgagtacgacgcgattggatcaccaagtgcatccattgcatccgatcttgccgacgaactccgcgccctcctccaatcctaa

SEQ ID NO: 341492 - DNA, 297 bp, Pseudomonas aeruginosa
atgaagaattcgctttactgggcttacaaccttccgctccaagtttggccgaaccacgaagacatggatgacgaatcaagccccatcactgattaccgaatcctcaactacatgccgcgcaaggaacgcacctgtgaggtgcttctgtcagagctgctcggcgatcaaaccagagaagaattcctcgaaacggcggcgcttcacttagaaaacctagcgaaactctttcgcgaagcgatatccgatccaaacaagtgcatctactaccacgacgatgggatggagaagcatctatga

SEQ ID NO: 341493 - DNA, 378 bp, Pseudomonas aeruginosa
atgtacaagcacgcttcgatttctgatcttctcggaaagaccatcaagcagatcaccggattggaagctggcagcgattctgtcgatttcgaatgtgaagacgactctctgtttcggatgtatcacgtgcaggactgctgtgagagcgtttcgattgacgatatcgagggcgacgcaagcgaccttgttggtcagccgttggtggttgccgaggacgtcagtagcgacgacttcccggcgcctccgggagactacgtagaaagctacacatggaccttctatcgacttgcaactgccaagggattcgtcgtgatccgctggcttggcgagtcgaacggctactactccgaatctgtcgacttctgtcgagttcactga

SEQ ID NO: 341494 - DNA, 495 bp, Pseudomonas aeruginosa
atggatgaagtctggaaagtagttcctgactggcctcagtacgaggtcagcaacatcggcaacgtacggcgcggcggatcagtaaaagccacctacaaagacagaaagggttatttgaaggtgaagctttggaatcatcaggcgagcaagggtgttttggttcatcgcctagtcgcagcagcattcatcggtccaatcggtgaaggtcaggtctgtcgtcacctcaatggcaacagccaggacaacagtgtcgaaaacctgtgttacggcacccgtgccgagaacgaggcagacaaggtcactcatggcaccgcaaccattggcgagaagcatccagcggcaaagctgacggaagtacaggtgtcagagattcgccggcgctacaagccttactcgggagcgaatggccctacagcgctcgccgcggagtttggcgtaacggccgcccttatctctgccatagcgcgccgaaaaatctggaaggacgttgcctaa

SEQ ID NO: 341495 - DNA, 489 bp, Pseudomonas aeruginosa
atgaccaccattcccgattcgattcacccgagtgatcttcctgaaatcggccagaccctcgctgatggaatcttctttgcccgccattggctcaatggcaaggaatacgcctacgtcgatctcagcaaaagcgccgagttcactggagaatggggcgagtatggccaggacgtggacggcgccgtcagctaccgagacggagcttcgaatacggtctccatggctgaagctggaagcccgattgccaagcaagctatggagatcggagaaggcgtattcattccttctgttctagaactggctcttctgttctccgccaagcaagcaggcgagctgtctggtttcgcagatcgctggtactggtcgagctcgcagtgctccacccgcaccgccttcaccacgcccttcgtcgacggcgccacaaacgaccttgacaagctcaacgccttccgtgtccgccccgtccgcaagattccgatcacggcgtga

SEQ ID NO: 341496 - DNA, 264 bp, Pseudomonas aeruginosa
atgaagatcaacgaagacgaatgtcgcgccgcgggtctcgaccggaaagaggtccgccgaatcgctgccggcatcagtctatacgcccggcaagcggaagcgctgggtctgaccgttttcgggggcggcgcgggcgaccttcgtacccggagctgcaaccgccgggcaggctacatcgtggccactctcgatggttctttcgacggcggtgacggcgcccacgagtacgacgagaacggcctcctgcgcggcgagagctgctga

SEQ ID NO: 341497 - DNA, 747 bp, Pseudomonas aeruginosa
atgagttacagagagagcattcgcaagtccgtgcgctttgaggtgttcaagcgcgacaacttcacttgccagtactgcggcgccaaggcgcctgacgtggtcctgcatgtcgatcacatcaacccggtgagcaagggcggcgacaacgagatcatcaacctggtgaccgcctgcctgccctgcaatctcggcaagtcggatcgcctgctgtcggacacctcaatgctggatcgtcagcgggcccagttggaagacctgaacgagcgccgcgagcagctggaaatgatgctggcctggcgcgatgagctccagtctttcggtgaagagaccgtacagctgattgccgatcgcatcaccgcgcgcatggtcggccactcggtcaacgagcacggcaagacggtaatccgcaaatggatcaagaagttctccgtcgaggagatcctggacgccctggacatcgccgccgacaagctcagcactgcgcccgatcaggaggaagtgctggagtgcttcgatgccattcctcgcatttgcgtcacccggcgccttcccgaagcaaagcagaaaatgctctacgccagaggaatcctgcgccgccggatttatgtcaacgaagctcacgtcatgccgctgatggccaaggccatcgaggcgggtctcgaggtggaagagctgatcgaatttgcgaaacaagtgaagaactggaccgaattccgggcagagatggaggaaatcgcaaatggctag

SEQ ID NO: 341498 - DNA, 849 bp, Pseudomonas aeruginosa
atggctagggcccgcaacatcaaacccggaatcatggcaaacgaagacctagcagagctagatcctctcgctcgcctgctgttcatctacctctggatgttggtcgatcgggaagggcgccttgaggatcgcccgaaacggatcaaggccgaggcacttccctacgacaacgtagacgctgacttgatgctggatgatctggccaaggcagggttcatccatcgctatgaggctgccggggtcaagctgattcaggttcttaactttgccaagcatcagacacctcatgtccgtgagcaggccagttctctcccgggcgttgacgcagaacacccaaagagagaacaaggcacaaccaaggaagtgcctggtcacaaccaaggctgtgctgagcaatcgccaagatcgcctgattctctgattccggattctctgattccagaggaagagcatgtcgacgctgacgcctcgacccattccgctccgcagcaagcagcagagcaagagcctggctccggccagaccgcacagctgttccagattgatcgcatcccttacgagaagatccgcgacctgtacaaccagatcctcggtggaaagctcaagcgctgcatgggagtgacggaggctcaccggaagcacatccgcgccgcgtacaacctcaagctcgatggcgggttcccggtccgtgacggtggactgtcgttttgggaagggctgttcaacgacgttctggattgccccttcatgctgggcaacaacaaccgggggtggcgcgcagacttcgagttcctgacaaccgccagcaagatccagcgcttcatggagggcaagtacgatgccgcatga

SEQ ID NO: 341499 - DNA, 216 bp, Pseudomonas aeruginosa
atggccgttttcgaactcctgcgcatggaaggcctgcgcacctacggtcggcaagttgaggccagtacatggcgcgaagccgagcagcaatgccgcgacggcgagatcgtaaacggcgaactgatcggtgtgtacgactgcgatcctgttaccgaggcggtctgcactgcgcgcaatgacgtgatgattgagagtctgggggtgtgctgtgggtag

SEQ ID NO: 341500 - DNA, 726 bp, Pseudomonas aeruginosa
atggataaaccaatgatccagcttgttcattcttctggtgaggcgcgcgtcgatagtcgcgtgatcgctgagcagcttggggtaaagcacaagaacacccttgctctagttgagaagcattccaagcatttccagaggttcggggttgttccgtttcaaacggataaacctctgagaggcacggcgggagggcgtccagagcgcttttcgctgctaaacgaggatcaggcctatttcctgctttccttgaccaagaacacagcccgcgttgtcgaactgaaggccaatctggtgatggccttccgcgacgcccgtaatcaagccggcctggacagcgtgatgggtatgatcctgctgacggctcctgctccatgggagaagcgcttcggcgatgactactaccgtgctctggccaggatcaccggcaccgttttcgaaggtcatgccaagggaacgccggctatctatggccagatcaccgaccgctggatttacgccgccatcctgccgaaggaggtgcatgccgagctaaaggctcgccgcggtgaaagcgaaaggatgcaccagtggctgaccgatggaggccgtgatcggctcgaccagcaaatccgcatggtcacgctgatcgcggatagttcgattgaccgcaaagacttcgaagctaggtgcatgcaggcattcgggctgccgggccagctccgcctgatctatccgcaagccgcctaa

SEQ ID NO: 341501 - DNA, 396 bp, Pseudomonas aeruginosa
atgtgcaacggcctggaggtgcgggtgccctacaccgaccatgagctggtggagtacgtctacaacgtgccctggtcgatcaagagccgggacggcgaggagaagtggctgctcaagcgggcctgcgccgactatgtcccggaagccgtgctcaagcgccgcaagagcccttatccgacttctgccaacctcggctacgagcgtttcctgcgcgggagcgtgcggcgtctgctggaggacgcggcgaacccggtgttcggcatcgtttcgcgagagttcctggccgccgaactggagcatccggaggggtacttcaacacccaggtgagccgccacaacctggagaccgcgctggcgctggaaggctggctcaggttgtacgggctctccgcctga

SEQ ID NO: 341502 - DNA, 684 bp, Pseudomonas aeruginosa
ttggcagagtgtttcgggccgaaacaccaaacgcaccggcggcgccgaggccaggtcctggcggagtgttgccagtggcaacacccaactcgccgccggcgccgaggtcgatccttggcagagtgtttcgggccgaaacaccaaacgcaccggcggcgccgaggccaggtcctggcggagtgttgtcagtggcaacacccaactcgccgccggcgccgaggtcgatccttggcagagtgtttcgggccgaaacaccaaacgcaccggcggcgccgaggccaggtcctggcggagtgttgccagtggcaacacccaactcgccgccggcgccgaggtcgatccttggcagagtgtttcgggccgaaacaccaaacgcaccggcggcgccgaggccaggtcctggcggagtgttgtcagtggcaacacccaactcgccgccggcgccgaggtcgatccttggcagagtgtttcgggccgaatcacccagctcaccgccggcggcgccccaagggaaaatcaccttgctcgacagtgagtatttcatggctcatcaccccgctcggatggcacgctcaatccgtgcctgggccgaatgaggtccttgagccggctgaggacctcgctccctgtccgggtgtctccctttggctgaatctgaggctgtgtaggcgtcgtggggcttga

SEQ ID NO: 341503 - DNA, 2394 bp, Pseudomonas aeruginosa
atgctcgaccccgccttcatatcaggtgtgctagggctggagctgaccgaagagcaaagcaagctcaatttcctcttcatccatgctctacgggcatgggctgcggggacgccattgaagaaggggctaccagtggggctacctgcctcggctgtagtggccaatgtggcattgatcgagcttgatcgtgtcatcgaacagcaagtggccccgatttactacgggcgctacgtcgatgacattctgttggtcatggaaaacggcgctaactttcgctcctcggtcgagctatgggaatggctatttgctcgtgcggaaggaaagctgggctgggtagagcagcaaaaccatcagcagattcgctttcagcccgcatacctaaaacacggcgatagcgaaagtcagatccacttcgccaacagcaaaaataaggttttcctcctcgccgatgcccctggccagacgctggtcgatgctatcgcacaccagattcatcagcgcgctagtgaatggcgagccatgccgcggttgccgcgatccgcaaaccatgtagggacggatttgcttgctgcaactcaaagcgatggtgaagccgccgacaatctgcgcaaagcagatgcgctaaccatgcggcgcgcagggtttgccatcaagctgcgcgactttgaagcctatgaacgggacctgcaaccagaggcttggagtgagcatcgccgggccttcttccaagcctatatccaacatgtcctggtgctaccgcagttttttgatctagccgtataccttcctcgcgtgattcgcctggcgactgcctgcgaagacttcgctgatttgcgaaaaaccatcaacgccctggaaaagctttgcaggcaagtaaacgattactgtacgaccactatcaaggcgagtccgcctggtaatgccatcccccacagcgaggtaattaccagttggcaaaatcaattgttcgccagcattcgcgagagcatcaccgcggcttttccaccccaactatccaaggcaggcaagcaagcctgggatgagcacatggctgactgcctcccaatgacagatgttgatactgctctgtcttggccgctttcagctaaaggctttcaaaaagagcaggggcgcttgttctcgttcgatctagcgcacttgccgttccgtttcatcggccttcctaaggagatggttgcccagcgaggtattccagccaaaaagagtgttgtcacttgcgctgatgcaactgctctgctgccgagcaatgtgattgaaggaaatcaggtgcttgccaagtggatcaatctaaagggattaccctacgggctcctttttgccacacgaccttttaacctccctgagctgtttgtcctgaacaaagatgcgtacgctacatctggacgaacctctatgcgggcagtagtgcttgctgtgcgaggtttcgaactcggtgaaaaagcgccgagtttcgacaatcacggtgtacttcaaattccggacggagcctcaccgcgcaggtacgggattgcggtctccagttggaagacacgcatcgagagttggactgctgctgttacgcgccggccagatcctgatgccgaccgctatgcccgcctttgccggctactggatgtcgcaatttcccagccacagcagagccgatacttcgtcctgccagaacttgcactgcctgcccactggtttatccgaattgcgcgcaagctccaaggccgagggatctcactgattaccggtattgaatacctgcatgctggtaaagcgagggtacgcaaccaagtgtgggctgccctgccacatgatggtttgggttttccttcgctgatgatctatcgtcaggacaagcagcgccctgccttacatgaagagcaagagcttcaacgcctcgcagggttggagctcaagccagacagaccgtggaaaacgcctccaatcattcagcacggagatctgcgcttcgccctgctgatttgtagtgaactgaccaatatcagctaccgcgccgccttacggggcgcggtagatgtccttttcgtgccggaatggaaccaggacaccgaaacctttaactccctggtcgagtcggcagcgctagacattcacgcctacatcatccaatgcaatgatcggcaatatggtgacagccgcatccgagcccccttcaaagacagctggaaacgcgatgttctgcgagtcaaaggcggcattaccgattattgcgtaattggcgaaatcgatgtgcaggccttgcgacagttccagagcagctaccgctcacccagtaccctctttaaaccagtgcctgatggttttgaaattaactttgaccgcaaagtattacccattggtggagctgagccatcaaatacgtag

SEQ ID NO: 341504 - DNA, 879 bp, Pseudomonas aeruginosa
gtgatttggatcgacctcaagaataaatatcctactactgctatcccgaactgggatccaaaggctacagctcagcaatggattccttggacgcaggagaggtgggatgcatggttagctaggtccaaacagttggttgcccaattggcggcgcttgacgctgcaggtcaacgtgaagagcgaaacgcgttgatagatgccaatagtgggcattggggagagctgaaagattggttattagcattatcggctggtaaatgttggttttcggaagttcgtgagctgtattcgcactatgatgttgagcactttcgaccaaagaaagaagctaaggctttagattccgctgtacgtgatgggtactggtggctggcttttgattacatgaattttcgtgcttgcggcaatgtaggtaaccgcaagaaagggggctggtttccgcttaaagatggatctctgtgctcgacatttgctgaccaatgtgaggagtcggagacacgttatctgcttgatcctgttgacgatgacgatgtggatttgattgccttcgatgaggaaggaaaagtcatccctatgcctggtacatctgagtgggatcaacagcgtgttcaacaaactgttactcgactgaagctcaatgatcatgtgcctttagctgaggagagacggaaggtttggcaaaaagttgacggccttattgaggatttcaaggctgctaaagcgcgttgtgggggtaataacccagcggctaaggccaagcttttggaggtgcgcagtaacattcgagaaatgacaagtcggactgctgagctatcggctgttgctcgttggtgcgtactttttcggaacgatccgcttttatccaagctagtaagctag

SEQ ID NO: 341505 - DNA, 1752 bp, Pseudomonas aeruginosa
atgcagctactccgtatcagcattcctgcctttcgcaatctgcgtgatctcgacatcagcttcgcgacgcacttgctgcccggcgagggtgcgcctgcggatgtacaacccaaacagattcgcagccatgccctgatcggccagaacggtaccggcaagtccaaccttatcgaagcgctgatcaccatcttccgtgatgtcgatttggatcgcgaagcagctttcgattacacactggaatacagcattcggggctacgcggtgcgcatcgaggccgacactgccaagcaaaagcgcccctatgtgtgggtggatggaaaggccgaatcgcaacgctatctgctgaaaaaccgcgagctgctgccggcgcacatttttgcctattactccggccgcaacgagcgcatcgaggcgctgtttcaagagcatcagcgccgcttcaacctgcgccaggaaatcaccacagacgaagtgctacctgagcagctgctggaaaactttaccggcaccgaggcagatatcctcgcggtggaagacgccaaacgccggcgggagacgcggctgagacaagcgggcgacgaccgccttcgccgtctgttctactgccgtggtgggcatagtcagctggtgctgttggcctgtttattgtccgatgacccagtgtttcagaaggtgctgaagaacctgcacattgagtcactggaatccgcgctattcgtactcaaggagccgcaccgtctgcgcgaaaagcgccggggtggcaagttcgacgaacaggagctgaatgagggcgatccgcgcttttggtatgcacgcggcaatgtggtcagcgagtttcttgacaagctctggcaagtgtcctgggcgcctattgagcaggaggcgaccaagcagatcgacttccgtggccgcaccgaaaaacaaaagcagctctatctgttcgtgccgagccaggagaagctcaagcagctgggcgagctggtcggcagcaccgacagcttcttccgctatgccgagggagcctacattggcgacctgatcgacgaggtgcggatcacggtcaaaaaacgcgatgagcatggtggtaaggtgagctttacgcatctttcagaaggcgagctgcagatgctcaccgtgcttggcctgatgcgaattacccgcgaagaccactgtctgttcctgcttgatgagccggacactcacctgaatcctatttggaagctgcgctacttcgatgacatcgaaggtgtgctgacctctgaagacggcacgctagtgcaaggtgattcgcaaatcctcatcaccacccacgacccgatgatggtgggcagccttaaacgcgagcaggtacatatcctgaggcgcaacggtagtcgaacagtagtggatatacccgatatgcacccacaaggcatgggggtgactgggctcctcaagagcgagctgttcggcctgtcgtccaccctggatatcgaaaccgagcgacgcctcttccgtcgcaacgagctgtttgtaaagcagccgcgcacgccagtagaagatgccgagctctcacggctttccgccgagctggccgatttggggttttccaccgccgattttcgcgatcccgattacgcgctcttcgtgcgcaagatggcgcagcaccgccgtttcaggaaaccagcgctaacgccggaagagcaagctgaacaggatgcaattgccgactcaataattgacgaaattctgcgtgaggaggccgctgagtga

SEQ ID NO: 341506 - DNA, 1977 bp, Pseudomonas aeruginosa
atggacgcgcagcggtttttggcagagtttgggcatattgccaatgcaccggggggcattagcaagttgcgggagttagttctccagcttgcaattttcgggaaacttactgagcgcgttgcagatgacactagtgcgcttgagttgatagaagccaacaagattagtcaggagagtttggtcgcacaaaagctgctaaagcggcgactcgctccaaaacctgtcattgagagcgatcatccttggatgctgccggcgggttgggcttggacgcgcttgggtgcagttaccaactatggagatgctcctaaaatcgagtttgaggacgtgaaggaagacacctgggtgctcgagcttgaggatattgagaaaggcacctcaaggcttattgccaaagtcctcgcgcgcaaaagaagatttaagagcacgaagaatggatttcctgcaggtgcagtgctttacgggaagcttcgcccttatctcgacaaggtcctagtcgccgattcacccggagtatgttccacggaaataagcccgatctcattctttgagaatattgatgcaggttatttgcgctggtatttgaagtcgccttactttattacctatgcggatagttcaacttatggcatgaatcttccgcgactcggaacggactctgctcgcgaagcgctatttgcttttcctccccaaaaagagcaatccctcatcgtagccaaagtcgacgagctgatggctttgtgcgacaagctggaggcacaacagcaagcccgccgcaaactgcaaaacgtactgcggcagtccaccctgcaagccgttgccagcgccactagcccgcacgaactaaaagctacctgggcacgcttatccgagaacttcggacggctgtttcatacgccggaggatgtagatgacgttgtcgctgagctgaaaaatctagcagtccgcggtctgcttgcggaggcctctgaggccccacctgaccttgatgcaatcaaagcggattgctcgcgattgcgggctcagtacattacaggcggtctgatacgtcgccaaaagcttgttggcatggctgagtgcgaagagatctaccccgatcattgggcggtcaccgctttcgatgaagtggcggtcgttattggcggcgttaccaaggggcgcgatcttcgtggcaagcaggtaatggtatgcccgtacttagccgtggccaatgttcagcgcgggcatttcaaactcgaaggtttgaagtcgatagagattgccgctgatgagctagcgaagtaccaggttcacgaaggcgatctcttgatcacagaaggtggagattgggacaaggtcggccgcaccgcaatttggcgtggcggtatagaaaactgtctgcatcaaaatcatgtgtttaaggcccgagtccccagcgggcagttgcttaatgagtgggttgaattggttttcaactccggcattggacgagattattttgccggggcctccaagcagacgacgaatcttgcatctatcaacatgacgcaggttcgcagttttgcgctcccgatcccgccactggacgagcagcagcgaattctttctgtgctctccgaactgaccactcattgcaacaaatggcgtcgccagttggagcggaagcaggcgatgtcagcgctccttgctggtgccgttgtttctagtttcaccggtatcaccatcgaacaagaagaggaacctatgaaagccccgcaaaccgaattgatcgctcctctgcgcttgggaacagcgcctgatatcaaagctcaagcaccgctggccactaccctggcccgccacaatggcgagatgagcgcgaaagatttgtggcagcgctttggtggtgaaatcgatgccttttacgcgcaactgaaaactgaagtggcccgcggttggattctggagccgacccccgccgaaatgcgtgaaaagccagccgacacggtgagcgcctga

SEQ ID NO: 341507 - DNA, 1779 bp, Pseudomonas aeruginosa
atgaacctcagcagtaccattaaatccatccaggacatcatgcgtaaggatgacggcgttgatggcgacgcccagcgcttgggccaactcacctggatgctcttcctcaaagtgttcgaccagcgtgaagaagaatgggaagacgacaaggctgattaccagtcccccttgcctgagcgattccgctggcgtaactgggcaaaatatctccctgatgctgatggcaagaaaaagccgcagatcgcgggcagcgagttaatcggcttcgtcaacaatgagctgtttcctgcactcaaagatcagatagacgccgaccgcagcccccagcacaaggtcatccgtgaagttttccgcgatgccaacaactacatgaaatccggctcgcagatgctcgccgtgatcgaaaagttggacgaggccatcaacttccatgatttcaaaacccgcgccaacctgggtgacgtctacgagcagatgcttaacgacctgcgcggcgctggaaacgcgggtgagttctacaccccgcgtgcaattactgccttcatggccgaccgcgtcaatccgcgtctggacaagcgcgaaactgtgatggacccggcctgcggtaccggcggctttttgaccgccgccatcgaccacttccgcaatcagctcagcatcaaatccagtgccgaagacaaacgcgccattgaagacctaatacacggcatcgaaaaaaagcagctaccccacctgctttgcaccactaatatgctgctgcacggcatcgatgtgcccagccagatcgagcacaaaaacacgctgggcataggttggaacgaatggagtgccaacgacaaggttgattgcatcatcaccaacccgccttttggtggttatgaggatgatggcgtcggtagcgactacccggctgaccttcgcacccgtgagaccgccgacatgttcatggcgctcatcatcaaaaaactattgaaagagaacggccgcgctgccgtggtgctgcccgatggttttttgtttggcgatggcatcaaaggcacgctgaaaaaactgctgctgcgtgactgcaagctgcacaccatcatccgtcttcccaagggggtgttcgctccgtacaccaccatcaagaccaacctgctgttcttcaccaagggcagcgccgtggatgatggtaccgagcactttcacaccgacaccatctggttctacgagcacccctatccgccgggctacaagagctattccaaaaccaaacccatccggctggaagaattcaaacccgagcgggactggtggggcagtgaggccaacgactttgccgaccgcgtggaaaacgaattcgcctggaaggtggatttcaaaaccaaacgcgaacaagccgaagccgccgcgcagccacactggctgcgtgccgaaatgctgaatacccaagccgccgtgttggaaggtgaggcccgtgatctacgcaacagcctggttggcagcaccgacgccgcctatcgcgaaaagatcgaggcgcagattgccgaactgcgcagtcaggccgagccgttgcgcctgcaagcacgtgatgcgcaagcagcgggagaccgcctgtactggccgatcttcaatctcgacctgaaaaatcccaacgcgccggaagaagaaactcacgacccggacttgttgctggagaagtacaaaaaactgttgggcgaaattgaagaaaccgaaaaccagctcaagagcgaactggccgccgcgctagcacatcacttcgtcggcgaggacgcctga

SEQ ID NO: 341508 - DNA, 2436 bp, Pseudomonas aeruginosa
atggacggggcgcagtattctgagcgcgacatctgcacgaagctcataactccggccatacaaaaagcaggctggctgcagcatcagtttcgtgaggaagtaagtctcactgacggtcgtgtaatcgtgcgagggaagctggcgacccgagtaaagaatcctgacgccaaaggtggccctaaacgtgcggactttgttctctatgcccgtccgaacctacctattgcggtgattgaggccaagcaagccaggttttccgttgggcatggaatgcagcaggctctggcttatgcggagatgttggatgctccatttgctattagtagcaatggtgaaggattcctctttcatgaccgcactggcttaacgcagcctatcgagcgtgagctctcgctcaccgagttcccatcactagacgatctgtggccgctttaccagcaatggaaggggctcgtcacagacactgtggtcaaactcgtcgagcagcctttttactccgacggaagcggcaaggagccgcgctattaccagcgcgtcgccatcaaccgttccatcgaggccatcgccaaaggccagcagcgggtgttgttggtcatggccaccggcaccggcaaaacctacacggcattccagatcatttggcggctgtggaaggctaaggccaagaagcgcattctgtttttggccgaccgcaacatccttgtcgaccagactatgcagcaggatttcgccccttttggtgaggtgatgcacaaggtcactaatcgcgaggtcaagaagaactacgaaatctatctggcgctctatcaggctgtaactgggcgtgaggagtggaaacagatctatcgtcagttcccggccgatttcttcgatctggtggtcatcgatgaatgccatcgcggaagtgctgctgatgactctgcctggcgggacgtgctcgactacttcagcagtgctacccacctgggtctgaccgccacacccaaggaaacgaaggaagtcagcaacatcacctactttggtgaccctgtttatacgtattcgctcaagcagggcatcgaggatggtttcctcgcgccttataaggtcatccgcattgctaccgatgccgacgccgtgggctacacccccgagaagggcaaggtcgacaagctcggccaaacggtggaacagcgccaatacaacaccaaggatttcgaccgcaatctggtgctagaaaagcgcactaggctcgtggccagcaaagtgtgggaatacctcaaagctactgacccaatggctaaaaccatcgtgttttgcgacgatcaggatcacgccgagcggatgcggcaagagctggtcaagctcatacccgctgctgctagcaaccgtcgttacgtgatgcgcatcactggtgacgacaacgaaggcaaggctcagctttcctacttcatcgacaacgacgagctttacccggtcatcgccaccacctccaagctgctcaccaccggagtggatgccaaaacctgcaagctcatcgtgctggaccagaacatcaactcgatgaccgagttcaagcagatcatcggtcgcggcacccgcctgcgcgaggactaccagaagctctacttcaccatcatggatttcaagggcgccacgcgtttgtttgctgaccctgatttcgacggcgagcccgtgatgatctacgagcccaaacctgaagagccggtagtgccgccagaaaccatcgaggcactggcaataggcgagcaggagctgccaccctatgtccccgatgccactggcggcgctgaagtcttccctagtggcaataccggtggaacgagcggcgaaggtcgcgttaagtatgtgatcgacgatgtgagcgtgcgtgtcgcggtagagcgttcgcaatacctcgacgccgacggcaaactcatcaccgaggattaccgcgttctgctcaaggacgatatcaggaaagcactgcaggctgagttcggcacgctcaccgatttcctgcgccgctggaacagtgctgagcgcaagcaagctgtgcttaaagaactggccgatcacggcgttccactcgaaatcctgcagcaaaccgtgaccaacggtagcgagctggatgtattcgatctggtcgcccacgtggctttcgaccagaagccgctcacccgccgcgagcgcgccaacaacgtcaagaggcgtgatgtgttcggcaagtacggcgagcaggcccgcgccgtgctcgaagccctgctggataaatttgccgatcacggcgtgcaggacatcgaagacgccaaggtgctggagctaccgccgtttgaccagttcggcagcaaaactcagatacgccgcggcatcttcggcagcgtcgagcaatacacgcaggccgtgcaagagcttgaacaagcgctctacgaccagaacgaactgaaacaagcctga

SEQ ID NO: 341509 - DNA, 1179 bp, Pseudomonas aeruginosa
ttgaggccatctggtcctgcggtctcgctcagactagctcccaggctcgacccacaacgcgccaaacctgatggttatgacgccgcgtccgctgacgagagaatcgccgaagaagcaaaggcttgttcggtggagcatttcgacgggaacctgattcttctatcgcatgacggaatgccactgcgagcggcgaagctaatgggagtccagatatgccccattccagaagcctggctgttgccgccagaacctagcgaccaggaccgcgtcattcaaaagctcagcgagcgtgtagcggcattggaaaggcaagcaccggtcatagttctccgtctcgaagcccctaatgaaaccctaatttccgggaaagtgactttctatccgccgctcgaaaatgccttcatcaatggcgtcatggaggccatcaggaacgaatttcccgtacggccacccaatggcggctcacgccctttcgacaacatcttccgcggtttggaaccggcgcgatcagagtcagaaatgcgtgagcacgagtccaaatacaacgagtggctgaaagaggttgaggacgtactgaagagattgccatgctgccacaaccttgcaaacgagggcatcgaggcgcatctaattctgtcaaatagcggctctacgccagcggagcatctagttgtcgacgtatccacagcaggtcggatccgactcaaagaaccagtggaggacgaggacgaggacgagggcgagggcgaggacgaaattccaacgatccctcagccgcccaaggtccgccgcctcatgatgttcgaaggcctgattggttctacacgccccctatatcaagaccctctaagaaacttccattttgctacgccacgaccttcccgagatcgccatgagttctattgggagtttgacgagccggaatcgcacaccaagcattgccgcggagaatgcgaggacttcagacatggtctaaaagacgagcgaattcgattgattgtgcgatgggaatcgccaagcgaacatccaataactgccgctatcaaggtggtgatatccgcaagaaatctgcccgctccgattgaaaagacgattccagttcgcttggatgtggaagttggtgactccggtgacctcatcaggtcaatcatcctggaagaccttggtgtgtccatctaa

SEQ ID NO: 341510 - DNA, 1497 bp, Pseudomonas aeruginosa
atgtccaatgacaacgaagtacctggttccatggttattgtcgcacaaggtccagacgatcaatacgcatacgaggttccccctatcgatagcgcggccgttgccgggaatatgtttggcgacttaattcaaagagacatatatctacagaaaaacatttattatccagtccgatctatttttgaacaaggaacaaaagaaaagaaggagatcaacaagaaagtatctgttcaagtcgatggcttgctaaagcagatcactcaaggaaaaagggaggccacaaggcaagagcgagtcgatgtcatgtcggcagtcctgcacaagatggaatctgatcttgaaggatacaaaaagacctttaccaaaggcccattcattgactacgaaaagcagtcaagcctctccatctatgaggcctgggtcaagatctgggagaagaactcttgggaagaaagaaagaagtacccttttcagcagcttgttagagatgaactggagcgggcggttgcctactacaaacaagattcactctctgaagcggtaaaagtgctaagacaggagctcaacaagcaaaaagcgctaaaggaaaaagaggacctctctcaactggagcgggactacagaacccgaaaggcgaatctcgagatgaaagtacaatccgagcttgatcaagcgggaagtgctttgcctccattggtcagtccaacgccagagcaatggcttgaacgtgccacaagactggttacgcaagcaattgctgataaaaagcagctgcagaccacaaacaatactcttatcaagaattccccaacccctctagaaaagcagaaagccatctacaatggtgagctacttgtggatgagatagccagtctacaggcccgcttagttaagctgaacgccgaaacgacacgacgcaggacagaagcagaacgcaaagcggccgaggaacaagcgttgcaatatgctattaaatttactgccgacttttataaggaagtaactgagaaatttggcgcacgaacatcggagatggcgcgccaactggccgaaggcgccagggggaaaaatatcaggagttcggcggaagcaatcaagtcgtttgaaaagcacaaggatgcgttaaataaaaaacttagccttaaagataggcaagccattgccaaagcctttgattctctagacaagcagatgatggcgaagagccttgagaaatttagcaaaggctttggagttgtaggcaaagctattgacgccgccagcctgtaccaagagttcaagatatctacggaaaccggggactggaaaccattctttgtaaaaattgaaacactaactgctggtgcggccgccagttggcttgtgggtattgcatttgccacggcaacagccactcctataggcattctggggttcgcactggtaatggcagttaccggggcgatgattgacgaagaccttctagaaaaagcaaacaatcttgtaatatccatttaa

SEQ ID NO: 341511 - DNA, 732 bp, Pseudomonas aeruginosa
atgactgtgcttcgccgccttgaccacgaagttgccgggcatgcccagctcgatgttgccgcccttgagggtcaggtaggcgccgccgcacatcagggtgatgtgctccttcgcggtgaccagcacgtgctgctggctggcgctgacctccacgctctgctcggcctccaggcggatgtcgttcttctgcgcctgcagcagcatcggcccctggtgggtgatctggcgcagctcgccgccttgggcgaacaggccgatgtcgctgccggcgttgatcaccaccttctgcccggcggtcacctgctggttctgccgggccacgctgtcgacgtgctcgccggcggccagggtcaggctcgccggcgtcgccgcggcgatccctgccggaccgctcaaggcgatcgccggcttgcctccgttgctcttgccggactcgtcgttggcaccgtggccgaggtcgcgcacggcttcctggagggtttgctgcggcgccgcgtcgtgccccacgccctggtgctccccggcgtagtcgcccagctcgcgggccagctccagcgccgcctccagcacctgcaccacgacgcctcggtcgagatggccggcgccggccctgagctgctcctcggtgctcagcagcagccccttggccgcacgcaccgcgccatgttcgtcggtgcgcagttcgaagccctcgccgcgcggcttgccgccttcgggccgaggatgggttag

SEQ ID NO: 341512 - DNA, 855 bp, Pseudomonas aeruginosa
gtggctaagactgcgctccggctgcaaggcctccaccagttgctcgaacggcaggtcctggtgcgcctgggcctccagcgcgcgttggcgggcctgtgccagcagctcgtcgaagcccatccgaccgtccaggtcggccttgagcacctgggtgttgacgaagaagccgatcagccgctcggtctccacgcggttgcgattggcgatcggcacgccgacacggatatccgcctgcccgctgtagcgatacagcagcgcctggaacgaagccagcaacagggcgaaggcagtaaccccctcctgctgggccacgcgcctgagcgcctgggacagatcaatatccagttccaggatgaactgggcaccacgatggctttgccgaaccgggcgcggccggtcgaacggcaactccagcaccggctgctcgccgcccagcaggccggtccagtacgccaactggcgctccttttctcctgcctccatccagctgcgctgccacagggcgtagtccgcgtactggatcggcaaagccggcagcgctacctcgagccctcgactataggcggcatagagctggaccagttcctcgaccatcacctgcatcgaccaaccgtcggacacgatgtgatgctggaccagcaccagcacatggtcgtcctcggccagccgcaacaggctcacccgcagcagcggcccacgctccaggtcgaacggccgcgcgatcgtcgtctcgacctgccgagcgagggcgccctcctcgagcggccccaacgcgacgatatccaacggcaatgccatggatgcggcgatctcctggcgcgcctcgtcgccgtcgaggcgaaaacgggtgcgtag

SEQ ID NO: 341513 - DNA, 1143 bp, Pseudomonas aeruginosa
atggtcatcgtttgctgcgtttttacacggtctgcgccgttcgcggacgccatcaagctggtcgagagccccgacctggtgaaggtcctggatgccgaagacatcgaggcctcggactcggtccagggcagcaaggccgacctcgaggacgaccagcgagacattctgggcgagatggagatcgtcgcccgcctgatgatcaccggcggcgaggaaaaggaagacgcgcgcctgacccgtgccgatcgcagcgccatccgccaggcgatcctggcggcggccaggacctgcgctgccgcgaaccgcacggtgctgacccaggacgtgcgcgatgcgctctacgaggcctccaggagcgatggctccgcgccagaacggcgcgcgcgcctggccgaaatggcggaagccatgcagatgttctgcatgggtgccgacggcgagatgttcaatcgcgaaggcacgccctggcctgaagccgacctcaccgtggtggatttcgcgacttacgcgcgcgaaggctacgccgcccagctcgggatcgcctacatctcgctgctgaacaccgtgaacaacatcgccgaacgcgaccagttcaagggccggccaatcgtcaagatcaccgatgaggggcacatcatcaccaagcacccgctgctgctgccctacgccatgaagatcaccaagatgtggcggaaactgggcgcctggttctggctcgccacccagaacatcgacgacatcccggcctccggggctccgatgctgaacatgatcgagtggtggttgtgcctgaacatgccccccgacgaggtagagaagatctccaggttccgcgagctgtcgccggcgcagaagtcgatgatgctctcggcccgcaaggaaagcggcaagttcaccgagggcgtgctcttggccaagggcaaggagtacctcttccgcgtggttcccccgagtctctacctagccctggccatgaccgaaaacgaagaaaagaaccagcgctacaacatcatgcaagccaccggctgcgacgagctcgaggcggccttgcaggtcgcagcggatctcgacaaggcgcgcggcctgccgcccttccccattattttcccagaccaaccggcagtggagtgccaggacgaatga

SEQ ID NO: 341514 - DNA, 285 bp, Pseudomonas aeruginosa
atgagagctctgaattcgctgacccagaacctgatcgacaacctgacccagatcctgcagaaccccgaagaagatgccctgcagacgctcaggatatgcgctcctgtactgatcgaggagctgcagcagatacaactgagggcggtcgatcgccgagacatagtcccgcagataaagcagctcctggatgaatggctgcaacagcatccacagcctgatacggcccaacaggcgctcatcgaggccgtggaccgcgcggaaatcctacagcggaggcaagcgtga

SEQ ID NO: 341515 - DNA, 291 bp, Pseudomonas aeruginosa; identical to SEQ ID NO: 328687

SEQ ID NO: 341516 - DNA, 978 bp, Pseudomonas aeruginosa
atgcagccagggaaaagcaaaagagtagagcgcaagccagataacagtttagaattagatcagtgcaggctgtacaagatcggatcggaaaaacgcctggcggaaatcttaggtcttagcttgcaagacctacgactgctattaaggtccgaaagtaactataagaaattcacaatttcccagtctgagaacccattcactaaaaagccccggaaaaagcgcgcagtccaagtgcctatgaataggcttcggcgggtccatgctaagatcttttcttttcttcgtcgtgtaaaatatccggactatgtgcaaggcgcagtaaaagggcgatcttatcaaacaaatgctgcttttcatgccagatcaaggcagacagcaaccttcgatataagtaagttttatgagtccactaaatatcatttggttcacgagttttttttaggggcattgaaatgcccaacagatattgcaggaaaattagcacgcctagttacctgcgatggagttatgcctacaggcagtttgcttagcccgttgttatccttttgggttgccaagggtatgtttgatgagtgtgcggcgcttgcagaaacatatgatctaaaattcacctgctatatagatgatttaactttctctggtgaccgaatacctcgcgagcttaagtctaagctaaagataattgtaagcaggtatggctacaaactggcgatagaaaaaacaaaggtttttagatttggcgctcctgcgcatattaccggggtggttaagctaaacggtgagcttgtcgtcccgtttgctcgactcatggcggctcggcgaatttctgatgctctcgatggaaagagtcctgactacggctacacaaaaaatgagcttaaaagaaaacttgcaggaacaatagctgaggctgctactattgatggcaatcgttttagtaagtgggctgcatttgcgcagaaggaagctagagattaa

SEQ ID NO: 341517 - DNA, 408 bp, Pseudomonas aeruginosa
atgaaggcacgccgcccacacatcgttccccttccccatcaagccataaccatcctgcgccagatccacgaaattaccggccggtatgagttggttttcgcaggccgcaaccatgccaatcggccgatgagtgagaacaccattaacaaggctctggccgaggccggctacaaaggacgccagaccgggcacggtttccggcatctgttcagcacggagatgaacaaccagggcttcaatcgtgactggattgagcgccaactggcgcatggtgatagagacgagatccgcgacacctacaaccacgccagctacttggagcagcgccggggaatgatgcaagcctgggcgaacgagattgatgcgctctgtgctggtgcgaatgtcctggctcttaggagtgcctga

SEQ ID NO: 341518 - DNA, 234 bp, Pseudomonas aeruginosa
atgcgtaatctcacctttgttgccgataaggtcggaaataacctgagtaccgctagcattgcactggagacaatcgcaaacctgctgggcgccgatggctgcgagcaccatcttcatgatcacgaagtaagcggcctgcttaacgctgtagcggccttgtctgcctacatctcgggagctagttatgacctgtgctccgccgtggaagaagagcggaatgggggtgcccaatga

SEQ ID NO: 341519 - DNA, 282 bp, Pseudomonas aeruginosa
atgaagcgtgcaaccactaagaaaacggacttcgatgcgttgacggggcttaaagatacgcctctgttctctgtaaatagcggcgcgcctattccggaagtgatcgaaaacgtgtcctgcatgctggacatcgcccgttccctaactcgcaaggccgagggcatgccgcttgaggccaactgcgtgtacgccattgagatgatcattacccaggcgaaagctgctgtagatgccgtctgggcaggtctccaggcagagcaagccgaacccggcaaggagtaa

SEQ ID NO: 341520 - DNA, 1017 bp, Pseudomonas aeruginosa
atgcgcgaactcgtcctttcccaattcgccaaagcgcttctagccaaccgtgatcggcaatcagctctgacgatcagtcgatcactttatggccactccagcgcagtggtccgccttttggaaaaggcggtggttacaaccagcgatctacatgctgaccctgacttccgttccgctgggcgcgcatttatcgaacttgttcaaacccgatctttgatcggcaagatcaactccatctcacccttccgggccattccagcagagacgcgcgtgctggcacaaaccgagagacctgcggtgtattggactgcccaagggcagccgaaggtggccacgcacactgcgtttgagcagaagcgcctcgactcaaaaaaggtcaccgcacttctggtgctaaccaacgaactacttcagggacaaggcgccgagttcgagtcggccgttagcaatgacctggtgaatcctattgccgccctcgaaggggtctccttcttggacccaaccaactcgggtaacgctgagtctccggcgtctatcaccagtggggttacacctatcccttcatccggcagcgatgctgacgctatgcgcactgatattcgggcgcttttcgcgaacttcggtggttcgctcgaaaccgcggttatcgcgatgcatccagagtcagcccttgagctgtcgatgatgcaagcgtccctcggcgagacgagtctgacagtgcgtggcggtgagatgtttggtatcccggttgtgactagcgactcggtaccgaaggattccaacggcgctctagtggctctcatcgatccggccggaatcctcctcacagatgaaggtgttgatatcaaacaatccactatcgcaaccatccagacagatgatgggcaaggcggcaccgggtacctgtcgctttggcagaacgacctcacctctgctctggctgagcgtttcctgaactgggaagcggttcgtgctggctcagtatcctggctgtccggcgttcagtggggtgcgtga

SEQ ID NO: 341521 - DNA, 216 bp, Pseudomonas aeruginosa
atgagcacatccgaagaccgcgtgcagaagctcgccaggcgcatcatcgatgagtccaaggagttcgccaatgctggcgccaaagagcctttcggcatggccgctgccgcaattttgactgggcagttgatcaattcacttgtgcgcatcgaacgactggagggcgatatcaaggtcctgaccgaattattggccaatgtggagtccagccgatga

SEQ ID NO: 341522 - DNA, 1680 bp, Pseudomonas aeruginosa
atgaccacatatcacaccaggaaccctcttggctcgaaggatccacgggatctgtacgataacgccgagaactacgatacggcgatgaatgatcgaaccaatgagcaatggactgaccgcttcgacgtacatcggccaacttggtttggtatcgaggagagggtctctagattccttgcgaactctggttttgagcttccacccttgacatatatcgacggttctccgctgcaagtagaccgcgcgactcaattaattgaacgtggcgagaacctgtatagcatcaagcttccagcaagcttcccaatagtccttagcggtacgtggggagaggacgagccattcttgattgcaagagttgatcaggcgcttaggcaggagctggcggtcactggcggcgccgggatagttgggtttgatccgggcgaaacgtacagttctgggaccgttggagagaacctaaaaagcttgcaggccctgaggaaaatagtggtaactgattatggcgcggtaggtgacggagtaaccgatgatacaactgctatccaagcggcgattgccgcagctggtatcggttcagatgtagagtttcccaatggaacctacctaatcacggatacattggttcagcttcaaagccaacgttggctaggacgtggaggtcagagaggcaccaccattaaaaaaggcgcaaatatcgatatggtgttggtgggatcgctcggaaccatcctagatataaatttggaaggaaatggggcgaacttttccggcaaggggttccgcatccccgcaggattcagccagacaattgagcgctgccgcgctgtgaacatgggcggcgaaccattgtacttcgacaacaatgccggaggtggtgcgaatgttagtacatttgaaggctatcccacggatacaactacatacgccggcatagcaatcgcaggagataccggcccgcacccacgttttttccgagggatttggctcagcggtgctaattttgcacttggccctggcgcaggaaacggaggatcaatgacggggttctatatccgtgaccttcgttatgacgccacgtcaaccctgttccatatctccaatgggcgatgcgcgacgctcggagaaacaactacgctgcgcggcttcgatcataccctagatggtgtcgcgtttgccggaccggtcgcacttgagagtgctcaggggatcaatatcggttcatcgtgcactgttccaagtttgatcgagaacccaacgaactgccagtacaattcagttcatgttcaacgacgaacttacacaccaacatggtcgcagaccagtgcaacgcccgcagtagggaatgggagccttacaggagactacatccgtcatggttatgaatgcaaggtagaaatcgaacttactgctggctctagtacaacctttggagacagcgcttcggcatggcggttctctctaccttttccaggtcatctctctagaaatcagcgtgccttgactgtatacatctatgactctagtacaaacaccgacttcgtagggaaagcgtctatcggcgcaggccaaaactatataaccatttcgataaagggtcagcaagttagagaaggatatcctatggtgtgggccgaaggcgacacactacaggcttcattcagctacatggtcaggtga

SEQ ID NO: 341523 - DNA, 864 bp, Pseudomonas aeruginosa
atggatcagaatgaacagtctacgttcgatgttgaacagatcaagattcgatatgagggaggggatgcagaccggcacgagctcgacatgcttgagcttggcgagtcgctccagggcttcgctaggctttactccaccgtagccaattttgtagagactggtgtctacagcaagcaatggaaagctctagagataagggcatacgccacagagcctaaggcgaaatgtttcgagatggggatgctcctttcatgggcctctcagactcaagtgcttagcgggttggccgcggccatcattgggcctatcatcgcctatatcctgatgaagctatccaaccagaaggacgaaatgaagcatctccgcgagattcttgagaatcagctcaaggagcgatacgggagcgactccgccatcataaaccgcatgatggacacgatcgaccgtctcgcagatgcctcgcgcccctccgccaagaaggcgctttctccaataggctcctcttgccatcacatagaggccattggaactggctacaaaggcgttttcgaccaagctatgaaggacgccatccaaagcgaagatggtgatgagctcacaggccagatctcactagagatactcatcactgaactcgacgtagaaaagcagacctgcaaattccgccttctcaatgaaccagatcaaactgacgaagacggtaatccgttacgtttctctgggaaaattacggaccctgaaatcgaatctcagggaaacaaatacagcatgagccttgctcttggcacgcccttaaaggctaagggtaaggcaaggatgcgcgacgggtacatcaagattttcttcatatctgacgccgagtaa

SEQ ID NO: 341524 - DNA, 528 bp, Pseudomonas aeruginosa
atgggcatggccagcggcgaactgcgctacgccaacgaactggtggacttcatccgcaccgagaccggcgaccacttccacatcgaggtcgccgcctatccggaggtccacccccaggcgcgcagcttcgaggatgacctggcgaacttcgtgcgcaaggtgaaggccggcgccagcagcgccatcacccagtacttcttcaacgccgatgcctatttctacttcgtcgagcgggtcgccaagctcggcgtggacatcccggtggtccccggcatcatgccgatcaccaactactccaagctggcgcgcttctccgacgcctgcggcgccgaactgccgcgctggatccgcaagcaactggaagcctacggcgacgacagccgcagcatccaggccttcggcgagcaggtcatcagcgagatgtgcgaacgcctgctggagggcggcgcaccgggactgcatttctatactttgaaccaggccgatccgagcctggcgatctggaagaatctccagctgccacgctga

SEQ ID NO: 341525 - DNA, 927 bp, Pseudomonas aeruginosa
atgatttacgaggtcgatgaaatactgaatgaagccgtaatgacgggcgttccctcaataattgtggaggggattgacgatatctgtatttatgagggcatctcgaaaaaatctccattcttagttgaggtctatgcggttgaatatattgatggttttggcgagggatgcgatgaagtggtgagagctgtttcggagatcgagcagattccaagctcaaatcacaaagtttctgaccatgttttgggtgtaatagataaggatgtgcgtgatttcaggaatgagcttcctgaatctgacgcagtgctaacacttaaatattactccattgaaagtcactttgtttccaaagccattattcaacatactttgtccttgtgtactcgctcgacccaagagcttgttactgaggaattatgtgatttcataatgtcagaattggagcctagactgctaaagatttattatcactgcctagagtctctgaagaacgcagtggttagagattatgatgctgcattcgcatattcttataattatggcagattgagagatactaatgcccagcggattattaatgaaaaaaaagaagagcttgatatttttgctgcgtcgatgagcattgatgcttctatggagtcaataaagagaatcgctaggggtaagtggctgattgagattttttctgaagaattacttgcatacataaatggcctacaggaaatgtgcaaggacggtgctgtatcaacctgtaagtgctgtcttaatgctgcatttgataagtgcttatatagaatcagagagggtattggtaagaatgcaattaaggggctggcgttctctaatacggaaggtgcagagtttggctatattgttcagagaatttcgagtctaaagggctcagttcagagagcacaagcaagctaa

SEQ ID NO: 341526 - DNA, 1296 bp, Pseudomonas aeruginosa
atgagaataaaaagctttaaaattactggctttaaagctagcaatagaaatgcaatggtttctttctcaaatcaaaatgtcaccgttatatatggtgataacggatgtggcaaaacaacatttctaaaagtcttgagtgcgtttctagctcaggatgacgcatctctagttaccatgggtgtcgatagtataaattgtgtagttgtagataaagggcgcgagctagatgtgtgcgtgccactttccgcggaaggtacttacaactggagtgcttatgataattcatgtcttggccactcaagatccctttccctaggggttgagcgcggtattagcactcaagctatgaaagtggacccagaatttttggctgatttctttactcactccaagcatgctggctacttccttaatgatggcccgccgtcacccttgcgtcgacgaagaataattgatcttgctgaagatttgtctctgtacttaaggcgtcgcacttctgcgacgaggttcaggaatagcagggtaagatcggagattgattatgacaagccgcatctatatctgcaaagtataaaaatagagaacatagaagagctattgcttcgcaggtacagaattgctcgattcatggccaccaagaaaattcaaagtgcattgttcgacactctatcggtggccattgacactggtcaaagtgaaaacccaatagtaagtgaaacatctgaagatttttcaaatagacttcttgagaatagggcaaggattatcgaggctcttgatgatggcgaggcaaacgcattcaaagagcgcattatcaatatcctcaactcaattgatagagatgaaggattacagagggttcttgatcataatcttctgagacagctgttccggaatatgattgacgagctagaggttgagcgccttgtgcttagctctattaacttgctgattgataaatttaacagctatcttatcgaggataaaaagctcgtagttaacggcgaagaagtattcattgagattgatgggaataagcactcgttaaatgacttatctagtggtgagcgccatatattgactttcctagctcttgttttgtttgaaggcgagggtagggatttcttaatcattgatgaacctgaaatctcattgaatattaagtggcagcgcgagcttatggcgatattttccgagctgctacctggcacgcaaataattgttgcctcgcattctccggcattggccaagcgcaatccggacttcctctctgaactaaaagtttggagaggttaa

SEQ ID NO: 341527 - DNA, 351 bp, Pseudomonas aeruginosa
atgatcttctttcgcaacaaatcgctgttccacgacgttgagcgcgaaatgttggccaccatcaaaaagcaggcgggcatgaactacgtgctgtatcgccttttcgatatcgcgtcgaaggttggcgcagtgggagtctttaccctgcttctatgttggatgctgcttgaattcatcctgcaggggttcttgggggctggcccaacaatcacaaagcagtatggtgacctgttggcacccattatcgtggggcttggagttctcggcgtcgttgcccaaatcttctatcaggtccagctcgacaagctgttacccctggtgcgggacgcagcgcgcagcgtcagtcactga

SEQ ID NO: 341528 - DNA, 255 bp, Pseudomonas aeruginosa
atgaccccgctggaacgggccctgatcgcccaagctcgcgcggctcaagcgcggacggcccggtatctgtggcaaaccacggccgggcagacccctgacgacgaccgggaagaattcctgatgcagtacggggcgctgagcgcactgctgtccctggcgcatgagaaggccagcggcctgacgccggaagcggtgcagcaactgcgcgagatcgaggcggccgaagtcaaagcgaaccgagccacgcgcggctga

SEQ ID NO: 341529 - DNA, 339 bp, Pseudomonas aeruginosa
gtggatccgtccggcctggccggcgagcagctggtggagcccgtcgacctcgatcacgtccaaggggtggccatcggcgccggcggcgccgaggacctggtgcggtggatccgtccggcctggccggcgagcagctggtggagcccgtcgacctcgatcacgtccaggggtggccatcggcgccggcggcgccgaggacctggtgcggtggatccgtccggcctggccggcgagcagctggtggagcccgtcgacctcgatcacgtccaaggggtggccatcggcgccggcggcgccgaggacctggtgcgtcagaaggggagggggctatcagaatag

SEQ ID NO: 341530 - DNA, 1521 bp, Pseudomonas aeruginosa
atgaaaaagcccaaagcaaagagccaggagcgccccgaccaggtggtcggggtgacgccagcgtctgctggcatcatggctccgaaacgcatgcgtttctttgccgaagagcgcgccgctgcatgcagcgtcgtgcctgcccttgacgggacaggcatacacccccggaggagcgctccgggggtgtgcaggactccacgacgcatgcgtcgttccgccctctttttctgcctgcgccctggacgggcttgtccgaaaaattcacccgcgcgcccgtccactctcttcgagagcggaccccccagcttcctggggttgcgcaacgcttcgccgcggtccttcgtcccttgctcagctgctccaccccggaacccggggggtccgctctcgccgacttcagccctggcgggcttcagtagtcgagcgcagacgggcgcgcgctgcacgtcgcctgatgcttcgcactccaggtcccggcctggacggccgtccctggagcagaccggcattcggccctggggggcctcggtgccttgcgagccgcgtgggcgcgtctcgcatctgtcaggcttctgtttgtttcggcccacctcgctgacgcgaactgggccgcgcgctgccggaacagcttttggctgttccggagagcggggcgcctgccgacctccgctcgacgcctccgccatcgccgcgcatcgcattgccctcgccgacccgttcgggcggctgggctcgctcgcttgcttggcgaagcgtcgtcacctgggccgagttgctgggcgccccccgaaacagcttctggctgtttcggaaaagccggaacagcttttggctgttccgaagagcaggggagcttgccgacctccgctcgacgcctccgccatcgccgcgcatcgcattgccctcgccgacccgttcgggcggctgggctcgctcgcttgcttggcgaagcgtcgtcacctgggccgagttgctgggcgccccccgaaacagcttctggctgtttcggaaaagccggaacagcttttggctgttccgaagagcaggggagcttgccgacctccgctcgacgcctccgccatcgccgcgcatcgcattgccctcgccgacccgttcgggcggctgggctcgctcgcttgcttggcgaagcgtcgtcacctgggccgaattgccgggctccccccgaaacagcttctggctgtttcggaaaagctgggcgccgactttgcctcgctcgtcggcttcgccctgcgcttcacttcgcatcgtctgcgccggcctttacaggcggctgactcgctcgcttggtcaagcgtcgttccctacactgcgtgccggggcgcccaatcgaaacagcttgtggctgtttcgaaagagccggagagcttcgccgccctgtgcagctatcggcgacaaaacctcgtcgtaatcaaacacctgtacccgactgccctgcggaaacagctcgcggctgtttccgagggccggaacagcttcaggctgttcggagtcgggagatga

SEQ ID NO: 341531 - DNA, 852 bp, Pseudomonas aeruginosa
atgagtaccgcgcagcaactgatcccggttcccttctacgaagacacgctggttctggtcgggcaagccagcgaaccctatgtggcgatgaagcctatcgtggccaacatggggctggtctgggcagcccagtacgtcaagattatggagaggttcagttcagttgtttcggaaatcgaaacaactggcgctgacggcaaacaatacggcatgacctgcctaccattgcgcaagctcccagcttggctctactcaatcagcccgaacaaggtgaagcccgagctgcgagagaagatcgtccgctaccagaacgagtgcgacgatgccctgtggaactactggaccaagggctgcgccgtccgcgccggtgccccgaacaccactcagcgcatcgccctgtcccgccaccggctcgccctggctaaggaactgtaccgcacccgcgatccagcgctacggcagaccatccaccagcagttggatgaggtttccggtgccatgggactgcccacaccggaactggatagcctgggccgcgccgcgcccgagatgccggatgtagtggatccattctggcaggcattggcgttcctggatggcaagggagtggactacaaccacgcccacgccgatagcctgttggcagtcaacctgccggagttggcccgcctgctgattgagcacggccacccactacgcttcgacagcgccctgcgtcaggggctatggctgagcagcgcaccgcgctgcctgcacaagaaccaccccaccaaaagccgtctcgtcgacaaaactgtccgctgctggatatttgccatgcatccaaccgcgaaggagttgcctgaagtatga

SEQ ID NO: 341532 - DNA, 165 bp, Pseudomonas aeruginosa
atgaatagccttcgccacctgctcagcctcctggtgctcagcgccgatgaacgcgccttgttgcagaacctgcgccggctcagtcaggctgatcagagcttcattcgtcggggcgtccaggccttggtgcaatgtccggcaattccaaagggagagaaagcatga

SEQ ID NO: 341533 - DNA, 423 bp, Pseudomonas aeruginosa
gtggaaaccggtggctgcccgcacacggcgatccgcgaggacgcctcgatcaacctggaggcggtggaccagctcaaccggcgcttccccggcctcgaactgatcctggtggaatccggcggcgacaacctgtcggccaccttcagccccgagctgtccgacctgaccctctacgtgatcgacgtttccgccggcgacaagatcccgcgcaagggcggccccggcatctgcaagtcggacctgctggtgatcaacaagatcgacctggcgccgctggtcggcgcctccctcgatgtgatggaccgggacgcccggcgcatgcgcggcgacaagccgttcgtgttcagcaaccagaagaccggccaggggctggacgaaatcatcgccttcatcgagcgccagggcctgctgaccgccgcctga

SEQ ID NO: 341534 - DNA, 1179 bp, Pseudomonas aeruginosa
atgcagtacgccgaaatatcaaaaacaggtcaagttataagtgcgcaacaagctagccttatggatggatctgaggagtatcggtgtccctcctgtggtgttgaggttaaattcgcctctctagtcagtcctatgcgcgctccatacttccggctggctcctgggatgtcacacaatttagattgtgagtttaatgggcaaggagggcgtagacttaagggtattgagtttgagagttttcttgccagtgcgctaaaggcacacggggcatacagtaatgtggaacaggattttttgcttggccaaggtacacgataccgagcggacattttggccagtagggtgggggggggtgttggtgagcgcttattgattgagtgcaaaacttctccgccaaacagtttgaggcagcttgatcaattgttaaggcaactttttgcttatggcacaactaataatgactataagattgtcttggcagttccggcaacgctaagtgatgagtatttgtttgcgcttaaggaggcgggagttgaagtttgggatttgaattttttgtcgagggaattctctggagtagttcataaaattcccggcagctattttgcgcagataattgtctctcatgcgaatcgatctcatgagccaacaaatgaagagaaatttatttcaagcctaagatcttgcttgcctggtaaacaagactgctatgtgtatcagaagttgataggggagattctggggcacctttttactcctccattgtatgagccaattccagagctatcagataaggcaaaggttaataggcgtgattttattatgccaaattatgttgatagtggattctgggcttttttaagagagcggtattcggctgattacgtagtgattgatgcgaaaaattacacaaaaaaagttagtaaaaaagatgtcctgcagattgccaattatctaaagtcgcatggcgctggcttgtttggattaataatttccaggcggggaggagacttgtctggttgcgaagttaccttgagagaacagtggctcgttcatcaaaaaatgataattattttagatgatgaggatgttgtatcaatgctgttggccaagtctgatggtcgtgctccggagcaagttatcgggagcaaaattgagcagttcaggctgtctatgtaa

SEQ ID NO: 341535 - DNA, 729 bp, Pseudomonas aeruginosa
atgagtagctttgaagaggttaatttgaaacttaatgccttttcggaggagctctccattaggctaggtcaatccgtcgttcaacttattacacttcctcagccgagtgaccctaaagatgaactctactttcgcaaactcgtcgcctggtcttatgcggcattagtagaggcgttcccggtagccctcaagaaacttaccaattttttgagaacatctaataagagtgaattcactggcgtcagcgaactaaagactgcaatccaagcgctcagaaccgtacaaagccacaatttacctgagccttcttcacatagtgagaagcaaaaaaagcttgctgatatttggctgctaacttacggatcaacacctttctgctgggctacagcatgcacagttctctgcaaccagttaatagtgctgttcgacacccttatggccgcgttaagaaaaatttgccaagagccggaagatcagcagatttttatcgaggacatgagcgcgacactactccgcacatggcctgcacatgccttcgacgaactggtgaaaaattccgccgaaatgatcgggcttactgaattcgatatcgttagctatcgccagactcggattgaacgctggcgcgagctagccaacttgtttacagatagatcgtcagcgatggcggccgtcggaagggcgattagtgtcgagcttataagtatatttggtgaatctacaaaatag

SEQ ID NO: 341536 - DNA, 3435 bp, Pseudomonas aeruginosa
atgacaacaaaaaatgccaccgcctcggaaggtttgattgcgcttagggacgcacttcgtgcgggcatgcctgttgtcgcactgctcggccaagcggctggctggattaacaagccagatcccgtcttgcagtccgcgttaaggcatgcgggcagggatggagtcgcgtggacggacctgcttaaccgtgagcccctggaggccaatttctatcattggatagcggagcgctacgctagacgtggtccttccgatgcactatccgcaatcgctgacattccgtttagcgcaattttcacttcatcaattgatccagggctaccaaaccttttcagcaccaatggccgggaaccagagccggtgctgatgggaagtccagttcctaccgtattgagaagcacccgtcgccccccaattttctacctgttcgggcgagcaggagtaggcgttgcagagcttgaccctccgacaagcaggcagtctctcgctcaacggcggttacagcaatcgtcagcaatgttgttaaacgtcagggaaagcgcaaccgccttgggcctgatcattgtcgatggctattacccatctggtgactggctaagagctgaagaacttcttgcttgtttgtcagacgcaccgaagggtggtgtggtttggtttggatccgaaccagagttcagcgacgatgatgcagatacgttccgagaactggtcaaatccggtgtaatcctaagagaaaatggaggactagatcaggcttatacacatctgctagcgacagaagaaataacacccgtaaaggcctgggacgagccagaaatcgttagcttgcaagacggtaggccttttgtcgtaccgccacagctgcgcttgctaactgaggccaccgcgtccattgtcgacaattcttggacagggtttcttcctccatttactgcagcagtagaatcttcagctttctatagcttccatagttcaaacatcggctcgcgcgcactagtagaaggaattcggcgcaactacgcaattcaacgagacttcgaaactgatctcttcgcgaaagttgaaaaagccttagcccggcatcatgagcaaaccggggcaatcatcttgcatggacaatctggcgtaggaaaaagcatagccattgggcgtctcgcaatcaccgcaagagagaagacaaaagtcgctgttttactttcagcagggcctagaattcctcaggccgcagaggtctcaccatttcttgaggctgttgaccgcacaggtagcattactcttttgttggtagactcaaatagttcagtgcaacgatacgatgaccttttgtccgcacttcgcagcggaggacggaaagtcgttgtggtcggcactacctaccgccttgaagaagatggtcgtcgcttcgttcacgccccgcccactctaagcaagacagagaaagcatctcttctggagctatcaaatcggcataaccttactgacctgggacgagtcatagattctgaccatgctttggcaaagttttactggggcttgccagctagtcgcggtgggattgctgacgggttaggccgagaagctcgctatgtggaaaccgacttgcgcttaagaggtacgcgacctaggccaactacagggttaggggcgcttggtatagctctagtagcagcaggctattctgagccgattgcacaatttttcccagatgctctacccactactggctttgacttagattcgccagcagcgaaagtcattgactacgttatggtcgtctcccgcctctatcgtagtgttccgatcaatctacttctacgtacagtactctcctctacaagtggagagtcagccagccccatcagcctagatacgctgcgtgaactctttgaaggccaagacctattccggtgggagcgtagtgggcacgcgcagaatgagttacttatcagctctaggctgcaaatcgaggcagagcttgtctgtaatcgacgcctcggctcccccgatcgggaagcaaatcgaatcattgaattgatatcccatgcctatcgcgcaggggcggaagataacgaagaggcccatttcgtagcagacattgtctacgcactcggccctgacggcccaactcgcgatcggtacaaaaactcctatctggagattggtagatcactgactacattacgagaacggcacggaatcatgaacgcccgcctcatgcttcaagagtctacactacgtcgtcactttatccgcaccatccaggacattgacgctcaatcaaaggctattgtgctcgaagaggctacccgcgccgtcaacgacgcgctaactgcaatcgatttatccggtgaaaaccgtctttatgcagcaagacgtactcgagagcacctgcttacagaaagagcagcaacttacggcttcctagcgacagatagtgctcaacgagaagaaaatccaaatgttgtttgggcaagctataaagctgctcgcgacgccgctcgattggccgctgggcgtgtgtttagctaccagccgttggatatttcgctctgggtaccaatgcgggtattgagagaatcctctcacctgaattcgtcccaaaaagctgagctcctggcagacatacgttcgactcttgacctcgttgacccaaccacgcttgggcctgagcaagcagagatgttccgccgccaggaaattttcgcagccgaggtgctcgaagacacagaattaagcgagacggcctttgccgcgctggatgctgccggctctgcggtcggcttttatctgaaagctcgtgccctggctccgacgcggcctgccgatggtgaggtggctaccgacaatgataaacaggcggcagagcgagcggcagcttacttaagcaatgtcttcgcgaaaatttcccatgacccccgttcattacaactattgatttccatggagtggattaaggcaaccaaacactggctatttagaggcctacgacagccattgccctcaacaatagagagtcgggaaagaatcagatcgctcgtctcagagcttcgatccactgatgaggaagcattctctcctcagtttcgatacatagaggcagtgctgcgatggcttactggggacgaacaagcggcgataactttgtggcgaactttggctagagacactgacttcgtcgaggcgagacgaatagcaaaccgacacaccattactgccgctgatggaagtccgattctgtacactggagtcgtagtgcgcgcaatcgggcagggacgatgggccgtgagaatttctgacctggagcgagaagtcgatttgctgcaaagtgatttttcaggcacggaactttcagtgggccgtacagtccgtaatttcgcagtgagtttcagttaccgcggccccatagccgaccctttccatcggcgggaaaactga

SEQ ID NO: 341537 - DNA, 894 bp, Pseudomonas aeruginosa
atgaacgacattctcgacactgacctgctgcccatgcgtgagatcgtgcgccttaccggcgtcaatccggtaaccctgcgcgcctgggagcgacgctatggtctggtgaacccgatacgcaccgagggaggccaccgcatgtatacccgaggcgatctgcagatcatccaggacatcctgctctggtccagccggggcatggcggtcggcaagatcggcgaactcctcgccaaatccaggcgcccagaaccggagcaggccgacgacgaactgctgcaatggcgcgaagcgttcgagcgggccagtgcagcgttcgacctagacacgctcgatcgtctttacggccaggcctacagcctctacccgatcctcaccctgctagaggacatcctccagccactgtggcgctccctcctgacgctcaatacctttggctcccgcagccagtggctatttctcgatgccttcctgcgctcccgtgtcctcatgcacctgcagatgagccgcacgagcgaagcctacgtcttgctgtcggacgccacaggaaatctccgggagttcgaattgctggcgatggcacttatgctcagcaacgatggagtccaggtccggcccctttcaccaggcgcgccactggaggaattgccattgctctgccaagcgatgcagccagccgccctggtgcttttggcccatgtcgctctggccggcgaagggttcaaacgcctggagcgcctacaactggctattgattgcccgctggcagtggccggagaggcggcgcaggacatagcgaacgagctacgcggcgtccctctcgccgatctcggcaacagcccgacagacgctcggcgtcgcctgcgcgctttagtgcagggaaaattgcagctctga

SEQ ID NO: 341538 - DNA, 471 bp, Pseudomonas aeruginosa
atgatcaacgccaagctgctgcaattgatggtcgaagcctccaacgacggtgtcgtggtggctgagcaggagggtgatgacagcatcctcatctacgcaaatcgcgccttcgagcacctgaccggctatgccgtggatgacattctctaccgcgattgccggttcctccagggagctgagcggcagcaaccagggctggcggctatccgcgaagcaataagcagtggccaaccctgccgcgaagtgctgcgcaacttccgcaaggatggcacgccgttctggaacgaactctccatcacgccggtacgcaacgaggcggatcacctcacctatttcatcggcatccagcgcgatgtcagtactgaggtcgcggcgctggagcgggtcaggcaactggaggcggaagtggccgagctcaagcgtcaattggctaccgccgagcagggaaggaacaggtctgcaccaaaataa

SEQ ID NO: 341539 - DNA, 423 bp, Pseudomonas aeruginosa
atgtcttcgttcctgcaacccttcgccgagcgttttgccacgctggatgtcacgagccttcatcggctggatgagctgtatagccaggatgtgcacttccaggacccgctgcaccgggtggaagggctcgccgagctgcgccgctatttcgaatcgatttacctcaatgttcgcgaactgcgctacgacttccatgattttgacgaagtcgcgcagggcagcggatacctgcgctggaccttgaactttcgccacgcgaggctggccggcggcggactgatctcattggatggctgcagttttctgcgatggagcgagcgggtagattaccaccgggattatttcgacgctggagcgctgctttacgagcatctgccggtaatgggcggcgtcatcggctggctcaagcggaggctggcatga

SEQ ID NO: 341540 - DNA, 756 bp, Pseudomonas aeruginosa
atgacccgcgtctggctgaccggggccagcagcggcatgggcgctgccatggccgaacggctgctcgcggacggtcaccacctggcgctgacggcgcgccgggcggaatcgctcgagaccttggcgcagcgctatccggggcaggtgctgatagttgccgcggatatcgcggacgcggaccaagtcgccgtggctgcccgctccattgggcaggcgtggggcggtctggatcgtgtcatcttcaatgccggaacctgcgaatacctggagcctgggctcttcaacgccgccctggtgcggcgcgttgtcacgaccaatctcatcgggacggcgaattgcatcgaggccgcgttgcccttgctgcgccactgccagcgcccgcatctggtgatcatcggcagtgcggtgacctggctggccctgccgcgtgccggtgcctacggtgcctccaaggcgggcttgcggtacttggtggagtcgttgcggatcgatctggcggaggagggtgtcgacctcaccctagtcagtcctggcttcgtcgacacaccgctgacacggcgcaatgactttcccatgccgatgctgtggccagcccggcgcgccgccgaacatatcgtcgcgaggctggattcccgccctttagagatcgccttcccgtttgccttcgttctggcgctgaagctgctgggccggctgccggcgcgctggcgcctgggcctggggcggcgcctggcgcgtccgccggcggaggcctga

SEQ ID NO: 341541 - DNA, 1248 bp, Pseudomonas aeruginosa
atgcgcatcgcgatcattggcagcggcatctccgggctgacctgcgcctacctgctggctcgtcagcacgagctgaccgtcttcgaggccgccgactggattggtgggcatacccacaccgtcgacatcgattggcaggggcggcgttacgccgtggataccggtttcattgtcttcaacgactggacctatccgcgtttcatccagctgatggaacacctgggcgttgcgtcgcggcccacgcagatgagcttctcagtgcacgatccggccagcgggctggagtacaacggccatgacctaaacacgctgttcgcccagcggcgcaatctgctgtctccgggcttctggggaatgctgcgggacattctccgattcaatcgcacggccctcgaggatctggccgaacaacgcattccagcgtcgttgacgctaggcgactatctgcgagccgatggctatggcgcccgcttcatcgatcattacatcgtgcccatgggcgccgccatctggtcgatgtcgccggagcgcatgctggatttcccgctgcagttcttcgtgcgcttcttcgccaatcacggtttgctttccgtcagcgagcggcctcagtggcgggtggtggaaggtgggtcacggagttacgtagcccccttgagcgcgagctttcgccagagcattcggctgtcttgcccggtgcaacgggtcaagcgggacgggcagggggtggagattctcagtgccgccggctgcgaacgtttcgacaaggtggtgttcgcctgtcacagcgaccaggtcctgggcctgctggactcccctacgccgcaagagcgcgatgtgctcggcgcgctgacatacgccagcaacgaggtcgtcctgcacaccgacacgcgtctgctgcccagacgacgtcttgcctgggcgagctggaactaccggctcggtgggccgacgcaggcgccggccgcgctgacctacgacatgaacattctgcaaggcatcgaggcgccggtgaccttctgtgtcagtctcaaccagagcgagcagatcgatccgacccaggtgctggcgcgcttcgactatgcgcatccccagttcagcctggcgggcgtggcggcacaagcgcgccgcgccgagttgcaggggcatcaccacagctacttctgcggtgcctactggggcaacggtttccacgaggacggcgtggtcagtgcactggaagtggccgatcacttcggagagcagctgtga

SEQ ID NO: 341542 - DNA, 816 bp, Pseudomonas aeruginosa
gtgaacagctgcctgtgccgcggttgggtcagccaccggcgggtcctgccgcggttgcacgcctttcgctatccggtcggcatgatcctgctggaccttgcagaacagccgcagctactgcagctctctccgttgctgcgggctaaccggttcgcgccgctgagctgggatgaacgcgattatctgccggcatggacgagccaggggctgccgctggcggaggcggtacgttgtctgttgcgcgaggccctgggcgaagcgcccacggggcgaatcgagttgctgacccaactgcgcagttgggggctgtggttcaacccggtcagcttctatttctgtcatgacgccgatggccgtctggccgccattctttgcgaggtgcgcaacacgccctggcgggagcgctttcactacgtgtttgccgttgcgtctggcgcaccgcaggagtttgcggtggcgaaggcgtttcacgtatcccccttcctaccacggcacatgcaataccgcatgcgcttcctgatcggggagttgcgcgtgcacgtgcacatggagaactggcatgaggagcaattgatgttccaggccagcctcgacctgcaacgccagacgctcgacgccgctgcgctgcgccgtcatctgctggctttcccctggatgagcctgcgcaccgtcaccgccatctactggcaggccctgcgcctgctgctcaaacgcattcccgtgcatgaccaccaggcaagcgttgactgcctgagtgtcgggcacatcgtacagaaggagtccgaccatgaccgaccccaccctgagcgccggtaa

SEQ ID NO: 341543 - DNA, 1269 bp, Pseudomonas aeruginosa
atgaccgaccccaccctgagcgccggtaaggccctaatcactgccccgctggcgggaagcctgctgcggcaggcagttatggggcgcctgcgcctgttgcgccagggctggttgcaggtgcgtcatggggaaaccgtgctggatttcggtgaccggctcagtccgttgcgagcggtgatcgacgtgcggaacgaggcgttgtggggcatggttgcctgcaacggttcgatcggtgctggcgaggcctacatccagggctactggagcagtccggacctggcggcggtgacccgcttgttcgtcgccaacctggacgcactcgatgcgctggagggtggactggccaggctggggcgcccggcgctcaggctgctgcactggctgaaccgcaacagccggcgcggttcgcagcgcaacatcatggcccattacgacctgggcaatgacctgttcgagcgcctgctcgaccccaccctgatgtactcctcggcgatcttctccagccctgagcagggcctcgaacaggcgcaactgcaaaaactcgatgtcatctgccgcaagctggacctgcgaccggaggaccacctgctggaaatcggcaccggctggggcagcctggcgctccacgccgcgacgcattatggctgtcgggtgacgacgacgacgctctcgcgggagcagtatgcctgtgtcgagcgacgaatccgtcattacggcctggaggatcgcgtcacgctgctgctgcaggactatcgcgacctgcgcgggcgcttcgaaaagctggtctccatcgaaatgatcgaggccgtcggccatcgctacctgcccgagtactttcgttgctgtgcggcgctgctcaaggatgacggactgatgctgctgcaggccatcaccatccgcgaccagcgctacgagcaggctcgtcgctcggtagacttcatccagcgctacatctttcccggcggtgcgctgccatcgatcaccgtactgttgcagaccgccacgaaccacacgcagctcaacctcgtgcagctcgaagacttcgccgccgactacgcccgtacgttgcggcattggcgcgagaacctgcgccagtcgcgtgccgagttgctggaactgggttatgacgagcactttcagcgcctgtgggagttctacctgtgctactgccagggcggcttcgaggagcgcgccatcggcgtggcgcacctgctatgggcggggccggccgcgcgcaaggcggccctggtggatcatctggaagcctga

SEQ ID NO: 341544 - DNA, 492 bp, Pseudomonas aeruginosa
atgtctagccgcggctggctgattggcaatgccctgtggctgcagctggggtggtgggggtgcgtgctgggggcgcaacatgtcgccttgcttgcggcggtggcggccgggctgattgcgcatctctggctgtgtcggcaaagggcaggggagtgcctggcaatcctcacggttggcgtggcgggttgtgtgctggatgtgctgttgggtgtgctcggcctgttcgattttcatggcgaaatcctaccggtatggctggcgttgctctggttggtgttcgccagcggtctgcggcactgtcttgcatgggccgcgagccccgcgtggtggggaggtctgttgggcgcggcgggtgggccgttggcctactggggcggcgcatcgctggccggtgtcggtttgccctggggcaatggcgcctcagccgtggtattggcgctggtctgggccgtctggctacccctgatgctgaagctggcgcttcgctggtga

SEQ ID NO: 341545 - DNA, 1542 bp, Pseudomonas aeruginosa
gtgacgcacaaggcacggcggctggggctgctactgggcgaccagctcagcttcgatctgtcgctgttcgatgcactggatccggcccaggacacgatactcatggcggaggtgaatgaagaggcgcgctacgtgccccaccatccgcagaagatcgtgctcatcttcagcgccatgcgccacttcgcccaggcgttgcgggaacgcggctggcgagtgatctacaccaggctggacgatgccgacaacagcggcagcattgccggcgaggtgcttcgctggcatgccaccctgggtgaaccggccgtgcatttcaccgaatgcggcgagtggcgactggagcaggcgctgcgccagtgcgggataccgctggcctggcatgaagatcgccgctttctctgctcccgagccgagttcgtccactgggcgggcaatcgccagacgctgcgcatggagcatttctaccgcgagatgcgccggcgcaccggcctgctgatggagcccagtggccaacctgtcggcgggcactggaaccttgacgccgacaaccgcaagcccttgccccgaggaacggcagggccgttcgcggcacgcttcggccaggactccatcacccgcgaagtgatgacgctggtggccgaatatttcagcaaccattacggtcgcctcgacagcttcgactatccggtgactcacgagcaagcccgggaactctggcggcacttcctggagttcgctctgccggcgttcggcgactatcaggacgccatggccgagggtgagccttatctcttccatgcgcgcatcagcgctgcgctgaacatcggattgctcgacgttcgccaactggcggcggacgtcgaagaggcctatcgccaagggcaggccccgctcaacgcggcggagggattcatccgccaactgatcggctggcgcgaatacgtccgcggcatctactggctgcgcatgccggattacgcggagctcaacggtttcgggaatcgccggccgttgcccgcattctactggaccggccaaacggacatgcgctgcatggcccaggcgatcggccagaccctggagctgggttacgcgcaccacatccagcggctgatggtcaccggcaatttcgccctgctggctggcatcgcgccggcggccatctgcgactggtacctggcggtctacctggacgccttcgattgggtcgagttgcccaacacgctgggcatggtgatgcacgccgacgggggctacctcgggtcgaaaccctactgcgcaagcggccgctacatccagcggatgtccgatcactgtggcgcctgccgctaccgagtggacaaagccacggaagacgacgcttgcccgttcaacgcgctctactggcatttcctcatgcggcaccgcgaccgtctcgggcacaaccctcgcctggccatgccctaccgtaacctgcagcgcatgggcgatgagcgctgcctcgccctctggcaacgcggcgaagcgctgctgagacgtctggacgcggagttgccgctatga

SEQ ID NO: 341546 - DNA, 306 bp, Pseudomonas aeruginosa
atgacgttgcaggaactccatgaggccgcggcggccggtcgggtcgaaggcctcgacgtcgtctccctggaaggcggcttttacatcgtccaggtgcgccaggccaacggcctgaaacgactctgcgacgaaagcggacaggtacagcacctgcgctccaccacccaggtccgcaccttgctggccgagcttggaccgctcccctgtgaactgatccagcactgcgtccacgacgagatgggcgccgcccgtgaaacaaacgtgcagcctctgcgcatcccgatctccctgaggccatcgtcgtga

SEQ ID NO: 341547 - DNA, 555 bp, Pseudomonas aeruginosa
atgaacctgaacttccgcttactcctcctctcgtgctgtctcctgctgggcagttgcggcaacgtcggggtcgagagatataccgcgcagcgtccctcgctggacctgccggcattcttctccggcccagtgcaggcctggggcattttccagaagccgtccggcgaagtggtcaagcgtttcaaggtggacatcaccagccgccgcgagggcgagcggctaatcctcgacgagcgcttcctgtatagcgatggcacccgccagcagcgggtctggaccttgacgccagaggggcacgggcgctggcttgggcgcgccgccgatgtcgtcggcgaggcgtccggggaaatcgccggcaatgccctgcgctggcgctatcgtctgaacctggaggtggatggccggacctgggaagtgagcttcgacgactggatgtacctcatggacgaagacaccctgatcaatcgctcgagcatgagcaagctgggcttcgagcttggccaggtgacgctgttcttccgccgccaggctggcgcaccggggagcatcaaatga

SEQ ID NO: 341548 - DNA, 546 bp, Pseudomonas aeruginosa
atgcgtcagtcatttctcttgcgtgcaatcggcctaagcatggcgctgtggtgtggcatctggagcgcgcctggatgtgcggagtggcagcgggatctgccgggtgccgtgcagatcgggcaagggcagttcacctggtacggtattccgatctaccacgcgagcctatggagcgcggccaagccggccggatgggaacaccccttcgcgctggaactggtctatcggcgagacctgtcgcgggacacgctggtgcaaagcagtgtcgacgaaatgcagcgtctgggtgcaaacgacgagggcttactgacacgctgggccggcgaaatgcgcaaggctttcgtcgatgtgcgcgccggacaaaggatcaccggtatctacctgcctggtcaaggctgccggttctacgtcgatggagcgtttcggcacgcggtggcggatagcggattcgcccgggcgttcttttcgatctggctggaccggcgtacacgcaatcccgaactgcgccgggagttgctgggcctgaacggagtggacgaaccatga

SEQ ID NO: 341549 - DNA, 1512 bp, Pseudomonas aeruginosa
atgaacgtgtacaatcggttccgtctctatcactggttactagcagcgtttttcgtgggggcctatctcagtggtgaaagcgctgagacattgcatgtgtggtttggctatggactcatcgccctgctgtgcgtccgtctgctgaccgcgctatgcacgaccaacggatttcctcgactgcttgtatcccgacgtacaactacagatacgaaaacgtgcttcggaaaggggctcacagtggtgctcctggctacgctagcgacctgctcggcgctgggttggctgatgatcgataatgtggacttcatcaactcgaccatctcgccaggtttatcggacgcttggaagctgagcgttctgaacgctgatgacctgcccggggatccagcggaaacacatgagtttctcgccaatctggtgctaggactggtcatagcccatctggtattcctcctgctatttgcccggaagcccgccaggatgatgctgacggcacgtcgtaggaaaaatgcacacgacgacttgatcgcactgcgggctcgagctgtccacgaagaaaccgtggatacccgctcctttgagctggttcccgctgctgcaggccaatcgctgccaagctatcgcgcgggccaatatcttctcatccaagttacatgcggcgaccagctattgtggcgatgttactcactctccagtacgccgggactggacgattgcttgcgaatcacagtgaagcgagttcccggcggtcgggtctcaaactggctccacgacgaacagttggcgggcaagatctttcaggcgaagagacccatgggcgccttcgtctgccccagcgctgcaagggatatcctgctattggctgctggtagtggtatcactcctgtgtattcgatactgcgcgaccgcctggaaaacggtactgggcatgttcgattgatctacctaaatcaatcaccggactccgccattttttccgcctcgttgttggccctgcagcaacgtcacgcacagcgctttaccttgcagaaccgcttcaacgacgagcgcggccggataggaagggaagaaatgttggggcttttgcgccaatggtcagacgaagaagtgtttatctgcggaaaagccgatttcatggacctagtctgcgagtgcctgcaggaactcggggcgcctgcccaccgcattcatagcgagcgctttaccggacgtgatcagttccccacgccatcacctgaagtcacacatcgcatccaggtagaactcaaaggacagtctgtcgatatcgacggccacacgggcgaggtactgctggaaagcctggagcgcgcaggcctccatccgcccacaggatgtcgaagcggcctgtgcggagcgtgccgttgcagaatcgagacagggtatgtacgcctgcgccacaacgccgcattgagtgacaacgaaattgcactgggctggacgttggcatgccaggcggaggtctgcggaaactcggttcaagtacgattctga

SEQ ID NO: 341550 - DNA, 414 bp, Pseudomonas aeruginosa
atgcgccagtccatattgattgccaccattttgtgctcggcactttccggtcctgttctggccgccgagccgactgcattgctcgacaattatgctgctcaggcacgtcagcaggacccgaacttcaccggtttttcaggggaacgcggcaaggccctgtatttccgcaaagcgctccgcgatgacaagaacatgagttgcaccacttgccacggcgcggatccgctgaaagctggaaagacgttgactttccgcaagatcgagcccctggcgccgagtgctgcacccgctcgtttcacggacacgaagaaggtggaaaagtggttccgtcggaactgcaacgatgtgtttggacgtgaatgcagcgctcaggaaaagggcgatttcatttcctggatcagcaatctgaaatag

SEQ ID NO: 341551 - DNA, 810 bp, Pseudomonas aeruginosa
atgaacagaaaaggactgctgctgccgctgataatggttcccctgctgattgtcgttggctgcgatgcggaagaccacaaaggaggcagacacgggaattataagcggcccaaacaactggccgtttccgcagacgctccagaggcctggcgcgaagaatgttccgcgtgccatctggcctacccgccaggcttgttgcctgcggatgcctggaggatgcagatgaaggatctgagtaaccattacggcagcgatgcgagccttgatccggaaacggagacagtcattctcgatttcttgctccaggcctcagtgaacaaccgcctgccgatggagggggaagggtctggcttcccaccgcgcattacggaaacgcgctggttcttgaaaaaacacgatgaaatccgtccatcgaccttcaagcgcccgagtattggcagcgcttccaactgcgttgcctgtcatcgtgacgcagagagggggaactttgacgaggatcgggtcaaaatacccaaggttggcgaccagagtgcagatgtcgagttggctctgcagaagcagcaactgatcgacctctcgcccagcacggtgacggctaatggggctaatggctccggaaatagcaatagctgtaaggtcactaccatcacgtcaagtgtccattgcggctcttcaacggacgccagaaacgagcccgccgcctcgatcgtgtggacgcaggcctccgatgggacctggacctgcacattcagcggcgccagcaatacagggctcgttccgaggaactgcacgatacaggagtcccgataa

SEQ ID NO: 341552 - DNA, 1368 bp, Pseudomonas aeruginosa
atgacctcccttcgtcaacgcacgctctggcgggtgatgttgctattgctggtcggcaccggcctgctcgcgctctacaactaccacgacagcagccacgagatcgacgagatctatgacgcgcacctggcgcagaacgctcgcttgctgcaaggcgtaatgagcatgccaatggacgacagcgaccggcatgccctgtacctggccttcaatgaagccttgaataacgccggcaagcatcgcgtcggccatccctacgagagcaagctggcgttccaagtctggcggggcagcggcgaagtgctggtgcacacggccagcgcgcccagcttcactcgaccgctgagcgaaccgggattctccaacgtcatggtcgctggccggcagtggcgcagcttcgtactgcccgtgccggagaggcagatggtgatctgggtaggtgaacgcaacgatgtccgcgatgacctgatcggccgcatcgtacgccacacgctgctcccgttcctggtcggcagcctcgcccttgctttgctggtctggctggcgatcggctggggcctgcaaccgctgcagaacatggtgcgggtcatccgcgcccgtcatgcggagtcactggagcccctgcaactggtaccgctgccacgggaactcgaacccatgcaagcggcactcaaccgcctgctgggccagatcgatgagttgctgcgccgcgagcatcgattcattgccgatgctgcgcacgaaatgcgcacgcctttggcgatccttcgcctgcatgcgcagaatgccctggaggcccagagcgacgacgagcgcgacaaggcactggggttcctcgtcggcggcgtggaccgcctcagccgagtggtcaaccagttgctgaccatggccaggatcgaaccgcgcctggggcagcgcaactgggagacagtggacctggccgaggtagtaacggtaacgatggcagagatgacgccttggatattggatcaggggcgggagccgtctctggacattgccgaagggaattaccagcttccgagcgactctggcgccttagacatcgccctgcagaacctggtggtcaatgcagtgaatcactcgccgcccggcggccacattaacgtcaccctggatcgcgagggcaaggtcttcgtactcagtgtcgaggatcaagggcccggtattgatgagggtgaccttgagcgagtgttcgagcgcttctatagcaaggactctgaaaacggtgcagggctcggcctatccattgtcgcaatgatcatggaacggctcggaggcagcgtgcagctgagcaatcttgccaccggcgggcttcgggcaaccctgaggctcatgtcttcgccctga

SEQ ID NO: 341553 - DNA, 663 bp, Pseudomonas aeruginosa
atgcggttgctgatagtcgaagacgatcccgcgctgggggaaggtatctgcagtggattgcgccaggagggctacaccactgattggctgcaggacggagtgagcgctttgcacgccctgcaacatgagtccttcgatctggtcgtgctggacctgggcctgccgcgccttgacggcctggaggtattgcgccgactgcgtgccgggggcaacgccgtccctgtcctgatcctgaccgcccgcgatgccaccgacgatcgcatcgccgggctggacgccggctccgacgactacctgatcaagcccttcgacctcaacgaactcaaggctcgcttgcgcgcgctcctgcgccggagcgcgggacgagccaaggtggtcatcgagcacgccggcgtcacgctcgatcctgctacccagcaagtcagctatgaaggacggcaggtggtgctgacgcccaaggagtacgtgctgctccacgagctgctgtcccagccgggcaaggtgttcacgcgcgagcggctcacgcagctcctgtatggctgggatgaagaaccggagagcaataccctggaagtgaacgtctaccagctacgcaagaagctgttcaacgagctgatccgcaccgttcgtggcatcggttacctggtggaaggcaaggcatga

SEQ ID NO: 341554 - DNA, 642 bp, Pseudomonas aeruginosa
atgaaacgcctgatactcgccagtctgtttgccgtcactccgctgagctgggctctcgatcaaacagctaaccaacagctcagcgctatccaacaacgctgggcgcagatccaataccagttgcccgaggcgcaacgcgcagccgcgttcgaaaagctggcgaacgacgtgaggaatttcacccaagcacagcctcgggcggcggaagcctggatctgggacgggatcgtcacgagcagttgggccggcgctacgggcgggcttggcgcgctgagcaaggtgaaggccgcccgcgcgagcctggaaaaggccttggccctcgatccaaaggccctgcagggatcggcctataccagcctcggcgcactgtatgaccgagtgccgggctggcccatcgggttcggtaactcggacaaggcggaggaactgctgcgccaggcgttgcaattgaaccccgaggggatcgacagcaattacttctggggcgaccatctctatcgccaagggcattacgcccaggcgcgctctgccttgcagaaggccctgcaggcacagccgcgccccggtcgggagctggccgaccagggccggcgcggcgaaatcgatgctttactcaagacgatcaaggacaagcaggactaa

SEQ ID NO: 341555 - DNA, 807 bp, Pseudomonas aeruginosa
atgcgcctgcgtgagctggcagtggtcttgaccggtgccagcggtggtatcggcctggaactgaccggccagctctgcgcaggcggcgcacgggtgctagggatcagccggcatctcggcggcctcgcgacgctcatgaaccgctatccccagcaactgcggtggcactctgccgaccttcgcagccgaaatggtcggcaggaggtcgtcacagccgcctgggccatgggcggcgtgaacgtgctgatcaacgccgcaggcgtgaaccgcttcgccctgctcgagcaggtcgacgaagacacgctggacgacctcctggatctcaacatcaaggccccgctgcaactgacccgccttttactgcccttgctgcgcgaacaccccaatgccttggtggtaaacgtcggctctatctatggctccatcggctatcccggctacgcgacctacagcgccagcaagtttgccctgcgcgggttctctgaagcgcttcgacgcgaattggccgatacctcggtcgacgtgctctacgtcgcaccacgcgccacccgcacctcaatgaacagctcggccgctacggcgctaaaccaggccttgaaagtgggcatggatgatcctgtcgatgtagcgcgggcagtgctggatgcagtgcagaaccaacgcagcgagctttacctgggctggccggagaaactcttcgtgcggctcaacggcatgctgcccggcctggtcgaccgagccctgcgcaaacaactgccactgatacgccgttacagcgatgtgaacaccaaggagcacagcaaatga

SEQ ID NO: 341556 - DNA, 681 bp, Pseudomonas aeruginosa
atgaacttcttcgacactctgcaatcggctaccagccaggaacgccaggcgctgttcagcgtcccggttatccgcgacgccctgaatggcgtcgtcagcctggagggctataccgccttcctcgcccaggcctatcaccacgttcgccacaccgtgccgctgatgatggcgtgcggtgcccgcctgcccagccggcttgaatggctacgcggggcggtctgcgaatacatcgaggaggaatacggccacgagcagtggattctgaacgacatcgccgcctgcggcgcagacccggagcgggtacgcaatagccgccccgcgctgccgatcgaactgatggtcgcctttctctatgacttgatcgctcgagacaaccccgtcggcctgttcggtatggtcaacgtcctcgaaggcactagtatcgccctggctacccaggccgccggcagcatccagcaaggcctgggcctgccgccgacagcgttcagctacctgagctcccatggagcgctcgatcaggaccacatggcgacgtaccgcgggctgatgaaccgcctggacaatcccgaagaccaagaagcggtgattcattccgccaaggtcgtctatcagttatacagcgagatgttcctgggtctgccgcgagccctccttccggaggtgccacatgcgcctgcgtga

SEQ ID NO: 341557 - DNA, 1467 bp, Pseudomonas aeruginosa
atgccgcatgaagtgaacgcctttcgcgagaggctgcggacttatgctacggagcgcgcctcgcagccggctgtgcgagggatgaccggcaacgttacctatgcacagttgatggtcgaagtggagcgccgcgaagcctggcttcgggaacaagcgaaggggcctttcgccctcgcgctggagaatgggcccgaagcgttgttctgggatctggcagcactcttcgccgagcggccttgcgtcatcctgccgcccttcttcagtgccgcgcaacgccggcattgtctgatgcagacccaggcaaccaccgccgtcgccagtgacgcctacgctgaagacttgcgcgccgccggttttgcgccgggcgagcgcttctgggagcgctcggcggagatcgcggcaggaattccgccggggacggcgaagatcacctacacctcgggcagcaccggctcgcccaagggagtgtgcctgagcgcctcgtcgctcctgcgcgtggcacaggagctggaagcggcgagtcgccctgccgagccgacgaagtatctcgcggtacttccgctagccgtcctgctggaaaacctcggcctctacgctgccctgctggcgggagccagcgtcacgctctacccgcaagcacagatgggtatcggcggcgccagtcaggtcgactggcaacgcttcctcggcacccttgcactcagcggcgccgaaagcctgattctggtgccgcaacttttgcttggcctggtcaccgccatcgagcgtggcatgatgaaagtcggccccctacgcttagtcgcggtgggcggtgcccgagtggcgagcagtctcctggagcgagccgaagcagtgggccttccggtcttcgaaggctacgggctctccgaatgcgcctcggtggtttgcctgaaccgccccggtgcgcaacgtccgggaagcgttggccgccctctgccgcacgtccaggtgcgtatcgccgaggacggcgaagtgctggtgcgcggctcgaccctgctgggctatctgggcgagccgtctttcgacggggactggtggccaaccggagatctcggccatttcgatgccgctggcttcctctacctcgcgggtcgcaagaagaaccagttcatcaccagcttcggacgcaacgtgaatcccgagtgggtcgaggccgagctgtcccagacaggagtgatcctccaagccttcgtctacggcgagggcttgccgcgcaacgttgcattgctctggcccatcgatcccagcgttggcgacgaaaccatcgagcaggcggtgcagcgatgcaacgctggcctgcccgactacgcccgggtccatacttggagacgtctacccggcccgcttagcggtgctgatggaacgctcaccagcaacggccgcccccgtcgccaggaaatcctccgccgccaccggcccctcatcaccgaactctcgcaaccctga

SEQ ID NO: 341558 - DNA, 678 bp, Pseudomonas aeruginosa
atgacccagcaagaatggagcgctctgtttccatttcacttcggctccaccatcgagcggcaggcgcggctgaccttgcgcagggagggcgagcgcgaccgcgacgaactcgaagccttcatccatgcgcgtttcgagtccatccatcacgccgatgtccatcactatctaccagagctgatcggcctgcaggacagtcatgggcacctgattgccgccgctggccttcgtccggccattcacgggccactgtttctcgaacactacctagacgagccactggaagttgtcgtttcacagcatgccggccgaactgtcgggcgcgagcagttggttgaggtgggaaacctggcggccctcagcgccggcagtgcgcgcgtgatcatcaccgccgtaacctggctgctggcggcgcgcgacctgcagtgggtcgcctttaccggcgcctccagtctcatcaacagcttccatcgtctggggctggagccaacggtgattgccgaagccgacccgcaccgcctgaatggcgaggtcgccagttggggcagttactacacccagcatcccctggtgtatgccggcaatatcggttacggccacaacgaactggagcgcgccggagtttacaagcgcatgggcttcccggtgctcttacaggagaacggccatgccgcatga

SEQ ID NO: 341559 - DNA, 294 bp, Pseudomonas aeruginosa
atgacccagaccagacgaagatttcccgaatccttcaaacgcgaagcggtagaccaggtacttgccggtacgccgcttcgcaacgtagccgacacattgggcatcgctgaaagcctgttgggcaaatggaagcgccagtacgaacaacaaggagactatgcctttccgggtaacggcaagcagcgcggcgagagcgcggagctgcgtcgcctgcgccagcagttggcccaggtcaccatggagcgcgacgtattaaaaaaggcgctcgccatcttctcgctgcctacgaagtga

SEQ ID NO: 341560 - DNA, 2235 bp, Pseudomonas aeruginosa
atggacgcggaggctagcgatactcacttttttgctcactccaccttaaaggcagatcgcagcgactggcagcctctggtcgagcatctacaggctgttgcccgtctggcaggagagaaggctgccttcttcggcggcggtgaattagctgctcttgctggtctgttgcatgacttgggtaaatacactgacgagtttcagcggcgtattgcgggtgatgccatccgtgtcgatcacactagtcgcggggccatactggcggtagaacgctatggcgcgctaggccaattgctggcctacggcatcgccggccaccatgccgggttggccaatggacgcgaggctggcgagcgaactgctttggccgaccgccttaagggtgtcgatctgccacggctattggagacttggcacgcggaaatcgagctacccgaccgccttcagccaccgccgctcaaaccgcgccctggaagaggtttctttcagttggcctttcttggccggatgctgttttcctgcttggttgatgcggactacctggataccgaggcgttctatgaccgcaccgaagggcgacgctctttgcgcgaacaagcgcggccgtccttggccgagctacgcgcagcccttgatgggcacctggcggagttcaagggagatacgctggtcaacctcctgcgcggggagatactggccggcgtgcgcggcaaggcgaacgagcaacctgggctgttttccctcacggtgcccacaggaggcggtaagaccctggcctccctcgctttcgctttggatcacgcgctggcccacggtctgcgccgcgtaatctacgtgattcccttcaccagcatcgtcgagcagaacgcggcggtgtttcgccgcgcgctcggggcattgggcgaacaggcggtgctggagcatcacagcgccttcgtcgatgagcgtcggcagagcctggaggcccggaagaagctgaacctcgcaatggagaactgggacgcgcctatcgtggtgaccactgcagtgcagttcttcgaaagcctgttcgcggaccgtccagcccggtgtcgcaaactgcacaacatcgccggcagcgtggtgattctcgacgaggcacagaccctgccgctcaagctgttgcggccttgtgttgccgcccttgatgagctggctctcaactaccgttgcagtccggtgctctgtacggccacccaaccggccctgcagtcaccggatttcgtcggcgggttgcaggacgtgcgtgaactggcgcccgagccggggcgcttgttccgggagctggagcgggtacgggtgcaagcactgggctcactcgaagatgcggccttgaccgagcagatatccaggcgtgatcaggtgctgtgcattgtcaacaacagacgccatgcccgtgcgctctacgagtcccttgccgagttgcccggtgctcgccatctcaccaccctgatgtgcgccaagcaccgtagccaggtgctggccgaggtgcgccagttgctgataacgggtgagccctgtcgtctggtggctacctcgctgatcgaggccggagtggatgtggattttcccgtggtattgcgcgccgaggccgggttggactccatcgctcaggccgcgggtcgctgcaaccgcgaaggcaggcggccgctcgccgaaagtgaggtgctagtgttctccacggccaattccgactgggcgccacccgaggaactcaagcaattcgcccaggccgcccgcgaagtgatgcgcctgcacccggacgattgcctgtccatggcggccatcgaacgttattttcgcctgctctactggcagaagggcgcggaggagttggatgcgggcaacctgctcggcctgatcgagataggccggctcgacagcctgccctacgagaccctggccagcaagttccgcatgatcgacagcctgcaactgccagtgatcatccccttcgatgacgaggccagggctgccctgcgcgagctggagttcgtcgacggctgcgccaccatcgcccgccgcctgcaaccttacctggtgcagatgccacgcaagggctatcaggcattgcaggatgccggggcgatccagtcggtggctagcgagcgttatggcgagcagtttatggcgttggtcaaccctgatctgtatcaccaccaattcgggttgcactgggataatccggcctttgttagcagcgagcggctattttggtag

SEQ ID NO: 341561 - DNA, 675 bp, Pseudomonas aeruginosa
atggcctacggagttcgcttaatggtctggggtgagcgtgcctgcttcacccgccccgaaatgaaggtggagcgcgtctcctacgatgcgatcactccgtccgccgcgcgcggcatactcgaggctatccactggaaaccggcgattcgctgggtagtggatcgcatccaggtgctcaagccgatccgcttcgaatcgatccggcgcaatgaggtcggcggcaagctgtccgccgccagcgtcggcaaggcgatgaaggccgggcgcaccgatggtctaatgaatctggtcgaggaggatcgccagcagcgcgccactactctgctgcgcgatgtcgcctatgtcatcgaggcgcatttcgagatgaccgacagggccggcgccgacgacacggtgggcaagcacctggatatcttcaaccgccgcgcgcggaaggggcagtgcttccatgcaccctgcctgggagtgcgtgaatttccggccagttttcggttgttggaagaggacagtgccgaacctgcagtcgatattgccctgtgcggtgagcgtgatctgggctggatgttgcatgacattgacttctccgatggcatgaccccgcacttcttccgcgccctgatgcgcgatgggctgatcgaggtgccagcgttcagggcgacggaggtcaagacatga

SEQ ID NO: 341562 - DNA, 1794 bp, Pseudomonas aeruginosa
atgatcctttcggccctcagtgactattaccagcgcctgctggagcgggatgagtcggatatctcacccttcggctacagccaagaaaagattagctacgccctgctgctgtccgcgcaaggagagttgctggacgtgcaggacattcgcttgctctctggcaagaagcctcaacccaggcttatgagtgtgccgcagccggagaagcgcacctcgggcatcaagtccaacgtactgtgggacaagaccagctatgtgctgggcgtgagtgccaagggcggagagcgcacccagcaggaacacgaagcattcaagacgctgcaccggcagatcctgatcggggaacgcgaccccggtctgcaggccttgctccagttcctcgagcgctggcagccggagcagttccagccgccgcagttcagcgaagaaatgctcgactgcaacttggtgttccgcctggacggccaacagcgctatttgcacgagacaccagcggcacaggcggtgcgtgcccggctgttggccgacgccgattgctgcgaggggctgtgcctggtcagcggccagcgtcagccgttggcgcgcctgcatccagcggtcaagggcgtcaatggtgcccagagttcgggggcttccatcgtctccttcaacctcgacgctttttcctcctacggcaagagccagggggaaaatgcgccggtctccgaacaggccgcctttgcctataccacggtgctcaaccatttgttgcgtcgcgacgagcacaaccgccagcgcctgcagatcggcgatgcgagtgtggtgttctgggcgcaggccgccacccctccgcaggcggccgccgccgagtcgaccttctggagcctgctggagccacccgccgacgatggtcaggaagcggaaaagctgcgtggcgtgctggattccgtgaccaaggggcggcccttgcacaaactcgacccgcaactgcaggaaggcacccgcatttttgtgttagggctggcgcccaatgcctcgcggctgtctatccgcttctgggcagtcgacagtttggaggttttcgcccggcgtctggccgagcatttccgggatctgcgcctcgaaccgctgccctggaagacggaacccgccatctggcgcttgctctatgccaccgcgcccagccgtgacggcagagccaaggccgaagacgtacctccgcaactggccggtgaaataacgcgcgccatcctgaccggcagccgctatccgcgcagcctgctagccaatttgatcatgcgcatgcgtgccgacggcgacgtctccggcatacgcgtcgcgttgtgcaaggccgtgctcgcccgcgaggcgcgcctgagcggcaagccccaccaagaggagttacccatgagtctcgacaaggacgccagcaacctcggctatcgcctggggcggctgttcgccgtactggaaggcgcccagcgcgctgccctgggcgacaaggttaatgccaccatccgcgaccgcttctatggcgccgcttccgcgacaccggccacggtcttcccgatgctgctgcgcaatacccagaaccacttggccaagctccgcaaggacaagcccggattggcggtgaacctggagcgcgatatcggcgaaatcatcgacggtatgcagagccaattcccgcgcagtctccgcctggaagaccagggacgcttcgccattggttactaccaacaagcccaggcccgtttcaatcgtgaccccgccctcaccgaaatcgaccccgtcgagcaaggaagacaagaatga

SEQ ID NO: 341563 - DNA, 870 bp, Pseudomonas aeruginosa
atgaccgccatcgccaaccgctacgagttcgtttacttgtttgatgtcagcaacggcaatcccaacggcgacccggatgccggcaacatgccgcgcctcgacccagaaaccaaccaggggttggtcaccgacgtttgcctcaagcgtaagatccgaaactatgtcagcctggagcaggaaggtgtccccggctatgccatctatatgcgggaaaaatccgtgctgaataaccagcacaaacaggcctacgaggcgctcggcatcgagtcagaggcgaagaaactgcccaaggacgaagccaaggcgcgcgagctgacctcttggatgtgcaagaacttcttcgatgtgcgtgctttcggggcggtgatgaccaccgagattaatgccggccaggtgcgtggaccgatccaactggcattcgccacgtctatcgacccggtattgcctatggaggtatccatcacccgcatggcggtgactaacgaaaaggatttggagaaggaacgcaccatgggacgcaagcacatcgtgccttacggcttgtaccgcgcccatggtttcatctctgccaagttggccgagcgaaccggcttttccgacgacgacttggaactgctatggcgcgcgttggccaatatgttcgaacacgaccgctcggcggcacgtggcgagatggcagcgcgcaagttgatcgtcttcaagcatgagcatgccatgggcaatgcacccgcccatgtgctgttcggcagcgttaaggtcgagcgagtcgagggggacgcagatacaccagcacgcggtttccaggattaccgtgtcagcatcgatgcggaagctctgcctcagggcgtgagcgtgcgcgagtacctctag

SEQ ID NO: 341564 - DNA, 633 bp, Pseudomonas aeruginosa
atggaagacgatgatctcatccccctgtctgccctgcagcactatctctactgccctcgccaatgcgcactgatccatgtcgagcgactgtgggcggagaatcggcagaccgccgaagggcgcttgttacacgagcgcgctgatcagcatcacgttgagcgacgtcatggcgtacgcgccgttactgccatgccactgcttaatctggaattgggtgttacgggcgtggcagacgtggtcgagttccgtaccactactgacgatgaggaacgcgcctatccagtggaatacaagcgcggtcggcccaaggcccatcgcgccgacgaagtgcagctctgtgctcaggccctctgcctggaggcgatgctcggcaagtcgctagcggaaggcgcgctgttttatggaaaaacccggcggcgcaaggtcgtgatgtttgacgatgcgctgcgccggttgacccagcaggtcattcatgcgacgcgagaattgctggccgtgaggcgcacgcccttggccgagtaccaggccaagcgttgcgacccctgttcgctgatcgatctgtgccagcccaagttgctcaaacgtagcaccagcgttgaaggctggctgtgtctgcagcttaaggagaagtga

SEQ ID NO: 341565 - DNA, 1041 bp, Pseudomonas aeruginosa
atgcggcgacagctcaataccctatatgtcaccaccgagggcgcctggctgaagaaggacggagctaatgtcgtcatggaggtggcgggcgagatacgtggacgcttgccagctcatatgctcgaaagcctggtttgcatgggccgcgtattggtgtcaccgcccctgctggggtactgcgcggagcagggcattagtgtctgctacttatcgcccaacggcaagttcctggctcgggtggaagggcctgtgtctggcaatgtcctgctgcgtcgagaacagtaccgtcgaagcgatgaccaggccggctgtgcggcactggtgcgcaacctactgctaggcaaggtgcacaatcaacgggcggtgctggggcgggctctgcgtgaccatggcgaggtcttggcggaagaggcgcgagtctctctgtcacatagccacaagcgtttgcggcgaatcaccgacaggttgcttgaggcacctggggtggaactgctcagagggctggagggcgaggccgcccaggcctatttcggcgtattcgatcatctgatccgtatcgacaacccgacgctacgtttcgccgggcgcagccgccgaccgcctctggatgcggtcaatgcactcctgtcctttctctacaccttgctgacacatgattgtcgttcggcgttggaaaccgtaggactggatccagccgtaggcttcctacatcgcgaccgtcccggcagacctagcttggcgctggatctacttgaggagttccgtcctgtgctggccgatcgcttggcgctttccctgatcaaccgcaaacaattgggcgaacgcgatttccgtaccttggacaatggcgccgtgctcctcaaggacgaggcgcgcaagacgttattgactgcttatcaggagcgcaagcgtgaggaagtacagcatggtttcctcggcgagaaggcaccacttggtttgttcccttacattcaggcgcaattgctcgctcgccatttgcgcggcgatctggaggcttatccgccatttctgtggaagtga

SEQ ID NO: 341566 - DNA, 291 bp, Pseudomonas aeruginosa
atgatggttctggtcagctatgacgtgagcactcaagatgctgcaggtggcaagcgcttgcgccgcctggccaaggcctgccgcgattatggtcagcgagtgcaatactcggtgttcgagatcgaggtagatagcgcgcagtggacactccttaagcatcgtctgtgcgacctaatcaatccggaacaagacagcctacgtttctactacttgggcacgaactggcaacatcgtatggagcatgttggggccaaggttgtactcgacctaaatggcccgctgattctttag

SEQ ID NO: 341567 - DNA, 168 bp, Pseudomonas aeruginosa
atgaacagcaaagatgaccaagcaggctcacattgctcatttcgggatcgcgatgagccgttgaccaggcagcccctcagcgccgacgagatatcagttctggagtgcatggcgcttatcgaaaatctcgaccagtacgaggtgcagtgtgtcgaagagagcgactga

SEQ ID NO: 341568 - DNA, 165 bp, Pseudomonas aeruginosa
gtgcccaactggaccttcgcgccgcagataaacctgacggtgcaaggcaacgtacacgagccgcagcgtctggccgacgagctgctgccctacctgcaacgcatgcttgtcgacttcgccgacgagcggcagcggcgcagcctctacgatccggcgatggtctaa

SEQ ID NO: 341569 - DNA, 504 bp, Pseudomonas aeruginosa
atgattccgcaaaccctgaccaataccaacctgttcatcgacggcgtgagcttcgccggtgacgtgccatccctgaccctgcccaagctggctgtgaagaccgagcaataccgtgccggcggcatggatgcgccggtatccatcgacatgggcctggaggcgatggaagccaagttctccaccaacggtgcccgccgagaagcgctgaatttcttcggcctggccgaccagagcgctttcaatggcgtgttccgtggctccttcaagggccagaagggcgccagcgtgccagtggtggctaccctgcgcggcctgctcaaggaggtcgacccgggcgactggaaagccggcgagaaagccgagttcaagtacgccgttgcggtcagctactacaagctggaagtcgatggccgcgaggtctacgagatcgatccggtcaacggtgtccgcgcgatcaacggtgtcgaccagttggccggcatgcgcaacgacctcggcctgtaa

SEQ ID NO: 341570 - DNA, 306 bp, Pseudomonas aeruginosa
atgaccgtcgccacgacaccggtctgggtggcgttgggttgcctattcggtatggtctggacggtattgccggcagccgcgttctgggtcgtgtccctacgcttcacggccgcacgcagcgccaaaaccagactggaatccctgccgttcaactcgattcaggccgcgatgtatcgtggtagcgactttgagagagccgccgagttggttgccccacaggtgacccttggttacttggtctacatcggcctgacagttggcatcatcctctaccccatccaggtgtgggtgcggtcacttttctga

SEQ ID NO: 341571 - DNA, 774 bp, Pseudomonas aeruginosa
atgtcggcagtcagatcaattctgtgggcgttctggtcgtatggggtttctctgccgatgcacttgctgagggcagcgctgtccggtgccctgagcttcttctatccgcgtggattcataccatgcaatgagttagctgatccttttgccgaggaatgcgcgacccgcccggttgggcagagcgtgcggctgccgtgggtggacagttcggcgtcccaaaccctggcaatgaacagcactggacgcctgctttcctatatcgctattgcgagcggctggttcggcgtggcggtgaaggagggcactagcggctcaatcacgaagcgatcctaccgttactactaccgccgcagcttgaccggcaactggtttgcagaaatctggtctgtgcctaagtcgggtgttattgctgcgatcctggcgctcccgttcatcgatatggcacgtgctgtaatgaagggccaagagcatggccatgaaggtctgctgttgctggcttctggcctgctgctggtgacgtgcttcctgccgcgtgcgttgcttggccggggcactcactttgctgcaatcgcgccgatcaactgcagtgggttcggtggctatggcttcgcccacatcatcaatatggctgcggctctggggggctgtcgttcctttgggttgcatttagcgccgggtggagcgcctcggcatccgcgagttacgccgcaggctttctcagcgggcaagtgcagatgttcgcccatgaggctgcggtcaatggcgtacttatga

SEQ ID NO: 341572 - DNA, 1323 bp, Pseudomonas aeruginosa
atgggaggaaaacgggtcgccgaggaagtcgttctccgggcggaaccagcgcggggaaaagtccgatggtacccggtcgctcatcaccggcgcgccgttggaaggatcgcgagtcaccgaagcccagcgcatatgcagccagtcgtgcatgcccagctccatctccgagccgaactgaccgagcgtcagtttcgccaggtattccgggtcctggtattgcgactcccagaccaggaaattggcgtgatagccctcggcgcttttcagcccacgcagccactcggtgtattcgtcgtcgtccaccgcgacccaggccggcgggacggaacagccgtcagggttgtcgaagtagcgcaggaagccgacccggtcgtgggccagcggtacgcccggcagcggcaggcgccgccaggacggcaggtcctgcatcgagcgcgcggtatgcagcatgtgccggtgcatgaagaagaagtcgataccggaagcattgcggtccttgtgacgaccacgggcgtcacgctcgcggtccagtgggccgggctgccagccgacgccgcgcagggcgttgcgctgcttctcggaaagtcgatgccacttgtcccgcgaggcatgccagagctggtggaagaggcgatgctgcggcgagatcagccaggcgagcaagcgttcgttgaggccgatgcgctcgcgagccagcggaaacgggcgcttgaccgccacgaagcggaaatcctcctgcgcttgcagtggcgagcgcacgaggcgctcgatgcgaccgctgagggtgccgtcgccggcattggccagattgtcccagacctcgtcgaagaccgccgagcaatcgtagctcggggtcatcgaggcggtgttgccgtccaccaggcgccagcggatgcgcgcggagcgcgcaccgaccaggtcgccaagcaggcggaagcgcggttcctgcggccctctcaggcgctccggagtatccaggtatccgatcaggcccagccccctgggcgccacgtcgagcaccagctccaacccctccagcggcaaccccggcaggccggcgtcggcgccgagcaggcgcaggtcccagataccgcgcaggcggtcgcccaggcgcatggcctcggtggcggccaggtccagcgtcgcttcgccgggcgtggccgggtgctcctcgtcttcgcgcaggcgggccagatgacgatgtgtgtagtaagccaccggcagggcagccgctccggtgagcgccaaacccgccatgaatccgcgtcgagaaaccgtcatcgtcctacctgttcagccatgaagctcgctttatccagctag

SEQ ID NO: 341573 - DNA, 1347 bp, Pseudomonas aeruginosa
atgactagaactcgcaaaagaacggcgctttacctcggcctgccactgctcatcgtcctgctggctgtcggcggctggctggcctggacccagtggctgggcagcgccggctacccgcgcaaggtcatgcaacacgcagaggagttgcacgaacgcatcctctccttcgacagccggatcaccgtgccgctggacttcggcaccaccggcaacgaggtggacaaggacggaccgggccagttggatctggtcaaggccggccgcgggcgcctgtccggcgctgccctggcgatcttcggctggccggagatgtggaacggcccgaacgcaccgcacaagccgacccccggtttcgtcgacgaagcccgccaccagcaggaaattcgttacaagattctcaccggcatggtccgcgactttcccaaccaggtcggcatcgcctactcccccgaggacttccgccgcctggccatggaaggcaagttcgccatcgtcatgagcatgctcaacgcctacccgctgggcgacgacctgtcccaactggacaaatgggccgcccgcggcgtgcgcatgttcggcttcagctacgtcggcaacaacgactgggccgactcctcgcgcccgctgcccttcttcaatgactcgcccgacgccctaggcggcctctccccgctaggcaagcaggcggtcgaacggctcaacgatctcggggtgatcatcgacgtctcgcagatgtcgaccaaggccctggaacaggttgccgccctcagccgcgcgcccatcgtcgcctcgcactccgcgccgcgtgccctggtggacatcaagcgcaacctcagcgaccacgagatgcaactgatcaaggacagtggcggcgtgatccaggtggtcggcttccccgcctacctgcgtccgctgagcaaaccgaccctggacaagctcgacgccctgcgcgcgcgcttcgacctgccgcccctggaaggcctggactatgccctgatgccgggcgatccgatcatcaccatctggccggaacaacgcttcggtgaatacgccagcgccctctacggcatcctggaggaggagcccaaggccggcctcaaggaactggtggacgccatcgactacacggtgaagaaggtcggcatcgaccacgtgggcatcagctcggacttcaacgacggtggcggcgtggacggctggaaggatgtcagcgaaatccgcaacgtcactgccgaactgatcacccgcggttattccgatgccgacatcgccaagctctggggaggcaacttcctgcgcgcctggggcgaagtgcaaaaacgcgccaagccgacagctaccccctga

SEQ ID NO: 341574 - DNA, 165 bp, Pseudomonas aeruginosa; identical to SEQ ID NO: 337753

SEQ ID NO: 341575 - DNA, 597 bp, Pseudomonas aeruginosa
atgagcaaacctactgcgaaagcccccggccgccacggcggccagggacagctgcggatcatcggtggcgaatggcgcagccggcgtttcgtctttcccgacgggcccggcctgcgaccgaccccggaccgggtccgcgagaccctgttcaactggctggcaccctatgtcgaaggcgcacgggtgctcgatcccttcgccggcagcggcgcgctgttcctcgaggcgttgtcgcgcggcgcccgcgaagggctggccctggataccaacggcgaagcggtggcggccctgcgcaaccacctcgacgcgctcaagtgcggcaccgcccaactggtcctcggcgatgccgtgcgctacctgggaaaccaggctccgagcgccttcgacctggtgttcctcgacccgccgttccatcagaacctgctgcaggacgcctgccgcctgctcgaaacccgcggctggctgaaccccgacgcctggatctataccgagagcgagagcgtcccctcgtccctcggcctgcccggaaactggcggctgcaccgggaaaagaaagccggcaacgtacattacgcgctctggcagcggggagcctga

SEQ ID NO: 341576 - DNA, 291 bp, Pseudomonas aeruginosa
atggccgccagtccctactacctgcaccaaacccacgccccggactgcgcctgctctgtgtgctggtccgcaaggcaggccatcccattgcacagcccgtcgccgtgtccggactgccggccccctgggctgccctatcgggaaggtggccgctggctctgccgtccccgttccttctgcgcgaaacacgacccgtcccggcgtccgccgaagtactggcacgttgtgtacgacagcgggaagcccacgccctttgtgcccgtgcgcgaagcattccaactggagggctga

SEQ ID NO: 341577 - DNA, 1206 bp, Pseudomonas aeruginosa
atggaagctgagaaaaccccggataacgtcgtgatcctcaaccacgaccccatcgtcgacccgttgcgccagggcttgttgctgctctgccggcagcttggccgaccgctcggcgacgccgaactggtggacggcatgccgctggagcacggtcgcctgccgttgcacctggtggcccgcgcgttgcgccgcgccgacatcaccgcccaggtcacccgccagccgttgcgccggatcgatcgctacctgctgccggccctgctgctgctcgacgacggccgcgccctggtgctggtgggcaacgacggcgagcatgccgaggtgctggtaccgcagagcgacggcggaagccagaggatgccgctggccgagctggaagcgctgtacagcggcacggcgatcttcgccaagtgccgctaccgcccggacgggcgggtcggcgactacgccagcgccttgcccgaacactggttcttcggcccgctcaagcggctctggcgttcctacgccgaggtcgccgccgcagcgttggtggccaacgtcctggcggtcgcctcggcactgttcgccatgcaggtctacgaccgcgtggtgcccaacgcggcgttcgacaccctgtggatcctcgccagcggcgtggccctggcgatcgtcctcgacggtgtcctgcggatcatgcgcggccacctgctcaacgtgctcggcaagcgcctcgacctgcaactctcgaccctgctgttctcccgcgtgctgagcacccgggtcgccgccaagccggcgtcgatgggcgccttcagtacccaggtgcgggagttcgagtcggtgcgcgagttctttacctcgtccagcgcggcgctgatcagcgacctgccgttcgtggcgatcttcctgctgatcatcgccgtgatcggcggccatgtggtctgggtgccgctggtggcctgcgtgctgatgatcctgccggggctgctgacccagcgcctgctcggccacctgtcgcggcagaacctgcgcgaaggggcgatgaagaacggcgtgctgctggaagccttcgagcacctggagacggtcaaggcgacccgcgccgaaggccgctgcctgcaccagtgggaaaccctgaccggcgaactggccggtacggcgatgaagacccataccctggcctcgaccctgagctactcggcgagcatcgtccagcagctctga

SEQ ID NO: 341578 - DNA, 1278 bp, Pseudomonas aeruginosa
atgcgcgggcgcaggcagtacgcgcgcaagggacggcggcatgggaagggagccatctggctcctttccctgggtctgccgatgttcgcgtcggccatgcccctcgaccaggcggtcagggcagggctggcgatccacccggaagtacgatccgcgatggccgaagcggaccgtgcaggcaccgaggtggagatggccaaaggggggtactacccctccgtgacgatgtccggggggccgcaggagttcgacttcggcgagatcgtctacgatctcaccgcgtcgcagatgctgtacgactggggtcgggtaacgagcaaggtcgacagcgccagcgcgacccagcgcaagctgtccgaggcggtgctggtggcgcgcgacgatgcggcgctggatatcgtcgagacctacctcgacgtgcttgcctcggagcgccgggtggaggcggtgcgcgaacacatccagcgcctcgacggcatccgcgagatgacccaggcgcgcggcggcgacggctacgccgaccgcagcgagctggatcgcgccaatctggaactgtcgcgggcccaggagcagttgtcgctggagaagggcaacctgcaggacgcgcgcaaccagtacgcgatcctggtcggccaggagcccgccgacctggtggagcccgagccgatgtcgctgcaacgctacctggcggccagcgatatggcgcgggtgatccgcgaatcgcctttgcagcgcaaggccctggaggacgccaatgtcgccgaggccgaggtccgcgaggccaaggcgtcgctgctgccgcaactgaacctggaggccagcgcgctgcgccgggagatcggcgggcatccggaaagcgactcggtggtatccctgcgcttccgcatggacaccttccaggggctttccaacttccgccggccgaccgccgcgcagcagcgcctggagtcggcgaaatggagcgccgacgcgatgcagcgcgacatccgccggcaattgcagaacctcttcgacaacggcgacacgctgcgctggcgggaacagtcgctgacccagcaggtgaccgagtcggagcaggtcggcgagttgtatcgcgaacagttcgaggttggccggcgcgacgtgatcgacctgctcaacgtgcagcgcgagcagttcgaggcagagcggcaactgatcaacctgcggatcgaacgcaagcgcatcgagtatcgggcggccgcgcaagtcggcctgttgggtccgctattggagaaccggctgaatcatggaagctga

SEQ ID NO: 341579 - DNA, 1011 bp, Pseudomonas aeruginosa
atggctagaaaaccactgagtcgaactcttcagctaaagccggttcagttttctaaagagaggacggggcaggaaaataatctagttaggttgatgcatcagcttagtgacatgtgtcctactgtcgggcaaagaatgtggacacgatctttaactcttgaggatggtactgtagttcctcagtattgttactttttcaataattaccagcgtttggatgaacttacctgtatttttgaagtttggtcatttgagccaggggttatgccagtcagtatggtgccagacccgttgcaggctaatgctgtgattgatctgagtcaatgggatgaagatggtagtgatggtcgggagttaattcatatctctcatgttttggtttacggtaaggctgccattgtcgagtgtactcgtggaacagggggagtgaatgcaatacagagttatctaaataaattagttcgtgatttggggctttcaactaataataggttttattttacggatgccgtctcctccagtttacaaggagagattaggcgaggcggtggtgctacaggctttactttggggttaagttccgcagtcgcaaacactacaaatccgttgcttggaatgttgagtagcgctaagaactatatgccaaactcgggcttggtaactgtggggtggaaatctaaaacgcaactatccactgatgctgtggttgcggcttataatgatgctcaaaatcagagtgaaatagatagtgtaattattcacttgaaggatgggtcgtctattcgtagcttgtctaagtttaaaattaagagtaatattgaggtggaagatataggaggtaaaaaccctaatagggatgagctgtttaggaagatgctggtatatttagaggagttattggagccggccgatcaacatggaagagtactggaccagactggagcgttggctgataatgaaattttcattcctaattccagaagaaataaagaacgcaacgctggcgaataa

SEQ ID NO: 341580 - DNA, 1239 bp, Pseudomonas aeruginosa
gtggcagaggaagttaaggcggttcaggttgagcgctcctggaaaaatatgagttctgatgaatttttatcatggattcagtcaactcctatttctgaactgtctgatttgtttttgactgctccgcaagggatggttgtaagggtctataaagagctaagtgctgataacttgttgagagtttttgctaatgttagtgaggatgccttaaagaacttgctgaagttctctagagggcagtatttagttgaactgttgagtcgggcttcgaatgagctcgtagagagagttattgactctgcacctagtcacagaagtagggttgagcttgctaaatccctgccagttgaaagaagaaggcgttggcttgactacgtgaaggaacagcaagacgcaattgaagaggttaaaatatctacttctcatgccaaaggagcattgtttgaggagagaaataggctccttcaggatcttgatagtgctattcgagctcgagaggatacacttcggaactatgatgaggaaagtagaataaagcgctctcagtatgagcgtgatatagatgaagcgaagcagcgcttatcagatctttatagcgaaatagaaagccggggggagctgattaagaggcgtgagactgaactgtcagttcgactggctgagttcgaggaggcgaatcgacggcaagttcagcagcgtatcgaagctaaggtcccagaatttgtagcggacgctgtgaaagccttggagcttcgtgaggccctttatcggcgtaaggcaatgcaatggagtactcacggcacactggttcttctggcagctatctctatagcgatttttgtgtctctatatggatactcttatggcgggaaaatagagagtctttcttggcaggccatgatgtttgtgtcgttcaaggggttggtggttgtcgggatactagggttatgggcgaaacatgccttttctgttagtaatgcatacatgcatgaggctattaaaaggtctgatagagctcatgcgataaacttcggaaagctttacttggaggtgtatgggaattctgtagagagaaaggagttgatagacatattcgagaactggaatattgccagcgaaagtgcgttttcgaagatgaaggctgatggttttgagcctaaggttcttgatcagttggtagagatcacgaaaggcttaaatctagcaggtcgtgaagaaaaaagcgctgctaaactataa

SEQ ID NO: 341581 - DNA, 168 bp, Pseudomonas aeruginosa
gtgccgtcctcgttgaccgcgcgccacatcaggccctgggtgatgccgttgacccacatcgaagcgatgtacagcacggtaccgatggtggccagccagaagtgcgcgttgatcaggcccaggctgtacatcttctcgcggccgaagaccttcgggatcaggtggtag

SEQ ID NO: 341582 - DNA, 3828 bp, Pseudomonas aeruginosa
gtgtttgactctctaaaaaagcaggaatcctttcaaaagtacttaatggataaagcagctacccaaagcgtctataactatcttcttgcggacttggccgagtgggggctggaagaacttaatgactggttgagtcggaatgcatatcttgaccccatctttgatgctgtaaatataaactttacctctgcccttaactttgtccagcgcgttgatccacttgctttggaccttgatggcgatggcctcgaaaccgtttcctccaactcagggattaccttcgacttcgacggggatggcctgaagacagggacgggatgggtagccaaggacgatggcttccttgtctgggaccgcaatggcaacggaaccatcgataatggtggtgaactgttcggtgtggacttcgtcaagagtaatggccagaaagccagcgatggtttcgatgccttgcatgacctggactccaaccgtgacggtattttcgacgtcaaggatgaacagtttggcgaactgaagatctggcaggacttgaaccaggacggtattgctgaggcaaacgaactcaagagcctagacggtcacaacattacggcaatcaatcttgacattgagaaatccaccgaggataacaatggcaacctgatcagcgcaatcggcagctatagcaggggtgatggtaccagcggtcttgtcaatggcaaccaaagcctcgcaggcaatcttgatcttgcgtccaatccattttaccgcgagtacacggaccgcattgcgctggatgataccgccaagagcctaccagatatgaaaggctcgggtgctgtccgggacctgcgtgaggctagcatgctcaataccgggttgaaatcagcgctctctgagtatgcgcaagccgatacccgtagccagcagatgttgcttctggatcgcctactgaccgagtgggccaagacatcgaactatcgaaccttcgatcaacgtatctctgacctgagcaccaagacctacgatgtggcctttggatggtcctgggaacaggatagcttcgcagcaggtggcggtagcaccagcagcggctctctgagcgagggcgatcacggccccacccaagagcagttggaaagaaaggcgcttctggaaaaagtgaagcttctggagatattcaatgcccagagcttttttaacttctcccctaaagagtggagtggatctgcagacaagccagcttcattcagtttacagtctggtgcaagccagttttcagtgtccggaatcatgatcggcgggaccattacgctgacagagaaagatctgacctttaactctggccaggttagtcttcttgaatctgcctatcaggcattgaaggactcgatttatagtgctcttcttctacaaacccgtctcagaccatatgtagaagagattgatttaacgctagagtcaggaggggtctctcttaacttcgagaaagtccttcagcttttccaggagaactttgagaaatcccatgtcaatggagcgattgatcttctagagttcctgggacagcgaatctcgaccggcggatcaagtctgctaggacctttggctgaagctcaattgcaaacattgacgccaggcgaaatccagcagatcgaagcgaacggtattggcttggagatgggggggctgggcaacgatctagtaaaaggcagttctggccaagactatctgttcggattggctggtaacgactcactctatgggaatcagggaaatgatcttctgtctgggggaacaggcaatgacaccctgttcggtggtcttggcaacgatacactgatcggtggggcaggtaatgactacctgcatggggacaccggtaatgacatataccgctttgatcgcggctggggccaggataccgtctacaactatgacagcagcgccaacagggtcgatgccatcgagttcggtaccggcattcgcgcagaggacatcatcctcagccgcaatagcgatgacctaatcctgctcctcaagggcagcagcgatcgcatcaccgtcagcagctacttcaaccaggatgctgcgggtagttatcgcctggaggaaatccgcttcgtcgatggccaggtcctgaacatcgacgcagtgaaagccttagtccagaaaggaacaactgaaagcgatcggctctacggctacgccgtgcccgataccctcagcggcggcctgggcaatgactcactctacggctatgccggcaatgacctccttcaaggtgatgagggcaacgacacgctctacggtggcgccggtgacgataccctcgtcggcggtctgggcaacgactatctgcagggcgaagccggcaacgatgtgtaccgcttcgatcgcggctggggccaggataccgtctacaactacgacagcagcaccagcagggtcgatgccatcgagttcggtaccggtattcgcgcagaggacatcaccctcagccgcaatagcgatgatctgatcctgcttctcaagggcagcacagaccgcatcaccgtcagcagctacttcaatcaggacgccgcgggtagttatcgcctggaggaaatccgcttcgtcgatggccaggtcctgaacatcgacgcagtgaaagccctcgtccagaaagccacggatggaaacgatcgactctacggctacgccgtggccgataccctcagcggcggcctgggcaatgactcactcgacggctatgccggcaatgatctcctccaaggcgacgaaggccacgacatactctacggtggcgctggcgacgataccctcgtcggcggtctgggcaacgactacctgtatggcgaagccggcaacgatgtataccgcttcgaccgcggctggggccaggacaccattcaaaacaacgacagcaacaccaacaaggtcgatgccatcgagttcggcagcggcatcagcgcgaatgacatcctgctcaatcgcgacagcgacaacctggtgctgaccctcaagaacagcacagaccgcatcaccgtcagcagctacttcagccaggacgccacgagcaattatcgactggaggaaatccgcttcgtcgatggccaggttctgaacatcgacacggtgaagagcctggtccagcaagccacggatggaaacgataggctgttcggctacgccgtggccgacaccctcagcggcggcctgggcaatgactcactctacggctatgccggcaatgacctccttcaaggtgatgagggcaacgacacgctctacggcggtgcgggcaacgacactctcatagggggagcagacagtgactacctatatggagaggatggtgatgaccgaatcgaaggaaataatggtaacgatacgttatatggcggagccggcgaagatactttgattggcgggtcaggcaatgactatctggcaggagacgcaggcaacgacatctatcagctaggtaatggctggggacaagacaccattaacaattaccacaccgagtcgaatgcgttggaccgtctggagttcacggacaacataaccgcagacaaactttggttcagcaagaacggaaataatctcgaaatcaacttgattggcgcatccgacaaggtcagcatcagcaattggtattcaggcaagaactatcagatcagccaatttaccgcagccgatggaaaaaccttactggaaagccaagtacaaaacttggtaaatgccatgtcgtcgtttggcgtacccgccggaggagaatcagaaatgacggtagaacaacgccaacagctagaggtcatcataactgccaactggcagtaa

SEQ ID NO: 341583 - DNA, 1140 bp, Pseudomonas aeruginosa
atgaaggtcgtaagactaaagcttaagaattggcttaactttagagaggtggatgttcctttaacggatagatgctatctgttagggccgaacgctgcggggaaatcaaattttttagacgtttttcgatttctgcgtgatgtggcgaaaacaaatggcggtgggcttcagaaggcagtgaatgatagaggagggattaagaaacttcggtgtttacaggccaggcgtgatcctgttgtgcgaatagaagttcacctggaagataatcagacgaagtgggaatatgccctggcttttcaaagtgaggggaaaggggcacagaaattagttgttatagaggagtcggtggtaaaagataatatggtcttggttatccgtccggataaacatgacgttcaggatggtttgaggctcactcaaacttatcttgaacagatcaatgctaaccaatccttcaggcctctgagtgagttcttttctgcaactacgtatttacatttggttccgcagttgctgcgatttggtgagaagattgcaatcagagctatggaggatgatccgttcggtcaaggtttcttagagcggttggctaaaacgcaggatcgtacacgagttagtagattgaaacggatcgagaaaacccttacggcggcgttgccgcagtttagggagctccagtttataaaggacgaagcaggtaaacctcacttgcaggctcggtatgagcactggaggccgaatgcaggttggcagactgaagagcaattctctgatggtacattacgtctcattggtcttttgtggtcaatgatggatggagataacttgctgcttttggaagagccagagctttccttgaatgatgcaattgtagaaaagattccgttaatgattgataggattcagaagcagtcgaagcaacgtaggcaggttctaataagtacccatagcgaagcacttttgaaaagtccgattgatgctaatggcgttctcttgctggagcctacagataaaggaaccagagttcggcagccagatagcgcggagaagaaaatgcttgattgcgggctgactgtggcagaggtgattttgcctaaggctagacctcaattgactttgcagggaactctttttgattag

SEQ ID NO: 341584 - DNA, 273 bp, Pseudomonas aeruginosa
atggcaactcgaaacgtcgtccttcctgatccgatggagcaggacatcaacgagctggtggagaccggccgctatcaaaaccgcagcgaggtcatccgggcaggcctacgcctgttgctgcagcaggaagcccagaacagcgccaagctcgaagccctccgcaacgcaacatccagtgggctgatgcaactagagcgcggcgagtacgacgagatcaccagcgacgacctggcccaatacctcgacgagctcggcaaccgggcgagccactga

SEQ ID NO: 341585 - DNA, 6048 bp, Pseudomonas aeruginosa
atgtccaagaaaccgaatccatcaacctctgtagctcctgcaactgcgccggcggaaggcgaacgtcgagcactccggggatacattggccagtacgagcgggcgggcgctgccatttatgctgcgctcgagcgcgacgagctgctctggatcggcgtcgcagaccgcaacgcgggcattgccgacgacttggtgctcggtttcgatgggttggtggtcggccaccagttcaagacgtccaagttcccaggcactttcactgttgagacgctgtttactggtgccaacggcctcttgaggcccctggttcatgcttggcagtgcctgcgcaaggacaatccgggaagccgtgtcgaaattcgcctagtcgtcaacgactttccatcgattacggacaagccaggcgacggcacgccgccgcacagcgcggcattccttgaagagttccagcagcatccaaatcgatcgctgtcggattggtacgcggcggaatggagccgactgatcgaccacctgcgccgtgaagccggcctaggcgatgacgatttcgaacagttcttgcacagcctccgcgtggtgtgcggagctgcggcggacttcatccagtcgcacaagttgaacgccgagcaggcacggcaggcgtccgagattgcaagcgtactgcccaagctggtcgccgatgcacgcgacaaagacaggtggacgcgtgacgaactgctttgtgagcttggctggcgtgatcccgccaaaacgctgctcatccaccggttcccggtcggcgcctatgtccagcgcaaccgcgacactgaggccaagctgctagccgcgctgcatgccgccgaccagggctacgtctcactcataggaccgcctggctccgggaagtccactctcctgcaggttgcgctggccactgaggctaatatccggctcgttcgctacttggcgtacgtgccaggtgctgctcaaggcgtgggtcgcggggaggccgacaacttcctgactgacgtcggcacgcagttacgcaacagcggtttggttggacttcgtcttcgcgacgactcgctgcatgagcgccgagagcagttcggcgtcctggtacagcaggctggtgaacgcttcgaccgcgacgggatccgaacaatcatcgtcgtcgacgggctcgaccatgtgcctcgcgaagagcggccgaccaattcgcttctgggcgagctgcctcttcccgctgccatccccaacggggttgtgttcatcctcggcacccagcggctggatctcgcgaatctgaagcccgccgtaagagagcaagcggagaaaagcgagcgacaggttctcatgggacctctcggccgcgaggaggtcgcccggatggcagatgcgcttggcctgcctgccgagattccaagattggatctaagcaaactatcgcatggccacccgctggcaacgcgctacttaattcatgcgctgttgcacgcggacgaagccggccgtaagcaccttctcagcggcgggatgccgttcgacggcgatattgagaccgtgtacagcgctgcttggcgcgagatcgcaagcgatgtcgatgccatggacgtgctgggctacatcgctcgtgctgaggcacctgtggacctgcggctgctggccacaatggtcaaggagtccgcgattgaacgcgctctgatcgttgcacggcacctgctccgtagttcatcccaggggtggagcgtcttccacaacagctttcggctgttcgtcatcgctcaacctcgaacccgcctcggaagcgtcgatgccgaatactcgcagcgcgtgtaccgcgacctcgcccagttggcgaagaacgcgccgcccgaatcggcgcagtactggcttgagttgcgctaccgcgcccgtgccggagacggtgccgatgtacttgcgctggcgatgcccgctcgcttcaggcagcaactggctgacgggcgttctatcgccgagatccacgccgatatccgcctggctctgctggcagtacgtggaacgcacgacgcgaccgccttctcacggctgctgctgtgtcgtgacgaagtggggcggcgcgaaacagcccttgagtacgccaaccagcttccgctggcgatgctggctgtcggggacatcaattcagccctctctttcgtgcagtacttccccagccagggctacgaggtcgttgacgccctgttggcgcgaggggacttcgagcgggcgaaggaactgtttgaaagcctcgagccactgtcgcagctccatacgtccaagttccagaaccacgggcacgcccacaacataacggaattcgagaggtgggcaaggcgcgccatccacttccgagacaccgagcagatccagatagcgattgaccacctcgccgcagaggggttacgccagcccgaaaaggtggatccgcaaactgtcgccgcgctgcaactgcatctgaggagggaagccgcagaggcgatgctccttcagaaggttggcgccgatccacaagacctctgcagcaagctcggggtagccaacgaagacaagccttcggtgatggttcacgcaggtcttgtggccactcggcgtggcgacgttgcgcaagcgcttgccctgtttgatgctgccgccgcccttcctggcttcgtagaggtacccaacggctaccgacgccggatggcactgattgcattcgaagctgaccgtcgtgacctagccgaggccctgttcgacaagctggtcgcaccgatgatctctatgtgcgacgacgagacggacctggctgggctgggtaatctggtcggtgcggtgatgcatcacgcgaggctttgcacgctgctcaataagccgctgccaagcgcgacaccgtcgaagcacaccttccttcatccgttccagcagcacgcctcgacgataggcgtgctgctaggtcgcgccgccgtcgacaacgcgtccgtgccggccggcaccatccaggacgaagcccgcattgcccttgggtacgtcctacgtctgacatcagaaggcggcagcgagtcatatcgcatccagcaggccttcaaagcggtccctatgctcgtgtcagcgctgctgaggctcggcgccaagcgcggcgagactgagtaccgtgcggtacttcgggaaattgacgcagccatcgcctcatcgacgcaggggagcactgcgtacctgcgacgcagattggccgtcgatgcgtatagggttgacggtgaccgggtggcggccgtcgatcgactcaacgcactcgtggcggagcttcaggagagcacgccgagcgagcagatcgacgggttggccgatctggccatcgcgttggctgcggtcggggacttagagcgggccaaacagttgctggcgacggttcccgagcaatgccttggctacgcgttggcccccaagaaagacccgcagtacgcagtctggcgagacatcctggtcctcgcgaacgccgctgacccggagaaccgtgtcaagcgagtatcgaccttaatgcgccaggtcggcggcatgaccgaaacggaagggtcgtcggccgcgcatcgtttgacgatgtcgctaatcgaggaagcgacgcaggtcggacctcgcttcggcttcgaggtgtcaaagacactggcggattggaatctgattggctggccgaaccgtgttgacctgctcatgacggggatggtgcggcgaagccctgaactcgtcttggcttgcgcgacggtctggtgcggtctgtgtctgccgttctacatggaaccgtactaccgggacccgcaccacgtcggtgacttcatcgacatcgccgccgacgccgcaggacctggacagattgaaccgctcgcgcggatgtttttggcggtgatcgaggtagccagcagggcacacgagagggtcggactgctccagcgccttcgcaccgctgccggaagacatgggttttcatcggccgagctcgacgccgccgtagcccggtggatgtcagaagcgccggaacctcgacactcgtatacgccaagcaagtacgactcggagaccactctcgagcagcttgagcgcgcgtttgaagcggatggcgacgaactgaactacaacgccccgtaccgcttcagagatctggccgatacggccccgcttcatctggcgcggaggatatttgagcgctggcaggtcttgctggacgacgcgcgctgccgcttcctgatggttaaaaggttggctgcggcgggggaggtcgagtacgccaagaggctgatgcaaggctacgagtcaagcaaggacccctggagttcctggagccagtggatgggtggcggtaagttcttctactttgaggcgaagaagctcttgcagggaccatccacatgcccagccgccttcgagaacattgtcgattcagtaacggcgggccaggagaacacccagtcactgctgacagagctggattcgatactgccggtaatcagcgcgacgccggattggccggccatctggtcgctacttgaggagcagatggcctgcactcgcgagttccagctggggcgacccttccagccgagcgagctaccgctcagcgacacggaacttttggaggatctgctgcactttgcctatcggctgcccgttgcagaagttcagcgacacgcacgcaattgcacgttgagcctggcaaggcaagccggattcggccaagctttgttcaagtcccttatgcggcgacttatagccggcgaattagatgcccccttgcaggcgctcggaacgctgctggctgctgacagcgcggaccttgcccccgagttgggcagcgccgtggctgcgttggtcagtcaccgtgacatcgcggtggcagagtcagccgcgctcttgtcgcatcggtggaggcaggctgtccccttggacgcgataccactgccgctcttctatcgccttgaactcgagtacccgccagagggcgaccaggcattcacggacgaaagaactggtgcaatgcgcgtcgagtcgccgcttggctggaccgagatgttgcgctcaacggcacgtcacatcgcgagggcggcaggcattgaggagatgacagtccgccgacgcgcggcgatgttcatccaggattggggtggacttgaggcattcgggccctctggcatcaaaaggcttgagactcagcttcgcgtgctcgacatgcagatcacttacctgaagccccacgcctacattgccattgtcgcacttcgccacgtcgcgggagaactgcggctggccggcaaagtgaaaggcagcgacatgcccacgcttttggaacgtttgggctgcccgcttccgcctcgaccgctgaagctcccgcgagggcgccccgagtggatccgaatgccgctgttgaaccgaagtgcgggttggtccgagcgagaacggaagtggattgacgaagtcgacggtgacgttgcccccttcccagcagacagccacggccaactcgtggccgaagtatcccgcttcaagattctcaagccacggctgtcggagcaccgcctctaccgctttagagcaccctcggcagagattgacagtgaagacttcgacgactgctatgccaggctgcccatcgctgtttggcttggccagtacgtcgcatttgacaatgatctggcgccaacgctggtaaggagagttgtttgctcggtggacatgggctttgacgcagcggcctattcgttcgctttgtgcccgaactgggtgaagcggcttcgctggagcgcgcatgacgaggagcccggcgtcttcctcgacccgagcggcgctgtggtcgcaaggctctgctggtggcgtgatgccggcccggttgatatcgatgcggagtccctgtggggcgagggttgctacctcgtcctgacgtcattaggcatcgaacaggtcaccactgcccgtgggaagccggatctggacatcagcgtgttcgcaagcaggcagatcgagcaaccgagcagctacggggagtctctcttgaagactgcgaagaacggttactcaatctaa

SEQ ID NO: 341586 - DNA, 3555 bp, Pseudomonas aeruginosa
atggcgatcgaagggaaaattctgagtaatccattttcaacaggaagtggtggcgcaagatttgaagcaaatattcaagcaacttttgttacgcttatgcttagtggggggtattcgccttgtctgccaaattggccaatagtagagattaagctacaagggaaagtggctggtttcgagacggatgatcttatcgtttatgttgaaaatccatctacgcaagagcgctgtaagttgcttggccaagtaaagcattcgattggtgttacggaaggtgactctgtttttcaagaagtaatacaggctgcttggattgacttcaataatcccgagatttttcgaaagggtgttgatgttatagctctaatcactggtccgatcagtgcgacggactcagatggagtcagcggacttctggagcaagcccagcggtgtaaagattcggaggagtttattacgaatgtaagtcgggcaaggttttgttcggaaattgtccgtagaaagctgaaggcgttcagagtgcagctaaaaagagcaaataatggagttgaccttagtgatggggaaatattcgattttcttcggagcttccatcttcttggctacgacctgtctcgcaaaggtagtgtagtatcatcccttcttcaatcccatatttctcagtttaataaagatattccggataagatttggtatcatataattaatgaggtgcaggcgtttaatcaggcggccggaactattactaagtctagtttgggcagtgaggttgtcggttattttgaagagccgaagctgacttacattccaagggagcttcttggggtcgaagcacaagttcaagtggagcgcatagagacaagcgtagattggaagacgcaccccgccgctgcgtttatagcgcaagcgaatttgcttggggcgtggaatgaggcatctgctgatgatctacgagtggttgaagagtttgtaaaagaaccatacgtaaaatgggttgagaaacttcgtgatgtgctttggattgagggctctccattgacacatcgtgatggcgtttgggcaataaaggatcgtgaaagatgttggattgattttggatttagggtctttgatgatcatctggaatcaatggctgatgtgtgtaaggctgttttggaggttaatgatccagcgcttgatcttccgggcgatgatcgatacgcagcagctattcacggaaaggtattgccatatacaaacgaccttcgtgaaggtttggcagggacattggcgttgcttggaacgaaggcaggtgcgctaagcaattgtcggaaagggaaggcagggagtattgtcgaagaagtggtttattttcttcttggaaatgctgactgggtgcgctgggcatcactcagcgagctggcgccgacgcttgccgaggctagccctaacgcctttctgagtgcggttgaagaagctacagctcgtcaagattcaccatatttagagctgttttctcaggaagccggtggtgtctttggtagaaattatatggtgggggttctatgggccctagaggcattggcttgggatgaagagctacttatccgagcgacagtggcactagcggaaatcgctgctatagaccctggcggaaactgggtgaatcgtgcaaaaaattcattgacagatattttcctaccatggcttccgcataccctgggatcctcggaaaagaggaagattgcattaaaaacaatttcccgagagcagccaaaagtttgccgtaagttacttggtagtttgattccaaatcaacagaaatcaacctctggaacgtttaagtcagtgtggaggctgaaagtagatgagtgttggaataagaaaatagagcgtgctgaatatatagagcagtcaaattattgtgctgaattgcttgtagagctggctgggtgggattctggtgcattggccgatttggtaaataaatatgcaaatttaccggcgaatgctcgcgatttgctattggaaaggttgagctctaaaggtttcactagtaagccggagttggagcggtatgaggtatggcaagctgcctggaatttgttaaggcatcatagaagatttcctgaggcgagttggagtatgccggaggagcttttatcgccactggagtgtgttgctgacaaaataaaaccggaaagtgttgtgctgcagagtaaggaactgttctcaaataatgattattatttgctagatcactcactggacttcgagcagcaaagagaaaaacttgacggggcaagaggggtagcactcgaagcgatcttggcggaaggcggttttgattgtgtcattgaattttcgactacagtggctgatcctcaagctgtggggcaagcattagcaactatagatggcattaacttcgatggtgctatttttcctgctttactgagtgagtccggaaagctgaataagtttgtgtctggttatgcatggtataagcggtggaggaaaggttggcaatggtttgatgacttggataagtactcgttttcgccggataatttagtttcattgctatgcatgctgccgtttagtaaggatgcatgggttagggctgagcaactgctcggggatttgcaatctcgatattggttgagtgtacagccaagtgttttccaaatggatagtgatttcgactatgctgtcgagaaactacttgaggtaggccgcgcaggtgccgctttagaggcgtacgcttctgagttatttaataagagagatattgatccagatttggcatgtcgagcgctgatctctttcggcacgaccgggggggactcaaagcgcattgatgcttacagaatttcagaaataataaagaacctacagggccacgcggcggtagataaagttgaactcggacgcgttgaatggatgtacatcgggttgctcgacagtcacaatgaggttcgcccggttacactagagaaaaatttggcttcaagtccagcttttttctgtgaattagtgcgtgctgtgtatgctccaaaacatcggcccgaggagaccgatgcaactgtagtggatagtaatgttgctctcaatgcgtatcgccttcttcagcggtggagcctagttcctggggtaaaagaagatggatcattttgctctgaagagttcaggtgctggcttgcagaggtagacaaattgtcgaatgagacagggcatcatgatatggcaatgagttgtctgggaagtgtcttaattcatgcgccaacgaccgatggtttatggatggcgcctgtcattgctgaggttctgaatgaaaaggatagagattcgctaagagaggggtatgcgatttctttattcaactctcgtggcgcacattgggtcgatcctgagggtaaacctgagaaagaattagccgaaaaatatcggcaacaagcgatgctgatggaaactggtggctttcagagattctcaaggaccttgttggatattgccgaagactacgaaaggcaagctgagaggcacattgcgcgttttggtaaaacggatcattga

SEQ ID NO: 341587 - DNA, 216 bp, Pseudomonas aeruginosa
atggatgaccgctggctctccgtcgacgaaatcgccgattacctcggtgtggccaaagacaccatctacacctgggtgacctccaaaggcatgccggggcacaaggtcgggcgcttctggaaattcaagaaggaagatgtggacgcctgggtacgagagggcggtgccgctgctagcagtgatgactttgacgacaaggggacgcgcaatgcctaa

SEQ ID NO: 341588 - DNA, 2007 bp, Pseudomonas aeruginosa
atgagcgaccttgatcaagaagcccaagcgccagagcgcgcgctcgaagagggcaaggtctttgactacatcaccggcaatccggtgaaagacagcgacaaagaaaaggttcgccagcgaattgctcgcgccatcatccatgagtacggcatcgcggccgaagacatggagcctgacttcaaggttaaggtgttgggcaagaatcgcaagctcgacatcgcgatcttcaagcctggccaggcgcacacgatagacaatctctaccgtgccgtggtggttgagaaagaacccaagatcggcaccaaaggtgcgtaccgtatgcgcgacccagaagaggcgcgcaaagagttcgaggtgctggaggccgtgatggccgaggtcgatagctgcgactacggtctgtggaccaacggcctggagttcttctttttcaagaaagaagtcacccgcttcgataccaagttcacaccaatcggtgactggccattgggtgacgacaccttcagcgttgaaggccgctccatgggccgcatgcgtcgtgcggacccagtgatgctgcgcaccgcttttcgccgttgccacaactacatccacggcaacgagggcatgcccaaggacgccgccttctggcagttcctgtacctcatcttttgcaagatgtatgacgagcagcagcccaatgaagcccgtgggttttacgtaggcccattcgaaccttttgacccggaaggccagaaatccatccgccttcggatcaaaccactctttgagcgagtgaagaaaaagtacgacggtctcttcaaaggcaacgaagaaatcacactgtccgaccgggctttggctttcatcgtttcggagctggctcgttacgacttcggccgtaccgatgtcgatgccaaaggtgcggcctaccaagagatcgtgggcaccaacctgcgcggagatcgcggccaatacttcacgccgcgtggagccatcagtcttgtggtgcagatgctcgcacccaaggagcacgagcgtgtgctggattcgtcctgcggtacgggggggttcctggttgagaccctgaactacctgaacacggtcttccacgaagagaagcgcatcaaggcaggcgacgagaacactgaagagttcgtgtccatccgtgatcggctggccaactacgctgccaagaacctgttcggtgctgacttcgaccccttcctggtgcgggctgctcagatgaacgtgatgatggcaggcaactcgctgggccacctctatcacatgaactcgctggagttcccggtgggacatttgcccggcgttcaggctgcgaaagaggccatcccgctcggcacgattgatgtcttgatgaccaacccgccgttcggctcggacatccccgtcaccgagaagaccatcttggagcaatacgaactggctcgccgctgggagcggcaaggtgatggttttgtgatgaccaatgccgtcaagccagcggtttcgcctgaggttttgttcattgagcgttgtgtgaagtggctcaagccggggggccgggctggcatcgtcctgcccgatggcatcttgggtaaccctggtgacgagttcatccgctactggattcttcgccattgctgggtgctggccagcgtcgacttgccagtggagtcattcattgtcgaagccaacgtcaacattctcactagcctgctgttcctcaagcgtaagcctgcggaagtcattcaggcggaagaccttggccagaaggaggactaccccgtgttcatggctgtggcagagaaggtgggcttcgatcgccgtggcaacacgctttacaagcgtcaccctgatggcgaagaaatcctcgtagatgtaagtcatgaagagaaggtacgcattggtggtggcctacaggtgcgcacgcttcatcgcaaagagcgcatcctcgacgacgacctgcccgagatcgccaaggcctatgccgagttccgcgtcaaatacccggagcccggcaaatga

SEQ ID NO: 341589 - DNA, 1338 bp, Pseudomonas aeruginosa
atgatcacgcgactggaagccacgcgctatcgctgctttgaacacttgggcgttgatgtcggcgactttcgggtgctggtcggggccaacggctcgggcaagaccacgctactcgatctgccggtacttttcggcgacctgttacgtgccactaacgtttccgctcccttcatggagcgccgccctgagctgccgcctcgcgcgggtaatttgaacgaactggttttcgccgggcgcggcagcgatttttcgctggctgttgaggcgtgtttgccggacgttgtgcaatccaaggtgcttgaaggcatgttcgccagaaagcgcacggaacggtcgcgacaggcattgcaggaggatcgccgtcattggccgacccacattcgttacgaggttggcttgcggcttggtgccgatcaagctctgcaggtggtttatgaatacctgttcatgttccctaaatcggacgggcctgaccgccgccaggctggttttcatggtgtcgctgctgacagtaagaagcactggcacctgacgctgaagcgcgagattggctacgagtctgagttcactcccgaaacaccacaggcgagcgttgccagagtgggtctgcctgaaacgctgctcgctatgcctcgtgtgttgttcgaatccgaggcgggctatcccgctgcccgttggttgtacggtctgttgaccactgatgccgtgtttctggagcccaactggtcggtcatgcgccaagccagtccaccgggccaacccaaggtcatcacggccaatggtcgcaacattccctggcttgccctcgaattgaagcgggaaggtgccccggagggggccccagccgacttccgcagcgggcgctatgccgactggattgctcatgtgcaaaccgcgctgccgcaggtgaccgacatcgatgtgcgtgagcgcgaagacgaccaccacgcctacttcgtggtcagctacaagggcgatttcaaggtgccttcaaccggcttgtcggatggcacgttgcgcatcctcacgctgacgctgttgccttacctcagtaagcacccggccatccttgtgaccgaagagccggagaacggcattcatccgcgtgccattgaggccgttctgcagtcactttcgtcgatgtacgacagccaggtgtgggtgtcatcgcactcacctgtggtgcttgcccgcgccaagctggaacaattgttgtgcgccaggctcgccagtgaaggcggggtagaaatggtcgccggcactgagcatccgcgcctgcaggagtggcgtggcggcattgatctcggcagcctgtttgcagcgggggtgctgggatga

SEQ ID NO: 341590 - DNA, 657 bp, Pseudomonas aeruginosa
atgatcaacaaacgcccctgcgtcattttggtggccgatagcaatatggcagctaccttccgtggctacttcaagcgcgacggctggcacctgagccttggctgtgcgccctttgagatcaataccgatgtcggtgctgacctgctcgtcgatgagggcggcaacgatcctggtgtgtataccaaaggccatgagcttctacgtccctaccaaaacagccatcatcgtgcgttggtggttctggattgcgagtgggagggctcaccggacaaggctgccatcgttgaacacatcacggctcgtttggtggcgagtggctgggctgaggatgcggttaaggtgatcgccattgagccagagttggagaactggctatggcaagacaagccgcaagtagcggacgcgcttcgttacaagggtgacaaacccctgcgccagtacctggccgatagcggttggtggcctgccgatgtggccaaaccgcctcggccaaaggaggcggcagagtgggtgttgaggcagacccgccggccgcgttcttcggcgatctatcaagagctggcggagtacatctcgatcaaggggtgtacggacgcagcatttgccgagatgcatgcggcgtttttggcgtggttccccgcggaggtggtcgcatga

SEQ ID NO: 341591 - DNA, 1419 bp, Pseudomonas aeruginosa
atgactttcgcaagttttaagaatgcgcgcatcgttcgttctggctggcttgaagaaggtggccggcgcctcgactgcaacccttacatgtcgggggctcaggaagccagggatgcgctgcgccttttgaatgctcgtaaagatgctttgcaaaccctcaccgcgggatacgcaggcggcatctacaacggcccgatgtttaagcgcaattatgttgagtcgcctgaatatggcgtgccatttatcagcagcggcactattttgcttgctgatctgagcacgcttccgctgttgcgcaagaaagacgcggaatcatcacgactttcctaccttcggttgaggtcggggatgacaatgatttcgtgctcaggaacgattggtcggatgacctatgtgcggcctgacatggatggaatctggtcgtcgcaggacgtgttgaaagtcgtccctgaccctgagcgcattccgcctggctatctgcacgcattcctctctagccgctacggcgtgcccctggtcgtctcgggcacctacggtgccatcattcagcacatcgagccggttcatattgcggacttgccggtcccgagatttgacactcccacggagcatgctatcgccacaaaggtggacgctgctgcccttgcgcgcgctgaggcagtggagttgttgcgtgaagcagccagtcgcttgcacaagaggctcgggctcaagaggccaacaccgatcgcctctttgccaaagccagacgtcgccacagtttctagcgaggcctttaaggatcgaggggatgcgtactactacagcgccagaaacgcagagtctcgtggcgctcttgatgatgtagccgtgaaccgtccgctgggagaagtcgcggaggttttcattccgggcatctttaagcggctttatgcatccgatcctcagttcggcagcccctacatcacaggcggggatgtgttcgagttggctcctacgtctgacaagcacctaatgaaacgcgttgccgcggaatatcgcttgctactcaagaagggaatgatcgttgtgcaggaagcgggtcagcttggtggtttgatcgggcgttcggtgatggtgggcagctatctcgatgggttctcttgcagcaacaacatgattcggatcgttcccgaggacgatatcgacggaggctatctattctcgttgctgaccagcgagcatggagttcgattgttatctcgtgaagccgccggttccagcattccgcacacagatgaacaacgggtcaagcgaattcatgttccgtggccctcgcgcgccgaccgcgaagagattggtgcaccagcgattcgagcccgtgaattgagggatcaagcttgcatttgggagcgtgaagcacgagacatcctggaagcaagaattttgggaggggagtga

SEQ ID NO: 341592 - DNA, 4149 bp, Pseudomonas aeruginosa
atggctaaagtgatccccgttggtcagccggtcaacgatgcagagcgtagcgctatcgcttacctgcgggatcgcttgccagacagctatatcctgttgcacaacttcgaaatcgagcgccagggcgagcgcttcgagatcgacatcgctctactgacgccgcacgcactgtacttgatcgatgtgaagggcacgcgcggcaccatcgatgtgtacggcaacaagtggtatcccgaggggcgtgcaccatacccgacgccgctgggcaagctgcgcgggcatgcacgtacggtcaagggcctggtaactcaggcccatccagggcggaatgagctgaacgacatctatgtggatgcggccatcttgctcactgcgccggatgcgcacctgattgaccgcgagcagctggattcagaccgtgtggtgaagttgaaggacgccgagcgctacttcaaagatgccacacgcattcccgcgcgcttttcgaagaacatcctacagcagcaagggctgatcctgcatgctttgaaggtggtgaaacccgcctctgccgtgctgcgcttcggccactgggaggtgaaggaaaagctcggagcggcgcaggcctacagcgagttccgtgcagagaacgtctttgcgggcggcacggcccgtctgcgggtgtatcaggcggacccctaccagcctgaagatgtgcgcgaggcccaggttaatcgcattgccaatgcctaccgggcgctatccaaattaccgttgcaccccaacattgttgccgcgcgggacttctttccggccgacgatgacaagtccttcatcctgatcctggacgacgcgccaggtcaggcgctgaccgtgcacatggcacggccgcagttggcgctgaccctagaccagaaatggcgtgttgccaaagatctactggctgctctggcgcatgcccaccaacatggcgtggtgcatcgcaaccttacgccaggcgcgatcctgatcggtcaagatggcaccacccgcattacggacttcgacttcgcgaagccgggcgagacccgtagcttgagcatcgctgcggaaatcgttgatttggtagagaaggcttatgtcgcgccagaggcattccgcgagccgggtgcagcgtctagcgcgtcggatatcttctcggctggcgtcatcatttatgaactgttcactggagagcgcccgtttgcgggcgagccgaccacggtgtgggatcgtgtaggtgagttcctgaacaagccatctgtactgcggccggagttgaatgacgctttcgatgtttggctgcaaagcctgtgcgcgtttgacgagcataagcggccaccagcccccaatgcgttggcggcattgaatgccttgctgcagtctgtagcactacaagcggaggtgtctgcttttgagcccaatgaggtgtctgatgaccaagccgactacctgaacctgcctgcgggctacagactgacccgcaagttcatcatcgagaagaagctggggcgcggcagtttcggcgtggtctacaaggttatcgacacgctgggcgatgtggcgcgcacggtaaaactcatcgtcagcgaccggcactcgactctggatcgtctgaagcaggagtaccgtcacctggtgcacatccctgagcatccacacgtagtacgcgtgctggacgcggatgtaatcccaggtcgtgacattcccttcttggtgttcgagtacgttgaaggctccgacgttggcgacatgattcaggagcgcctgctgtcgcccgaggatgtcctggagctgggcaaacaggtgatagaaggcttggcgcatttgcatgcgcatggcttccatcattgcgacatcaaaccgcggaatctgctgtggacgcagaagggcgcgaaaatcatcgacttcaatgtgtcggtgcgggctgatgacaaagagtcccgaggaggcggttcgcgtcgttatctgccgcctgacttcgacccagaggtcataccgtataacggggagcgcgcagaccgcgacctttatgccatggggctgacgctgtatgaggcgctgacctcgcggtatccctgggatacgacagagccacccatcaacaagcctgcgccggacccgcgtgagttgtcggggttctctgaccttgcgccagagcttgtgagcgtagtgctgaaagccatcgccccgcgtcgtgcggagcgttttgccacagccacagatttccgtgatgccctggccgaggtgcgccacgcgcggcgcatccaaaccgtgagcttggctacgatggcagccgccagcagcggccattctgtgtcggctgaccccgcgcctaataccaatgccttcgtttcgcacttgctgacgctctacagtcaaagccaccgcagcaatgctggtacgcgcggcatggatgcactgggcttttcagcctatgtggataccgccttggatcgggcgctgttgcctgcggtcctgtcaggcgagttccgcttggtgttgatctctggcaacgcgggcgatggcaaaacggccttcttgcagcgcctggagaaggaagttgaagtccgtggcggatcagcaaatcgtgggttgcccaatggcagcgagctggcattgggcagcaagcgttactttatcaactacgacggcagccaggacgaaggcaacaaggacaacaaccaggtgttgttggatttcttgtcacccttcaagggtagcgatgcaagaacctggacgccgaaagaaactcgccttattgcaatcaatgaaggccgcttggtggacttcctggcgacgcatgagcacgacttttctgcgttgacggcgctggttcgacgggcgttctcgacgggcgaaactgagtctggcgtcgcagtggtgaacctgaacctgcgcagcgtggtggctgaagccgaagggggctcgattctggagcgcacgctgcagagcatcgtgcagcccaaaaactggtcagcctgcgaaagctgcgacctgaagaacagctgctatgccttgcataacgcacgcagtttccaggatgagattgctggcccgcgtttgctggaacggctcaagaccctttacaccatggcgcacttgcgtggtcgtttgcatatcacgatgcgtgacctgcgttcggcgctgtcgttcatgctgatcggcaaccgtgattgcggcgagattcatgcgctgtatatggccggtaagcatgacgaagtggcgcgcagctattacttcaacagctggatgggcggtgggcagcctacttcggatcgattgctcaccttgctgggcgaactcgatgtgggcaaacaggaagacccatgctttgacagagggctggactttgtgcagccggatgaccgggcactgttccgttttgagcggcgggggcaattcgatttcgaggtgctgaagcgtctgttcgctgatctgcctcgtggggcgggcgacgtgtccgttcggcagcgagcacgcaagcaccgtgagtatgtggcgatggcccggcgcaagcactttttcgaacgtcgcgacgcgagctggggaaaaatgctgccgtaccgctcggccaagcgcatggttgagatcgttcgtggcgaaacttcgattgatgcactgacaagcgaaattctgcatgccatcaaccgaggcgaggggctgcaacgaccggagcgcctggggacgagcttggcattgcagttacgtcaggttgagcacggtacggttcgcagctatcggcttttccccgcggagggttttggtctgcaggtgcaagactttgccgccaacgcgcgcttcgtcgagcacctgccgacgggcctactgctgaagtttcagggccagggtttcggtgccatctccagtgagttgatcatcaacctcgatgttttcgagatgttggtccgactgaatgaaggctaccggcccagcgtcgaagagatgcagggcttttacctatgtctgggtgtcttcaagaacagcctcaatgcgcagccctatcgggagattttgctgaccacgacggggcatgacttctaccgtttggctcgtcatgacgacggccgggtggagatgcgcttgttgcaaggggcggcgagcggtgggcacaaagcagaggccatagcacaaggcttcagggggaactga

SEQ ID NO: 341593 - DNA, 1674 bp, Pseudomonas aeruginosa
atggcgttgcaaaagaaggacagggagttccgcctcccgaaagtcagctacctcgatttcaagaccatcgagatggatcgcgtgctcacgggcttgtttgagcgcttggaacatggcggctatccgagcgtgtttcgcgacaaacgcgagctgacagtggacaagttcgtggacgacatcctcgaagccggcgaccgtttcttggggttcgctcagcaccgagatatggtgcagcgctgggttgaaacccacctcatggatatcgtcaatcgcggcaagaagaatgccgcggtggctggcccgcgtcccctgcatggttatacctaccgctttcgcaatcccaagtattcacgtgactatggcgctgcccagcacctgtatcagatgctgcaccacgcccggcatctttcggggcacaaggccatcgagcacctgaagggtttcttctttgacggcttcgacaagctcacacgagagctgaacgacaaggcgctgacagacattgaaacggccacgctgctgcacttcctgtcgcagcgcaaagacacggcggatacccgtgccggtggagaccgcttcgcgccggtgtgtattgggtcggcagacttgatggccgaagacattcagcgcctgctgttctataagcccttcatgccacgctcggtgatggtggagtacctgaaggtattgctctcgttccacctagccctctaccacttgcggctgctgaagctcttgcctgcctggcaaaagctggagggtgcgaattcgctgtgcgcagagtcagcgtgcccgatgaaaccccgtgaacagcgcgaaccacagggtgactgtccttacaagctggggttgtttgttgacctctctggcagcgccaactcaacaaccgctacgctcgctgagcgtagtgccgatggcttttaccggcgcatcccgagtttcatccgtgcgtacttcgttgcgaagaagctagacgagttttctgagcatctggtccggcgcggtaagttgatccgccccttgaactcagtgttctctgttggcgagctttatggtcttcaaggtgcacccttcgcagaagagcgggacaagtttttcggcgaacgtttggcggggctcttggagtctctgtctgagggggatgccggcctggatgccgaggttgaggccatcaccaagatggggctatcggattttgagacctacatcgagattcttgtcaccctccgcggcgccttccacaggaaatacattatcgagtcgcttgacgcgacgatgttgaagaataagtcgggagcgcttctggcccaaacacgtgcacggaacgccccgcgccggtttgcgctggagagccgcctgttagaggtgcttttgcagatcgcagtgctgcgcccagggggtgaccagggctactttaccggcgagatgcggatagatgatctgctgtcctttctgcgtgaacgctacggcctctacatcgatcagctgccgcccggcgagggtttcgcaacgcccaccatcgacgagcgtaaagccctacgaagcaacgttcaggcgtttactggacgcctgcgcgagattggtttctaccgcgatttgtccgatgcctatgtgacccagacggttgtaccgcgctacacgattgcagaacgaacagaaggagcgcgcacatga

SEQ ID NO: 341594 - DNA, 5565 bp, Pseudomonas aeruginosa
atgagtcggggcctgcgtgaactcaccagtcaagagctgagcgcggcgcttgagtccgtcttgctgccgaggctttgcaaggtcttggctgcccgtgatcttgggcattgcatgcgcgtcacggacgtggatcgagagctgatgatccgattggccggggggctgcgtgcggccgttccttctgccaatgtggttgtactcgcagacgacgccctgcgtgcccaagcaccggaattggccgtgacgagcaccaagcttgttgagctgcgtaatccgttgcccaacgacgagctaaggcccccgctgctggtctttgtgccgaacgatctgcgtgcatctgccgaggattcgttcggtgtcgcgacgtttgaagaagtgtcgattgagggtgcctacgctcaactgaatgagcagctgatcacacagattccggccaaccttcgggttgctgtcgaagcctgtttgggtgaactgcgccggagcgactcgcgctggcgatatgccgacgatgccgctgtggtgcgctacttgctcacatgccaagtcaacggcttcgacctggatgcgatgggcgcagcgctgttcgagctggcactcgtgccagatttcgagttgttccagcaggcagaacgtgcccctgcgcgggtggctcgtaaccgcgaatgcgtcgagcaagtcacatggtcaactaaaacggagcgcgtgcgcgcccttgagctgggcctgctcgatccagttttctgcaagcagcttggtgagttcttttcgagggttggtgttgccaatccgaaggagtggactcaactgatcgtccgcgatcgggtcaattggcccctcgcgttcaacaagtggctgtttgaggacgggggcgtcaatccggatgccatctttatcggcgacgttgagctgccagacttgccggtggttaaggacgacaatgaagacccccgtctggcagagctgatcggccaccgggtgttgcctatctctaagacggggctgaaaaagttcagtgtgtccttcagggtcgatcctgttccgtccagggtggagggcttgtctcgattcgtggctgaagtggtgtcgcgcgacaacggccccacaggcttgcgccgccgcaaggccgcgtggaccaagggcacggattctggggtgatcaaattttcgtcgattggcaagatcgactgggaggagggctggcactttgttcgcatatacggggagaccgaagacggcgaccgtattccgcttgctgacggagagggcaatcctattcgcttcaacagcgatgcccccgagacccttgcccatgccaatgagagcgatctcttttatgtggtcaccgacgacgaggtagaggttgagcctccacagcgagcggtgccgcgcgagccaagcttgatgcatgcgctgctgcgtgcgcgctttgctgctgtggctcaggatcgagaccccagttctgtctcgatcacgggatgtgcttgggtggagcgaagcagcaaagctgcagccagtggtgagaccctggaggtccggctgggaaaagaagggaaagcgaatgtcttggtgtctgccgtcttggctggcctggaacgcgcctttcttggcgacccggatggcctcaatcgattgaggttgtcgatcaacgcttccggcgttgccacgcgatcaacgatctccttcaaatggccgacctcggatgaagcagcgaggtttcgggagtctcgggcaaccctctttgacgcagttttgcaaggcgatcagcgcttgatcatgcaggccagtgaccttctgagcctgcaggagcccgctcagaactatgcggcagcctacctggcttggattgatgctgtgttaattcgctgcggctcaacagatgtcaccattgcacgtcaggcttttgaagagttgcgttgcgcactaactatcgattcggttgctttggtcctggaggactatcagggtagacgacgtgacgccgttcttttgggcccgactcatcctcttcgtgccaactggcacgtcgcctggagccagctgggacagacctggatggagcgcagccaggcgagtggccgtgagtttgtcgtgccgacccgagacgcggtgatcaagcagcttgcgcctgcagcgtttccacctgtattgcctttcggtgaggaacttggccgcacggcgctggctgtggataacatcaacccattctggtcgctgtacgcggcgaccgacgaggaagacccgcgtggtttggttggggagctgtgcgccgcactgggtctgcccgagccagcaattggcggtgcgaccatcgatagcgcctacttggcggctcgggtgcagcgttatttgatccagcacccctatgttgaaacgctgacgatcaacgcgttcaatgcgggacgggcagcggccttggctgaagtgctgcttgcactgcagcgtcattccgagtttgccgatcttcggtacgacatcaggctgttcgttcccgatccggcggctccttcaaccggagaggcgttgttggagctgctggtccctgactcgggaaccagcgcgaaggaggcggacgcattctccacgccgactgatagccacctgcaccccaagttgcgattggcgatccgcgccatcaaggagttccgcgacgagcctgatttgcatgccgcgcatttgtcgttcttgtttgacttgtttccggctgaggaaattcgcgctgtagacgttcgggactcggatgactcttccttcgtccatggccttgtccagcccttcgaggtggattacctggaagacgagcaatcaatcatttggcttcgtcgcccgctgcatggggtcgcgcagccgattgagggggctgaggccttgtccgatctgatgggaggcatctcacgcgcagtttcggttgccgtggcgagcgttgcgcgcagccagtatttgccacatgcgcggccggtggtggcgttgagcttgtctgccgacgagcgtgcgatgctccatcaggtgcacgaggttagcgattgggtgctcaccattgatcggaacctgggcatcgagttttttgaccatcgacgccactcaactcgccctgactatctgattgatcactcgcctgacatggcaaatgcgatgggccatcggctggcaatcacctctcgctcagtggcagagctggagtcattgttggtgccgatcttgggcgaatacggcctcccaaattcaggcagtcatgccttggtgatgctagatcagcttcgctcgctatccggccggctggccctgaagctgttgtcgtcgtcttcgcaaagagcggaggcgatggggctcgcgctttcacggttgtttcttgaacatcaaggtgtgtttcagaaccaggttgttgtgcccctggatgctcacttggagctgtacaaggctcttcgtcagagctccgaggaaatgggcgatgaggtcaatttccggcgaactgatctcgcactgttcgaccttgatccgatgagccgtgttgtgacctgtaggctggtcgaggtgaagtgctacagccaagttggggatgtagcagcatatgcacaattgaaggcatccattgctgagcagatcgcgcagacggagcacgttctagcctaccactttgaccctaagctggctgaagtggatcgcccggatcgccctataaagaaccgtgaccttgcagctctgcttggtttctatttggaccgatcggagcgctacggtgttgtcttgcctgaggctgcagaagaggcgcacttcttcttgcgccgcttggatgagcggccctacacacttcagttcacgcgaagcgccgtggtgttcgacttcagcaagccgggcacggaaccggctgagcatgagaacggcatcgagttctaccgcatcggcagtgatctgattcgccagctcgtggaagcagcggtaacggacaccgagaccatcgcgagcttgcagagtgttcgatccgccgatacggcgcacgaggtgactcaggagctgctacgtcgtaggactttggcgccagctgtcccgacctttgaaaccgctgctttcttgagtccgcctcgtgatcgaactctggcttgggacgacactccacgcatctcgtacagcccatcaagcctcctgcccgcagtgcaggtgcgcgaatcagagtcggccgtgatgttggcccaagaggtgactgaaccacctcagcggccgatcaccatgcctgagccgaagcaaccggccatcgctgatcccacgcccgtgctagcgcctgcgctagacgaagagatggtgccgacgccgatagtccccgctgcctcagttgcttcgtctgaagtggctcagtccctgaatggccgggtcgcctacgacatcatgcttggcacgaccggatcaacgcctcaatacggtttgctcggagaggtctctgggcgcaaggttgcactagacctgaaccagactcacaccatcagcctgttcggtgtgcaggggggcgggaagagctacaccttgggcagtgttgcggagatggcctccttgccaatccctggcatcaactgcctaccggagccgctgtccacggtgatcttccattacagcccgactatggactacaagcccgagttcacgtctatggtaggtgccaatagcgttgaggatcaggtccgagcgctgaaggagctgtacggtgcagagccgaaggctctggctgatgtcttgctgcttgtgcccgcagacaagattgaagagcggcgtgcggagtatccggatatcgaggtgttgccactacagttctctgcatcggaattgaaggcctcgcactggaagttcctgatgggggccgtgggcaatcaggcaacctacatccgtcaaatcatgcgcctcatgaagtccatgcgcgatgacatctctttggatgggttacgagccggtgtcgaagcgtcgtcgatcccggagcatctgaaggaactggccaggatgcgtttggagttggctgccgactacatcaacgattcggcttcgctcaccgaagtggtcaaacctggtcgcttaatcatcgtggaccttcgagatgagtacatcgagaaggaccaggctcttgggctcttcgttgtgcttttgcagctgtttgcagacgcgcgaatcgaggaacgcagcttcaacaagttggtggtgttcgatgaggcccacaagtacatcgaaagcccagaccttgttgcggggcttatcgaagttgtccgcgaaatgcgccacaagggcgtcagcattatggttgcgagtcaggacccaccctctgttccggtcagtttgatcgagctatccagccagatcatcatgcacaagttcaattcgcccgcttggctgaagcatattcagaaagccaacgctgcattggccaatctgacccccgaacgtatggctctgctcaaggccggcgaggcttacatctggtcaagtaaggccactgacgagtcgttctcaaagggtgccgtaaagctcagatgtcggccacgagtaactgagcatggtggggcaactagggtcgctgttagaagctcgtga

SEQ ID NO: 341595 - DNA, 312 bp, Pseudomonas aeruginosa
atgtcaaaaaccgattcgaagcagctggcggaactggttggccgggccatcgcccgccagcgcgcaggcggtgggttgtgccaggaacaagtcgccgagagcttggaattggtagcgaggtggttcgagcgagggatcgtcatgcccaacgtggagcgactggtagaacttgcagcgaccttcggctgcgagacggccgacctgctgaccgagggcagctctcgaccagaagaccgggcacgctggctgcagagtctgctgtccaccctgaaggcggccgaccgggcgttagtgtttgtagtggtctactga

SEQ ID NO: 341596 - DNA, 639 bp, Pseudomonas aeruginosa
atgagcgcaatctcccgaaaggccctgggcctgttgttccccttgctctgctgcgtggcccagagccaggcggcgccatcgcgcccgaacgtcctgctgatcgtcgccgatgacctcggcttctccgatacctcgcccttcggcggagagatatccacccccagcctgcaggggctggccgacgagggcgtgcgcctgaccaatttctacgccggcccgacctgctcggtgagccgttcgatgctgctcaccggcgtcgacaaccaccaggcggggcttggcaccatggccgagtacctgcaaccggaacagaagggcaagccgggctacgaaggccagttgaaccgccgcgtggcgactctcgccgaactgctgcgggacgtcggctacaacactttcatgaccggcaagtggcacctgggcgcaactccccagagcaacgccgcggcccgtggcttcgaacgctcctacaccctgatgccggggggcgccagccacatggacaagacccagatgttccccggcaactacaaggcgcgttacctggaggatggcaaggacgtgtcgatccccgacgacttctactccagcgacttctacaccgaccgcctgctcggctacctggagcgtgaccgctag

SEQ ID NO: 341597 - DNA, 918 bp, Pseudomonas aeruginosa
atgccgcacaccatccagtatagaccccagctgatcgacgagctcatcagcactcatcgtatcgccagctacagcaaggtattttcgaccagcaatgacgccgagctggtgggggcctacctgtggaactcgcacgtttgctctgccctgtatcctctcctcagcgcagcagaggtcaccctcagaaatgctatcgacgcagctttgactgcagatcttggcaagttctggtggaagaagggggtactacagtacaagagcttcgttcctggcatcgcccgagtcccatacccagtggatcacctggccaggaatttttcagcggctttcactgccgcccagagagagcgctcgaagcgcactggtaagcagctcaagggtgtaccagaccatcatgaaatcgtctccaaaaccgaattctcgacctgggagttcatcctggagaacgagtacatggggaacaacctgatttggccgaagaacctgggtcaggtgttcagaggtacgtggcctaccagcgcgaacatgctgcttcactgcaaggatcgcgtctcacttgtccgtaacttccgtaaccgtgtgttccatcacgagcccgcgtggaagcgtttcggtgtcactaatgagcagcaggtggtgacccacctgcacgagaagatcggcaaaatcaccgagctaatttcttggatctcgccagacaaaattgaccttcttgagaaaagcggcgtgattcgtactgcctatcgtgcctgttctgtagccgagatcgagcggtttaagtaccagtgcaagacgaatacggtcaacagcatggtcaagctgctcaaggttgcggaggccgccagcgccggcaacgaagtgctccagatcgcgctttatggcaaacgtaagcagatctacgcccttcaccctatctga

SEQ ID NO: 341598 - DNA, 147 bp, Pseudomonas aeruginosa
gtgccgagcgtttggtcgaagttgctagagattattggcgcctggattggcctggcaatcggcttgttcctgatgccgatcttcttcctgcccgccttcctgttcggctggatcatgtgggactgggcttcgccggcagcgatctag

SEQ ID NO: 341599 - DNA, 849 bp, Pseudomonas aeruginosa
atgagtggtaaagtagtatacgaaaggcgtcttacactgttcgttgactttctaggtttcaaggatcttgttgagaaatcggtcggtgataacaaaatattaaatggtttggttcgcgccatcgccgacgcaacagaaactgcaaatattggtaataaggctgattttcacgctacgcaattttcggactgccttgtattatcttataggctcaagacggcggacgccttgtttgagatggttaataagctgagtctcattttggtgagaatcactgctcgtggatatctcatacgtggagggttgacatacggagacctggttcatacggataaggagctaatagggccggcgatgattcgggcctatcagcttgagtctcaggttgcaaagtggcctcgcgtcatactcgacccagaggtatttgatgacctcatgaacaagccttctgcttcggtcatgaaaacggttaaaaaatacctgaaacgggacaaagaggatgatttctggtacttcgactacatctcatcggaagctgtggtaaacaccatttccggtgagtacgagatttatcctgagtatctcggaacaattgctgggctggttgaagatgggctgaaaagcaaaaatccaggggtattggaaaagtatatctggctgcacaagcgctataagtccgctagaaagcccctcgtcggcttgcccggagatcatcctgatcggcggagatttccagggttttatgaggcatttgaaaacctccctagcctgaacaaggaagcctcagccgcgaaggattttgttgccaaagcgaagaagaaagcggcgcgaaaatgcaaaaaagggtag

SEQ ID NO: 341600 - DNA, 189 bp, Pseudomonas aeruginosa
atggcagaagccggcgagccgctactgcagcaggctctccaagccatccgggcccatcagcatgcggtggatgaagagaggcccgccgaggagatcgaaaggctccgtctcgaggccgatcaactgtatcaaaccgtcatcgactaccagttgcacaaggccggcacgcttggtgaggccttgcactga

SEQ ID NO: 341601 - DNA, 276 bp, Pseudomonas aeruginosa
atgaggctctttctcgattgtgatttcactcagcttaccgcgcaggcgaagctgatctccctggcgttggtcgccgaggttcgccgggaattctacgtcgaagtggtcgacgcgtggcgagaagaggattgcagtgatttcgtgaaggagatcgtactgccacagctctggggcggtgagtacgccatgccaatcatcgaagccaagtcggcactcctgcggttcctggcaacctacgatgaagagctcgagattgtcactgacgcacctgcctaa

SEQ ID NO: 341602 - DNA, 864 bp, Pseudomonas aeruginosa
atgtacgcagattggattgattctttgtggttcacctggaatggtacctcaaaaattattaaggatttgtccactgcgatcataggggcaggggtttttgcagcggttttaaagtcatcgcagttttcagatatttttcaaaagaatattcacgatgttttttatagaccacacttggcagttgatcatgaggaaaatgtaaagaagtggaagactctcactcagtccatgttcatgaagtgtttgccaggaatgaccgcccaagccacggacaaaatagtagaaactttttttgataatgagttggactaccattttgaaaatatggaagtgattttcaaaattgagatggtgtctaaagtaaacgcaaaaatcactataagaacaaagatgaatgtcgtggtgtctccagggcaaaagcctgacatctttcagaaagtcagtgatagcaattaccgtttgctctcattgtttttaaatcaggaagccgttgatgtggcggctgctaccgccccagtcaagggtagacctgacttaaggcagatgaatatttcatacgatgtatactcgaaagttccaggatttaaggaaactaattctgtgttgcttgaacgagtgacagaatacactcaagatatagaaagggagccattttatatttctggtttcgggcgctatatatctgggcttaccattggtattgagtctattggatgtaatatttacttttctggaaccggcagcaaagttttggacgaaatcaaaccaacagttgatggtgttggcattaaacgctgggtaatggcgaaaaatggcgacttgcttttaccggggcaaggatatataatagtaattacaaattaa

SEQ ID NO: 341603 - DNA, 1281 bp, Pseudomonas aeruginosa
atgccaagctctgatcgcgtattcgccctgatcgactgcaacagcttttacgccagctgtgagcgggtgttcaggctcgacttgcggcacaagcccgtcgtcgtcctgagcaacaacgacggctgtgtaatcgctcggtcggctgacgccaagccctggatcaaaatgggggagcccttttttcagatcaaggacaagctccgtaagcacggcatcgtggcatgctcgtccaattaccagttatacggcgacatgtccgagcgcgtcatgaccgtcatcgagtccatggtgccggcatccgaggtctacagcatcgacgaagcattcgctgacctgaccggcatgcctggagatcttgagcggcttggcaggaagatccgagcggaggtgtatcgtcgtaccggcattcccgttggcgttggcatcgcgtcgactaagaccttggccaagctggcaaaccacgctgcaaaaaagtggcaaagccacaccggcggtgtcgtcgaccttcgtgacaaaacgaaacgcgactgggtgctgaagaaatgcgatgcatctgatgtgtggggaattggccggcgcatctcggctcaccttgaagcgatgggcatccgcactgcctgggagttggcccatgcagacgcctggacgttgaggaagaaattcagcgtcgtggtcgaaaagacagcccgagaactcgctggcaccacttgctcggagttggacgaaccgaacccgccaaagcaggaaatctgctgtagcaggatgtttggcgagcgcctgaccgacctcgctcccatcaaggaagctgtttcaacatacgcctcacgtgccgctgaaaaactgcgggctcaaaagtcgctgtgtaagcgcattcgggtcagtgtcaggacaggcatgtttaatccgagcgaggcgaagtatgcgaatggcgtgcttgttgaactgccgtaccctactgatgactctcgtctgctcaccaaggccgcattggagggcgtagagcgcgtttaccgtgagggcttccgatacagcaaggcggaggtgttgcttctcgatctgagccagcgtggggagattacgggtgatctgttcgcatcagctcaaccggtggccagtgagaaactcatgggtgttctggacacggtgaacgcccgctggggacgaggcaccatgcacctggccagtgtgccggtcgacccttcctggggcatgcggcgcgagatgatgagccaaagctacaccacaaaaatggaggagctctggactgtttactgcaaatga

SEQ ID NO: 341604 - DNA, 297 bp, Pseudomonas aeruginosa
atgagctatctcgtgtattgcacgttcgatctgaagaatgcgtcatcgcaggactacgaaaaagcttacgaagagttgaaggggatagggctcaccaagctggtcaaagcggatgcgggccataacgtggtgattccaaccacctcgacgatgggcttctttgacgggtcgggagcgggcgcagtccgcgattctgtgcgcaactccgtaaagaaggcctttgccaatcgtggcctcacttccgagattttcattgtcgtgggcggtaactgggcctggggaggggccaccacttag

SEQ ID NO: 341605 - DNA, 183 bp, Pseudomonas aeruginosa
atgggcgagcgctggtgcagcctggtggagctggctccccaattggggtatcgctgcttggccatcgagtctgccaatgccaacgcatcagcgttcgccgaaaggctgggattcagcccacgcgacaatggccgtcactggatcggtgcggtcgacgacgtgcagaaagtcttgaattgctga

SEQ ID NO: 341606 - DNA, 216 bp, Pseudomonas aeruginosa
atgggaatgagcgaccatttgggcctgctccaggccttttgccgtcagagggatgcttgcatgatcccgggtgggctcgccagcgttagcggcgctctcaccatgacgtataagcctgacgatctcgactatccttccctggctcacgttgcttggattgcgcaatgctggcatggcagcgagtgggatagccatggcgaaagggagatattgtga

SEQ ID NO: 341607 - DNA, 2391 bp, Pseudomonas aeruginosa
atgatcactcaaatcgacgttaatagtttcggaagcttcaacgggctggtctggcgaacagcaatgagggatacaggccgaaatgttcagaactttaagcgacttaatataatttacggcagaaactattctggaaaaacaactctttctcgcatttttcgaacgctagaaacaggaaagctaccaacaaattacgcgtccccctcctttaccctttacggtgattcaggaaacgtcgctcacacagccctggcgtcccacagctatgaagtccgagtatacaaccgagacttcgtgaacgaaaatctaagctttttgatcgaccaagcaaatggcgaaattaaaacctttgcaatcgttggcgaattaaacaaagagattgatgaaaaaatcgctgctctcgaagcgcagctaggcaaaccggaaaccaatactggccttcaccactctaaggccgtcaaacaggttgagtcaggcaaatcctccttggcatacagcacggccaaagatgaccttgaaagcaagctgcgaacacatgcaaatgaaaaaattaagaagaatcgcacctatggctccgcgaactacaacattgaaagcatccgcaaggacatcacggctgtccaaaaggccgaattcacgccattaaatccagacgcatggacttctaaaattggactattaaaacaagaagctcttgcggacataccagaattacaagcaccccagctgaaatacaaaaaaatatcggattcatgtcgagacctcctcaccagtaaagtcgccccaaccagccctattaaagagcttttagacaacaacactcttcaaaactgggtaaaacaaggtgtggatctacataaaggctcgcgtgaatcctgtgctttctgtcggcaagatctgcctcatgatatctgggacgtcctagctgctcactttaatgaagagtctgaggccttagagaccaagctaaaccagtcgatattttctattgatactgagatagccgctacagctcgcatcgtcccccccgcgccggaaaatttctactcaatacaaagagccagttatgaacaatctttggaaagtctcacaagcgcgcttaaaatctacaccatagatcttgaactactgaaaaccgcgctggaagaacgcaagaaaaatttgtttaagcctgtactccccccagagccggcccacaatccagagaccatttccctactctttcaatcgatcaatgagaccattaaagaaaacaacaagagcacaacaactcttgacaaggcgaagtccgaggcaataacgcagcttcgcctgtccgacgtttactccttcataggaatgattgaataccagaaagggttagaccgagttagccagctaaagactacggcagacacatgctcaacagaactgaccagcctgaagactgaaatagcacagatcgaaaaggaaatcgacgaactcaaaagcaagctaaaagatgaacgaaaaggtgccgagcgagttaacgccatacttagtcatttttttgggcatgatgggatcaagctagaggccgtagacaacgctgaaagcaaagccattaaatttgaaataaccagggacggcaaatccgcttacaatctaagcgaaggagaatgcagcctaatcgctttctgctatttcgttgcgaagcttgaagagaccaacaccaagggaaaagaactaatcgtctacattgacgacccaatatctagcctagacggaaaccatatattcttcgtatacagccttattgaaagcctcattgctcgcccagagaaaaacgacgacggatcaaacaggtatcgatataagcaactgttcatatccacgcacaatctagacttcctcaagtatctgaaaaaaatatctatcccaaacgataaaaacggtgggaaccagcacttcattatcgaacgcagcggtaccggcagcaacatactactgatgccagcatatctaaaaaactacatcaccgagttcaactatctattccatcaaatctacaaatgccgaaaccaagaccttgctcatactgagcatgagcccttttactccttcggcaacaacttaagaaaattcctcgaggcgttcttgttctacaaataccctcatcacgatgaccagagcaattccctggagcgaatctcaaagttctttggaaatgatgatacagctgttgcactggccaaccgcctgaacaacgagctatctcatctcgaatcaattttcgacaggagtataaagccagttgaaatacctgaaatacctaaactggccaactatgttcttgataaaatttacgcagccgatcccgagcagtacaattcgctgctaaaaagcatcggtgaacctgaaagagcgggatag

SEQ ID NO: 341608 - DNA, 489 bp, Pseudomonas aeruginosa
atgatctacttcttcattgaagacagtaacgagaaggtgaaaatcgggcgagccaaagtcatcgaaaagcggaggaaagcgctgcagacgggaaatccccgaaagcttctcctcttggggtggattcggacggaagatgacgacgacgttcgcttggagaagcgtcttcacaaatatttcgccgagcaccgtgggtcaggtgagtggttcgatcttgaaccggcagatgtactgccgatcctcgagcgtttcggtatcgatggatttgttggcacaacagacaattcattcgaggtcactggctatgaccgagacggcattcctgagtaccttggtgtgtggcaatggggggatctggagctcgaagcgtgctgcccattctgcgggagcttctgcggcatgcattaccaagatgcctccagcatgtaccactgtctgaattgcgatgagctcaccacattcgacttcctgagtcatgaggaggagtag

SEQ ID NO: 341609 - DNA, 783 bp, Pseudomonas aeruginosa
atgcgcgatttcaatcgtgtagaaattgctggcgtagatcctgaaattgttgaaaaaacacaggctgattttgaaggtgaagtagcaacggcactcaagaagcttgaggcgtcttctgatttctctggtgagacgaaaaatgtcattctagagctgattggcatgttggcaattaaatctccagagatgcgaaagcacctagccgagccgcaagtaaagattgcgcaactaatgatggccatgaatttggagtcaaaagaaaggtgggagtctcaggttgctaaatttaaaggtggcacaggagaggataattcaggtggtgccactttcgaagatgtgaaaagtgcatttgagcggggtgcgtttgaagtgtccgtgtccaaggagcaccaaatacatatggagctggttgggatgcgagaaataacaaaacttctccatcaaaggaattgggttctattaagggctgacgatgatgccggcgaatttgttactactgacaatcctgtgagtttgactttcaataagccagtatcctctgcttttatctccccgggctttggcttgccggatactatggtgtattttccggtatcaaaaaatttggctctagtcggtgagttcagcgggcaggttggtgtgcgggcagcgaataaatatttagtagcaatgttgaatagcaagatgattgcaaatggttatcagcgcgttatggcatcaaagtgtaattttaactacatagcaaagggtggtctcatgcagcagggtaatacgctgttgtaa

SEQ ID NO: 341610 - DNA, 366 bp, Pseudomonas aeruginosa
atgtctcgtcttgccgaatttcgccgtcttgaaaagcaacttgcccagcagttggctgagctggaagccatgaaaaatgacggtgctatccaggctgaaatggagtttgaaaacaagcttcgtgccctgcttggtgaatatggctacagcctgcgggaggtgattaacattcttgatcctcaagctcgcggtcgtgctgctgctccagtttctcaggagaaagcgactcgtaagccacgtgaagtgaagacttacaagaacccgcacaacggcgaagcgatccagaccaagggcggcaaccacgccatcctcaagacctggaaagccgagcacggcgccgagaccgtggagtcgtggcgtcagtaa

SEQ ID NO: 341611 - DNA, 399 bp, Pseudomonas aeruginosa
gtgactgatagctccgtagagcacgagctgctccaggaagggcacgtctcttccgctgggacgtcgctgtcccaacccgaaattgaggcactgcttgccgaacgctttcctcgcaggccgtattgcttggttgaggactggctcatcttccacgtcgatgagccgcaggagtcgctggagagagtccggtctgtaggcctgcagccgatgttcctgtactcccattgcgtcaactacgacagcgaggggcgattcccgccagggggatgggtgcgctcgacgctgtgcaagacctatgacggcgtttgcatgttcgaaacgcgcaacaccgtgtacgtcctggttggccctggtcgtgagcagaccgcctcgctgaagacaatatttagcttatgttga

SEQ ID NO: 341612 - DNA, 462 bp, Pseudomonas aeruginosa
atgccgctacgccactctctcgccgccgtgctccagtcgctccgaacgcagcaaggcctgtctcagcaggagatctctggccttcttcgtcaacaaacgatcagcgaactggaagcggctagcttcacggccaccattgataccgtgagggatctggccatttcgctgggcatcagcccagctaccctgttcgccatggtcattgcagcggaaaaccaacagacgactcaccaggttctgatcgatgcaatcgtggaagcagaggccttggggagagccaacgagattatggaacggcagcctcgcgagattgagcatccgcgagtaactgctgctagagagaagtggaaggcagtgcaggcgctgaaaaaagacggcctcacccaggctgaggtggcccgtgctctggggtattcgaagggcactgtgtggcggctctgggagcgggagcctggtagctaa

SEQ ID NO: 341613 - DNA, 255 bp, Pseudomonas aeruginosa
atgatcgggccaaaactggcaacggtaagcatgagaatgatgttgaagtttctgtcgcgtatctggaacacaatcagcgccgaccgccgccccgagtgggaaaagcaacgtgagcgtgagttcatcgaagcggtgaacagcctcaagactctcaaggtgacgccagggggccgcatgtccatcgaccctgaagagatacgtgagcaggtgttggaggcgcgagagaggttgaagcattttgtccgcaaaccctag

SEQ ID NO: 341614 - DNA, 780 bp, Pseudomonas aeruginosa
atggcaaacgaccgggtaaaatatagctcagaagagcatagtatcttgtacggagagacgcgaggagcctgccctctttgtactcaaccaattcttttcaagaaggccggatccaagacctcgagaggatatgaacttgcccatatctaccctctcaacccaacagcagctcagacgctggcgttaactggattctccactccagcagacatcaacgccttagataatgtcatatgcctttgccccacctgtcacacgaaattcgataaagacttcaaaatcacagaatacaaccacatccgggctatcaaggatggtttcattcgagacgcagctgcaaggaaagcaattgccgaacacacattaaaacaagaagtaaaagaggtacttgaggtcatcaccagcttacaatcagatgacattgatacgttaggcctggaacttgaatttgacgccaagaaattgagcgataaattgaaaacaggcgccagcaacctccttaagcgaaatgtccgtaacgacgtggttgactacttcgtatccattcgcgaagaaatgcgaattttggaaatgcgagaccaagccacagtaaagatattacaaaaccaggtaaatagctactactgggaaatgcacaagttaaacccagaaaataaagacctagtttttaaatacatttccgaatggattagcactaggtctggcaagtcaatcgatgcctcaagagttttaacgtcattcttcgtgcaaaattgtgaggttttcgatgttagtgcctag

SEQ ID NO: 341615 - DNA, 1629 bp, Pseudomonas aeruginosa
atgcttaaacagataaagtgcaacctattcaatcagagcactattaaattccatgccggactaaacgttgtccttggggatgacgaagccaagaattcaattggtaaatcttcagcccttcttgtaatcgacttcgcaatgggcggcagcagcctattggacgacgacgcgggggctatcaaggtgctcggccaccactcataccaaatcacttttgaatttgatggaattccattctacgtaacgagatctacagaacaacctgaagttattgatatatgcgactccaatcatgtaaaacaacatgagatatctgttgaagcgtatcggggaaagcttaagggcctctacgaccttactgagctagaaagctccttccgatccattgttgggccatttgctcggatatggaagaaaggcgaagcggatccagatcacccattggcgggtagcccaaaagaaaagctcagcgccggggtagctagactggtcgatcttttcgaacgtactagcgatgtttctgtagagcgggccgtactccagaccttgcaagacaaaagaatcctaatgaataagtcgatggctgcggaaataattccacggatcacgatgaccaaatacaagtcaaacaaccagctcattaaagccaacgctcaagctatcagtgacattaaggataattttgcgggcgctattaccgcatacgaagccctattcgacgaaaaattgagagctatacagcaaaccaaaaatgaaacggtaaataagaaaaaccttatttccgccagaagagaaaaacttcagagagacatctccggcgtaactcctcgcctcactgcaaacattgcccttgtggccgaatttttcccagaggccaatcttgaacgcttggagcaagtagagcagttccacgcaaaaattggcaagctcgtgagcaaggagttaaaagccgaacttgaccttttggttgcaaacgaatttgagattaccacagccatcaccgacctcgatcaacaaataaaacttacactcaagtccaaaggtactcccacagacctatttgcgaaagtttttgaactaaaagagatcaccgacaaggccaaggaagaaaacaaattcttcgaaaaaaagacttctcttgaagatagcgaaaaggcctgcaaagagcgcttagacattatatataacaaaatcttccttgagattgaaaccgcagttaatcagaagctagaaagattcaacaccaaagtctacggccctgagcgcaccccgtcacagcttcgcattaagaactcaaactcatacagctttacttcaccgatggacactggaacaggaaagtcgtatgccggcttggttggatttgacctctcaatgcttttgctcacgcgcctaccattcgtaatccatgattcgatgatctacaaaaacattgaaattgctgccaccgagcacatcattcggattctatcctctttcaaacagaagcaaattttcctggcttttgatgaggccaagaaattcaatagcgcaactcagaacaccctgaaagcccagatggtgttgcaattaaaccgcgacaagctcctttatacccaagactggagggcgaaagagaagcgaacataa

SEQ ID NO: 341616 - DNA, 693 bp, Pseudomonas aeruginosa
atgggcatttccgacgcaaccgacacgcgcctccttagcaaagccgaactgggccaggtaatcaggtatcttcgagaactccgccaatggtctcaagaaacactggcggagctagcccacactacaccgcgcacgatccagcgggtggaagccggctcgggagcgagcgtcaacaccctgcgctctctcgcaggtgcgtttgagtaccaggacatcgacatattcaataagccgatgccgatccctacggatgaacagctccaaaccgctcgcgaacagtttgaaaaagattacgtcatgagcaaagccctccagcccgattcagggaggtgcttggccaagcttgcaactgagacgattggcgactacatcgagcctgcatttgagctatcgcgagagcaggcggttgcctttgccgagctcagcgactacctacgggattatcgtgacgtcgctgatgactgctcaagtacatcccgcctgttggtcttcgatgagcttcaagagatgctcgaccgactgggtgaacagggcgtcacactacgttatgcaaccacgcctgtagtgcagagggtcacctcagatccgccgcaggaagcgcagcccattgggaaagtgctctacctactggcgttcaaggagggtgaggcgccggaagagttggcacttccccggaggatgggcattgggtaa

SEQ ID NO: 341617 - DNA, 639 bp, Pseudomonas aeruginosa
atggaaaattctgaatctccaagggattgtcaaatgactggacacaccgcggaaactctggtgtatcggtatttgaagccaagcgacattcgtggtcacctatgttggtcagaagtggatagcagtgtgaccctggcagaatcgcgtggcggagagtttgtggaaattgcgacatttgatttgcgcgaggagcgcaaagagaaagcagtctcatttttcagatcattcaaaggagatgataccaaccgaatccttgatgtcttaaacgagttgcgctaccggagaactcggagtggaaagcttgcggattcgggcttcgcagtcaacgcaggaatgatgcgaatcaattacgaacttgcacacgaagacctaaatgacgagcatgaagtaatcatatttaaagacgacgacgattcaaatagagagtgtcgtcattacggcttgactatcacgccaaatgcaacgactcctcggcttgagataatcaatgcgctgcttgagctgtctaagttttttgcgctaaagcagaaatctaaaaaaccggatacccgagaaataatggagtttagtgatgcggaatctgcgtttttctcaatcgccagtagcgtcattataggtaatcctcccgcaataacctga

SEQ ID NO: 341618 - DNA, 804 bp, Pseudomonas aeruginosa
atgacgaagaaatttgaagataaggagtctgcacagaacattggccattattatattaaagagcattttgtaaagtttaaagagccgatttttttaaagaaaaagcaagctcaaaaaactatagagccaaaatttaagagccattttttttacaccgaagattttactgaggtatatgagccaaaagctcatcgcttcgttgacgaaagattgtcttggtatgatgctattgagaacggagatttaaagccgagcatagatcgagatggaaatgttagactcttcactgatggtctcacgaattctcaatatgcagagtggtgcgagcagattgagttaatcgctagtaaatggattgagagagagtgctatagaagttctctagagaaaaatggagagcactgcgaaaactatcaagtctcagagagaaatacagagcgttgcgaactttatcaagcctcagagcaaaagagagagtactgcagaagtcctcaagtctcaaggcaagatggtgttgatttaatattgcaagctttggcgcaactcgctcgctatcttccagatttgcaagagaagcagccgaactattttttagatatcgaaacttacaagatcggagtaaccctgcaaggcgagggaactgtcactctattgattggcaaaaactctgaagttgaatattcctatgctcagcggcaagaaaagggcacgatacgaatttcgggaattgccaagcttacaactaatgtaagaaactcaaaaaacatatggaaaattctgaatctccaagggattgtcaaatga

SEQ ID NO: 341619 - DNA, 747 bp, Pseudomonas aeruginosa
atgagaaggtctcggccgggcgttgtgcgttttcacagcggcctaggtgtttcggcccgaaacactcagtcaggtcctgacctcggcgccggcggcgaactgggtgattcggcccgaatcacttcgccaggaactgacttcggcgccggcggcgagctgggtggttccactggaaccacttcaccaggtcctggcctcggcgccggcggcgagctgggtgattcggcccgaatcacttcgccaggaactgacttcggcgccggcggcgagctgggtggttccactggaaccacttcaccaggtcctggcctcggcgccggcggcgagctgggtggttccactggaaccacttcaccaggtcctggcctcggcgccggcggcgagctgggtgattcggcccgaatcacttcgccaggaactgacttcggcgccggcggcgagctgggtggttccactggaaccacttcaccaggtcctggcctcggcgccggcggcgagctgggtgattcggcccgaatcacttcgccaggaactgacttcggcgccggcggcgagctgggtggttccactggaaccacttcaccaggtcctggcctcggcgccggcggcgagctgggtgccttgctccgagtcgccatgggaaattccccagcgacgaaccatgtatttcctactgcgcgctcctaccccgatcagcacgatgtggccgaaccccttccctatataggaacactgcaccatggctga

SEQ ID NO: 341620 - DNA, 1332 bp, Pseudomonas aeruginosa
atgacaatgaggctgtcgcgctttcccatttcgaccttgctggactcggcctcgggacatctcgaggaccacttgtttaagaagcggcttgctgccgaaagcggcgaaccgctggctcaacaatattccggcatcattttcagcggcaacccgcatgaaaccgttcctcggcgcctgctgctggataaacgcctcaccccgctggagcggaactgttggcaagtgttccgcttgctcatcaacgacgacgggctgaccgcgttcccgacatacgagcagttgcgcccctacctcggcatgcaaccgggcaagattgcctcgcgcgaaaccatcgccaaggcactcacggttcttcgtttgacacgctggctcagtctcggccgacgcctgcgcaacgacctcaacggacaagtacagggcaacgtctacatccttcacgacgagcctgtctctccagccgaagccttggagttggacaccgactacatgcagttgctgagccagtccaccggccacagcaaccgagccatacgcgaaatcggccagatcacctggcgggagttcagggatgacccggacgttggtcgccgcctcccaacccatctggagaagctcgagggacgcttgaaccaccagcaatgggctatcgatagtcagctcgaagcggatccagcggcagagttcggcatccgaactctgcccgatctacctcattcaaccccgagttcggatgccgaactcagtgaaatcagcggcaagcaatgcgctttaccgctgagttcggatgccgaacccagacagaatccgccgagtacgcccttggttcggatgccgaactcatatagtacgtatacatacaaacaagattctgtatgtaaaaagccagtacaaccgcgagcacgcgaggaagcccatccgaactggcaggatctcctgcacgcactggaggccgagcaacggatccaggcagtaagcgcgctcagacgggtgtccgaggatcttcggctacccatcatcgagcagtggcagcaccgttgtgccggcggaacagtcagcaatccgttcggctacctcatgacgctcatccagcgtgcagttcagggcaagttcaacgcttcttgggctccggaagaaccggctgaacgagccatcccagcagcggaacgccccagtcgtgctccggccccaccaagccccacgacgcctgaacagcaccaggttcaaatgcggggtgatacccggacagggagcgaggtcctcagccggctcaaggaccttattcggcccaggcacggatcgagcgtgccatccgagcggggtgatgagccatga

SEQ ID NO: 341621 - DNA, 1023 bp, Pseudomonas aeruginosa
atgagtcgttatgaagagctaagaaaggaattgccggcgcagccgaaagtctggctgattacaggtgtggcgggctttattggctctaatcttcttgagactttgctaaaacttgatcagaaggttgtcggtctggataattttgctactggtcatcagcggaacctggacgaagtgcggtccttggttagcgagaagcaatggtcaaattttaaatttattcaaggtgatattcgcaatctggatgattgcaataacgcctgtgcaggtgttgattacgttttacatcaagctgccttgggttcggtaccgcgttctattaacgatccgatcacctccaatgcaacgaacatcgatggtttcttgaatatgctgattgcagccagagatgccaaggtgcagagtttcacttatgcggcaagtagctctacctatggagatcatcctggtttaccgaaggtggaggatactataggtaagcctctttccccttatgcggttaccaaatatgtgaatgagctttatgccgatgtgttttcacgctgctacggcttttcgaccattgggcttcgttatttcaatgtgttcggtcgtcgacaggatcccaatggtgcctatgcggcagtcataccaaaatggacctcttcgatgatccagggtgatgacgtctatattaacggtgatggcgagaccagtcgggatttttgttatattgaaaacaccgttcaggccaatctgcttgctgcaaccgcggggcttgatgctcgtaatcaagtttacaatattgctgttggcgggcggacgagtttgaatcagttgttctttgcgcttcgcgacggccttgccgaaaacggtgtgtcctatcaccgggaacctgtttatcgtgattttagggagggggatgtacgtcactctctcgctgatatcagcaaggctgccaaactgctggggtatgcgccgaaatatgatgtgtctgcaggtgtggcgttggccatgccttggtacatcatgtttttgaaatga

SEQ ID NO: 341622 - DNA, 879 bp, Pseudomonas aeruginosa; identical to SEQ ID NO: 323203

SEQ ID NO: 341623 - DNA, 1017 bp, Pseudomonas aeruginosa
atgattattagaattccgggcgaattatgcttgactgtggatcaagcaaataaaatgatagcgctagagaatattataaaatctcatggagaggggaagcaccatgtttggattccggcgcctactattaaagagctatgtcaggtagatggcttttgttacttcgcaaggcgcacccttgatgcaatgcttagtcaggtttcagaaggtgcctatctgcataaggaatttgatttctatgcagttgttaattttgtcgacaaacatgctctctcgcatgtgaatggtgtgcttgatatagggtatgcacactttttagatacaacgacaacccaggaatctattcttttagctgagaatgagcttgacggcgaggcctactattggggtgctaaaacttatctgcagttaaaaagaattagtggcgcaaaggtaaatcttgaaatagtgcatggcgggggaaatacaacttataattgttttgtcagactcgatagaagatctcgttttttcgcatcaattgttgatagtgacagagaacatccgaaaggatgcttaggcgctacggcagctagatttaaaaataccaaagttggttatgatggaaagcgatattttgaaatactatcgtgtcatgagatagaaaatataatacctttaaaggtgctggcgtctattaatgaggttaagcttaatgaaagcttagtgcataaacctgataatattgacttcagggtttacccagatcacaagacagggctttcattgaaagaagcaaaaaaggctgacatgttacataaagatgaatactggaagaaatttgatgatttagatccagacacactactttgcagtgactttggtgagaatcttttgagagattgtgtggattatgtttgtacgctatctcccaagaaatccagagaacatatagatgaaaaatctgataaagagtggctgcggatatgcaaagtgattgcatcttggggggtctctagtagagggcttctgagctag

SEQ ID NO: 341624 - DNA, 1026 bp, Pseudomonas aeruginosa
atgagccagcctcaaaccatcgttggcatcgatatagccaagagcgtcttccagattcacgaggtggacaaagaaacaggagaagttaccagccgccagattaagcgcgctcgtctcctgcagcacttcatcaatcgcgaaccgtgcttcatcggcatggaagcatgtggtggggcgcagcattgggcccggcagtttgtagccatggggcacaccgtgaagctgctgccagctcagtcggtacgaccctttgttggtggcaacaagaacgacgccgcaaatgcacgggccatctggacagccgttcaacaaccgggaatcaaagccgttgcaatcaagaccgaagcacagcaggccgtgctcgcgctccatcgtatgcggcagcaactggtgcagtttcgtaccgcacagatcaacgccttgcgtgggctactcgctgaatacggtgaggtcatgcccctgggccgcgatgcagtagccaaggccctgccttcggtattcgcccggctcgtcgatcgccttccgggagtcttgattgaatcactgcgcgagcagtacacgcgaatcgctcaattggacaaagaagtttccaacatcgagcggcggctgcaggagtggcaccgcgacgacgaaagctgccggcgcataacggcaattcccggtgtggggttgctcaccgctaccgccacggttgccgccatgggggatccaggtgcattcagctctggccgcgaattcgcggcctggctgggcttggttcctcggcagacaggaacagggggccgggtaaaactcctaggcatcagtaaacgaggcgataggtatctacgcacgcttcttatccatggtgcccgctcggtactgatgacgagcaaaacaccgcccgcatgggcagcgaatttggctaagcgacgcccactgaatgtggctgtagtggcactggccaacaagatggctcgtacgctgtgggctctactggctcaccaacgagcattccaatctgggtacgtaagtcgacccgcttga

SEQ ID NO: 341625 - DNA, 330 bp, Pseudomonas aeruginosa
gtgatccagggcatcaaacgcatcgtcgccatcgaaggcgaaccctctcccaactgccccagcagcaattccaccttcacctacgacgaacgcggcctgctcagcagcaaacgcgacaacaacggcaacctgaccacttaccagtacaacgcccgtggcctggagacctcgcgcaccgaggccgccggcactgcgcaggcgcgcaccatcacaaccgactggcacccgaccctgttcctcccggtgcaggtcagcgagcccggccggatcacccgctaccagtacgacgccgagggacgcaagaccggcgagaccgtcaccacccgctga

SEQ ID NO: 341626 - DNA, 1722 bp, Pseudomonas aeruginosa
atgaaactgtccgaggaacagaaggcagtggtcaacgcgcctctgcagcctatggcagtaacggcttgcgccggcagcgggaaaactgaaacggcaatccgacgattgatctccattcggcaaaaactcgaagatcatcgcggccgagtcgtgctgctatcgttttccaacgtcgcggtgaataccttcaacaaggggtatgcgaagcttgcgtcggatctcccagatggtgccattcgtaagcgtgtggaggtggacacgctggatggttttttcacgcagcatgttctacgtcctcacgcctatcgcaccatgggtgcgaatcaagcggcctatctcgtatcgggatcggagccatttctgaatggtttccaatactggaaagatgaaaaaggccagcggccaataccggtgaaggatctccaagtgagtttcgtgaacggtgatcttgtgttctcaagcgactcttatggaaaagttgaaacgcttgatagcaagaaggccattgaggtcatcgagaagctgggacgcactggtgcctacacccacgatttgggtcgttactgggtgtgtagaacgttgattgatcaacccgcgatcttgcgagccttggccacccgctatccgcagattctggtagatgagtcgcaggacttgggtacgatgcaccaagtcctcttggagctgcttatggatgcgggagtgcaagtttccttgataggggacgtaaatcaagggatctatgccttcgctggtgctgatggcacgtttttggaagcattcgccagtcgtcaaggtgtgaaaggctacaacctaacccggaactaccgttcactcccttcaatcatcgacatcgccaaccagctttgcggtcgtaacgatgagtctgatagacagccacagcaaggcggagcgtttttcgttgggtacaaggatgccgaactgccgcaactcgttgattctttcaaagctcatctcaatgggttgggcatgcaggacatcgatgctgtcatcctaagcagaggatctgatagagccgctaaactgtccgggaaaacagccgctcccggacaaggtacagtggccatgttcgcggaggcatcgttgatgcgcgatcaggaacgtcgattccaggatgccttccgacttgtgtgcaaagccgtcgtcggcctgaccgaaaacgccccaccagggcttagctcagcgctacagggcacgcctcaagatgaatggatgctggcgttaagacgaatgctgtggacatttacacgcaacgaggaaacgggactgccgctctcttcgctcgaagctaaggtaaaatggcatccgcagctcctaaaaaatctgcgcgatttactcgccaagatcgaaaaagaattcgggctgagaacggtcgagacctttggccaaaggatggccaaaagaggcttggaagataccgcactcgctggtgctgaagccgctgaacagacagggccgggaataagggtcgagactgttcatcaggtcaaaggtgaatctatcggcgcggtgctttatgtcgcgacaaaagccaatatcaatgcgttgctggaaggcaccgggacagaagaaggccgcatcgggtatgtggcactcacaagagcgaaaaacctgttttggctagcagttcccaacagctgcctaggagcgatgcgtggtcgcttgatcaaggctggcttcgcagaattactcgcacagtaa

SEQ ID NO: 341627 - DNA, 1176 bp, Pseudomonas aeruginosa
atggagatcgagcagaatgggctcggcttcaataacctgattttcatggctgtggtgctcagcgaactggcaaaaaatccagatgcagcctatcgaagcctgattgtcgaggagccagaagcgcatctgcaccctcaactgcaacgcgttctcctgagttacctagctggcattcctactaaagagggcgaaaagccggttcagctgtttgtcaccagccactcgccgaattttgctagcaattcaaagcttgaggcccttgtgtgcttggtcgagaacgaagctggcgtagagaccttcttcccccgtgatatccaattcgcgaagggtaagcgtgaaaaacttgagcgctatctcgatgtgacgcgagcagagctgttcttcgcccgccgcgtcatattcgtcgaaggagctgccgaacttatactggtggacgcactcgcgaggctcatgggcttcgatctgcgggaatatggagtcagcctcatcagcgtcgaggggctcaactttgattcctttctgcccctgttcggggagaaaggccttcgaattcctgtcgcggtcgtcacggatgctgatccattcgaagctgaagagatactcgaggaagcggtggcagatctcacagacgcgcagctagaggaggagttgcttgacgaagctgccttcctcgacgaggtcgacgcacaggacgaagatgacgcggaggaattaccccaagaggaagccgacgcagaccccaagaagaaaaaacgggtcaagcgcaaggccgcttatccgtcgctcggcgagaaaattcgggtgtcgagtaatactttgaaaatgaagtcttctgaagacaagtacgtgaaggtgtaccacggggttaaaacgctggagtacgatctggcgctccttgaggaaaatcgaggcgcaatgttggatgcgctggccgatcttcaccctaggatttcaaaagcgctacgcgagattgtaaatcgcgcgcccgacaacactgccaaagccaaagcgctgttctgcgggatgttcgagcgtaaagacagcagtagcaacgtgcagaaaggtagcttcggccaagcacttgccgagcagattgcaaaagtgcctggatgcaaagtacctgagtatcttgagcaagccattcgtcatgtttgccagggagcggacaagccatga

SEQ ID NO: 341628 - DNA, 348 bp, Pseudomonas aeruginosa
atgatcgccacaccaacgcttaaccctgaggcgaccggtctgctcgggatcggtatattggacatggatgtgcgcttccatggttttgtctggacagggcttgagggctgcgatgaagtcggcctcgtcctcatggctgagatctttgaaaacgaaatggaagctgatgtcgccccctggctcaccttcatggggccggtggcgatcggagatatcgagtcgtgggtatggctcttcatgtccagcgagaagcgtacggagcgcatcgaccactgcgctttttcccacattattgggcccgacgagcacattcaatccaggctgaaattccagcttggcgtcacgtag

SEQ ID NO: 341629 - DNA, 1362 bp, Pseudomonas aeruginosa
atgctgcctactgaacttgcaagttacttcgacaaacttcacgaggagcgcctccaggtttgcctgcgccggttggagggtgacttcagtagtacaggcgataagttcggcagcgatggtggtacattccacctcattacagattgtttcttggacgacgatccaacactattcgagcaagcaataccctggttgctggaagcactacaagaagtcactttcatgcagagtattctgcgcttcgaacgcaacaggctcgaaatcgaactgaagcaacttttcaacaacccgatccacgacctccgagcaatcgagcgcaagcaacaagagctagatgatctatgcatcgaaacactgcacaagcaagcccttcatatcttcgatgacttctgctccaccttggtcgccgcaaaagacttcaatgctcgtcaatgtaaggaaaacttcttcctcgccactttgatgcgcattgtgtatgaaatataccgctcagataatagcgagcaacgcagatatatacgtgcaccgcagaaaaccactccgctctatcaatactacaaggccgtagaggtggatctgcttgagaccgacacgcaatacagaaaataccatttgcgctctgtcacagaagataccaaacttcttataggaatccccaacagaatcctagactcgcaacattcggtgcagctactcatagaacacaccccaagctatgtgcttacgctgttcgagcgcttgcgcagtgagggactaataaaagacctagcactgctgacctgcgacgatgtactaattgaaacgaaccaacacatattcgtcacactagggattgaggttactccgcagccgttgacgttggaaaacctgcggcgacaacctgccggagaagtgataagttcggtactccgcacgcgaggtttgacagcgtatagtagtagactatccccctcagtttccaccttttacgaaccaggaagtgatgataaagcttggtgttctatcaccgaaaatagtatgacctttgaggaaatcgcccacatcccagaactacttccggactgtgcagtgactcgaatgatacatttggagtatttcgttgaagacggccgttattatgtttctcacatcgaccatgaattaattttttacacccttgaagagttcgacctgcgagccaatgatccctaccagaaaggtaacgcacgcaagcgtctgaagacctttaagatcgatcgttcggcgattcccttcatgctggacgacggcacactcttcgtccacacgctcattgatgcctacttcgacaaaccatacctgctcatgggcttcctgctcgacctgctacatcagcgcaagtga

SEQ ID NO: 341630 - DNA, 1497 bp, Pseudomonas aeruginosa
gtgatcatcgaagcgctggaggaactgggtccgtgcttgagcacaaaattggcaagccacctggttgctcattacgacctatcgcaggatgcggctcgtcaacgcatcagccgagcaccaaaaaatgaagttcgacggttaagcagcttgcccttccctcacagggcagcatttgtttatctaaaaagccagtacgggacggaggagtactggaacaacctctacgaggcgattttatctgtcgagggcacctactcgcgggccgtggcctctgtcctttgtcgcgagatggtgccggttcatcacttccacatcgcctgtggcgctcccagcgcccaaaagggacatattgcctcaagggcagctctcaagcgtctaacagacgccggggtcttgaccgaaaataccttgcctggaattggtctttgcgtgatgaccagacagacgctcgaaagccctgagttcagcgctattgcggcaagtgtccgatcacgcttgatggctgagtccgtgctgctcgatagcatcaaggagtggctacgaaatttggctcttgcgagctttaatagtgtcgccctccgaggaaccatagaggacccgctgcccagcgtaggtacgttcaactgggacctcagtgcgcccagttacagcaccgccctagcccaacgacgtaaaggtgaactcgttcctgggttcatcgcgtgcgatgttctccttaccgacaacattagcgtcagcgcaatcaagcccttcctccacaagatacaaacgcttcaggccctacaaaatatcggccgcgtcatgttcatcctggtcggccagcgttttgataacgacgccttcaatgagcttagaacagcaggtgtgatacctgcgacgcctgaatctctatttggaaaggagatcgctgctgccttccgagatctgatcaagacgttgacggatgcagtgcagggggtcgtcaacgcagcgaaactcgatgacgtcatcaccagacttggtaagctcgagggcgctttggggaatatgcgaggctcgttcttcgaactgatcattgccgagctcgtaagaaaaacatttcccggagaggttcagctcaacaaaatctgcttaggcgaagatggaaaggctgaagttgatgtctgggccgtgaaagaagggatctcagccagaatcatcgagtgcaaaggcatggcacctggcgctcttgtgagcgatgaagaggtcgcactgtggctgaccacccgcatcaagcgggtcagacaccacttgaagaacgtccttcactgggacaaacccaagccacagtttgagctgtggacgagtggggtcttgtcagccgaagcacagcatagaatcgaaaaaacacgcaatgcgaatagcgcaaaatttgacctaatcgtcgtcggtccggaggaggttcggaaggccgctaaatcgatgaacgacaagtctctactgaaaaccctggagcaccatttcattcccactcagtga

SEQ ID NO: 341631 - DNA, 234 bp, Pseudomonas aeruginosa
atgggaatgaatcgtccgagccagaagctacggcaagagttgctggatatggcggctacaggcgacgagttggtggctgaggtcagcagaattgccgagcgatgcgacgagatggcggcattcctcttgcgtaggctgcttggaaggatgtacgacaatatcgtccaacttgaatcccttgcagaagaagttcgcgccggccggatcgtccggaagagcccggacgagtcctga

SEQ ID NO: 341632 - DNA, 759 bp, Pseudomonas aeruginosa
atgagcaacaacccgcacttcatgaacatgaccgccgacacgctcggcaagagcttgctgcagggactgatccaggaaatccggatcatgccggactgctggcagaagcttcccgaggccaagcagcaggacatcatcgaccgcctggagcgccaggtacggaatgccgccaccatcgcgatccacacgattgccggcggcgaccgcgacacggtctacggcaagctcgaatccttcaccgcaaaggacaaggtaaaagcggtattcaccgtgagccccagcagtccgaaccaggagcaactctttggcgctgtgcaccaggactgcttgttggtcatcggcggcgccgctgagttcctcgacggcatgaaggacgtgaaggcggatccggaccagaacccgctggacctgaatggcggcgacggcgacatggaagacggcgcctggggcggcgagcagcagcccgacgatgatgtcgtagatgccgagttccaagaactgccgcaactcaccgtcgagcgcttcgccggccacaccctgggcgagatcgccatcggcgtcgccaccaagaaggacgtgttcgacgcggcctggctgcaatcgcgcttcgctctcaccaccgaggaagccgagcgcgtcattctccaactgctggaccagggcgtcatcgtgctcgagcaggagaacgaggagtcccgcgagttgaacacttaccgcgtcgtcaagaagccgggggatatcgccctcgacctggagtga

SEQ ID NO: 341633 - DNA, 312 bp, Pseudomonas aeruginosa
atggccaggcagaaaaaagcgcagcaaccccggcaggagctcactgcggcggatcgcctggggctgcgggtatcagcgatgatcgggtcgccgaaggcgcagttggagaggagggcggtgattcatcggctggataccgataccgacgaggcgtgggacgcgatcatggagctgctggccgaaacggacggcctggcgctggtgttcgatgacgaagggaatgtgatcgtgacttgggcggccggcgaaactgaagaagtggcagagagcagggaggtggtggagcaggttgaggaggaggcgcctttttaa

SEQ ID NO: 341634 - DNA, 1119 bp, Pseudomonas aeruginosa
atggactttaataattattgctactttcccatcctgagaacaaaggacgccgagattcgtgccatcggaaatttatctgataaaacgctggatcatattcttccgatttacgaactaaccaagtcacgaagaacaaaaaaagacccgatcggagacatcgctaagcgtatagaccagatcgctaggattcagggatctcgcccattcgttcttgacgttaccacagatgaaaaacaggtaaacgaacagactgaaagtctactaacttcttctggtggttatgagcactggcgtgctttgttgagtgcttacagttcgacactcaacataattccagcgattcacattgatcaagacgatgaagatttcagtgaaaccactgcatttattaaatctgtacaaagcaattttagatgtttggctcttcgcctgccgtgcggccttgacaatgaaacctacaccgaagtcctcaaagcaatatccccgtacctaggagaatgtagtttaatcatcttgattgatagcgagtgcattcgcgacaaggtaaaaaaaggtagccttgacgccacattagacgacatgtacgacagtctaacgattgtccgggacataacaagtgaccgtagagccaacactaagatagtttgcatatcaggctcgttccctctgattccaagcaaagagggtcatgacgcctacggagaatttgagatatacgagcagagtgttttcaaagagctgtctagcgaattccctgacatgggcttcggtgattacgcttcgatcagcccagttcagactgatgttaaaggcgggggattcgtgcctagaattgacgtatccacagctgatacgttcttctatcatcgctaccggcgcaaccatgggggctacataaagtgtgcgaagctagtgctttcagaccctaactatagaagtataaaaacgtggggggacgacgaaatatttcttgcagcaaataacaacccatcggggattagcccatcattttggatctccgtcagggctaatagatacatgacccaaagagtttccattcaaaaaactaggcaatttcatccacgcaaagatcaagaaggcggagatcatcaagagtaa

SEQ ID NO: 341635 - DNA, 174 bp, Pseudomonas aeruginosa
atgatcgccgcgctgcaacgcctgcgttcggaacagggcgtgccggtgcagatgcccgacaccctgaacgccttcggcatcaatggcggcctcaagcacggcctggccggcctgctgatgagccacccgccgctggaagatcgtatcgaagcgctgcgcgccagcgcacgctga

SEQ ID NO: 341636 - DNA, 2526 bp, Pseudomonas aeruginosa
atgagtgcgcaagccgcctccattgattcgttgctttcgatattgttgctggcagaccatcgagtcttggagctgtcgtggagcaccccctttaacgagcctctggaatggtccaattggcgggagcctgtgtaccttgcctatcagccttgggcagcccgctatcccgatcacgtgttctcgtcggcctggcgttttttaagtgaacgtcaacctgctcatggggcgctgctcaccgcactgtctgcgcttgccattgagtttgtcgagcttcggcatggcgtaacacgtattcggcgtgacttgttcggagcctggcagcaggggctcgccagtcggctttcaaccctacctatccaagctgccgcaaaggtaagtctcggttcacctctgctaagcctgactcctacgtcctttactgaagaagagtcatctaataaaaggactgcggcatggcgaagacaagtcgtgccattgctgcaccctgaggaggctccagtagctgactacattacgcgtgagggcttgcatgaatcgcacctacatctaaatggcagtacccattccgagatttgctggctgcgcgctctacgaaacatacgggctgaaactcgggaattcgtaacaacctggaaacacgagaaaggcgtactctctgttcgtgatttaatcggccagataaacccaagattgactccacaggtatttcatcagcacctgctggccgcgagccgacttcgcacatggttggttggcgccgccactggccagattggggctggcgctcagctacccttttcatgtgaaagtatgtgcgctgccggtgaagatgattggtctgaaggactggctctgccaatgccgtcatggcgtagtgagcccgacatccaagacgagctttcctggatggaagctctcatcggccagctcatgcaacaacccagcacgcagatcagccgaatgttccatacctacttgctgctgctaaaccagtatttccgattgctcgtacaaagcgagacccagtacggattcgatcagtttcagaaactcacactgacaaagcttcgtgacccgtcagagcgagactttcgaacacgctttaattctatgcatgggctcaactcgaccataagcacaatcgggtacctagaaggtcgcttttcgcctaaagtagatctgcgaaaagctgaacacctttaccaagcagttctgggcggttaccacggctatctacgcgacaccactggcgccagtgaattgtccagcaccacacctagatccctctcacgcttactgacagagttggattctttttttgcaaggcaggctttaccacatcgcaggattcatcgtttgacacttgtcgcgcatttcatcaagcgtgactggtctcccaaagcaaatggcaaggccggcccctttagacattatccgcttgatgtagacctacgccataccgttaacgtactgcttttatcactagaccgctggccccggcttcgtacctgggtaaggggtatcgacgctgctgctaacgagcttcacgcaccaccagatgttttcgcgccggccttccgcgtttgttatcgggctggccttagtagacgcagctaccacgcaggcgaagactttcgtcacctgctatctggcattgcaaccatgtgggaggcgctagaatttctacagcttcgcgacggtgatcgtatcggtcatggtacagcgatgggtattcgcccaagcctctggctggatcgcatgccgagaaaaatatctctaccgagaggtgaatggttccaaggggtgctagctgcatggcagctgctccgcgatgagcctgagatgcagggatgcgctaaccgcctacagcgtgagctggagagcgtagcgcatgagatttttgggcgcacgctatctgctttggacattgagcgcgccatggcactacgcggtttgagtcgccttgacgtaatgcgacagctcaccagttgcggggcattccaccacgaaactttaaacgacctgtggcgagaagaaacggagcaggtcaaagtcgcatatcataaccagcggtcggcactcgaactgctatgggaatggcttagccatgaggcagtactcatccgagctcatgagttggttgcaaaggaagcacaattcttggcgccgacagactacctccgattgcaacaagctctcatgtgtcaggttgctagccggggcgtactgatcgaaaccttgccatctagcaatgttcggattagtcagtaccatcacataggcgaacaccattcattgcgctggatgcgggttccgggttttgtcgagcatggcgacccagaaatcatggtttgcctaggctcggacgatccgggcatcttcgctaacgacttagagacagagttttatctgatgtacgccacactccgacaagcgggcctgagtgactctgacgcactcaatcgactgagcacactgaacgaacgaggccgaacctatcgtttccaccatccgctcctgtcgtaa

SEQ ID NO: 341637 - DNA, 2658 bp, Pseudomonas aeruginosa
ttgaacagcgtagtacccatagtaaataacgtggaggttctcatcgacctgaatcagggagacagtgccaaggcgctagaagcccgcgagatggttcagcgtagtcactacgaccatctccaccaacaaattagtaagcatctccactcaccggacgctttgtcgctagagcaaaacttgccgacagggagcggctggactcattttatcgacggatctcggggagcaggcaaatcgactttcttgcaatcggtaaggcgagccctgaatgacgacagcgacttaagaacaaagctggcattcatcgccgtaattgaccccagtcgaattgagcaaagcgagattatcctactcgtcatgctccagcgccttagccagcgggttgaagaggttcttaaagtgatgcgtagcactgaacaggaggagcttcgtatccggtggcgcaaggcattcaagagtgtggcaggagggttgagcctattcacacaggggtatcatcctcttaacgatctagaccctgaactattcctagactggggcatggagcgcactagtgacagcaccagcctgagagagaaactccactacctttttgaaactgcgtgcaagattcttggcgttaaattgctgatgtttggctttgacgatgcagatacagatgccactcatgcgattaatctgctggagtgtattcgtaagtacctagacaccccccggctcatggtgctggtcacaggcgacatggaactctactcactactagtaaaccaacacttcgccaaaacagtcgcaggaaaacgagatgcggcttttgagcttgtgcgcgactcaaaacctggagatcgctcgggccagtatttacgtatgatcgaccaccttgaagaacagtacctgctcaagctctttccagttaaccggcgcttgcagttacagcctttatggaatatcgccaagggcaacgaaaagtgtgaagctgaatttatagattggggcaccaagaagatccctgtcgaaagattgatgcggaatatcgtgcaacgcggcctacgcattaagtccgagcctgacgtcactctatatacagagtttctactcaagcaacccttgcgctcggcgctacaaattctaagcaattgtgccccctatctagataagaggtccatcgagaatacatcggataactggtctaaagaattaagtgaggcactcaatcgcgccctgcaagccttggcactgaccagcttctacaagcactctattaacaccgacgctctcgcagcgaaggatctagatgttttaacccaaactgtttttgatctgtcactggaagacggagacctcgacaccgcaccatacctgcgtcctatgtccgcaaggcaagacatcaaagccggttttaccgcattagcagcagaagttccctgtctttgcgcccagcagccgggaacagcacttcgctatttattgcgagcccccggcagcgtttcgctctataatctcgcgagcccacacttaatcaataaagatggcgataagggctcggagaattcgcaagcatctgtataccatttcaaatcttacatgggtattggacgccaggaagatagcctcgactgggcacggcgtgccaccgccgttattgccctgccttacagcggaggacagcaacaacgcgttgtgcttcccggcgtaatcgggatcatgaatcaaaaagggaaaaagggagagatcagcgctcagacagcgatcggacgcgcgatagcgagccaatcggttcaagcactgccagttcttgccttaggtatgatcaccgttgtgaaccagccgaactctcgtacctatgcgtccatttttactctccttggcctaatcgaaaagctactttcagctggttctaatagcacgctgaacgcaaagaccgttttttatcgggcctaccctactcttaccatctccggccccaactggatgcgaaaaggtgtcgattcaacagacgaattcaacaacgataggctacccgacgaagaagataaaaaatataaggagaaacaagaagccctttggagccaaattcaaagatggctagaaagcctaagtgatctgactccggaaaccacaccttcgggagtttttttgggaaaggtttggacacgcctgttcttcagcctccaaaacgccgccgatgatctgaggtccaacgcaacgctggacacagtgatggagatttttgcgctctgcgccatcaatgcgttttgggtcgaagaatctgaacagcacctcccggcctcatcacctaaatcagagagccgcgcaacagtagacagaaaaaatccaaaaaattcggcaggatggtttgttgacaaacttacttcttcacaactacaacggaagaatcttccttatacagccatcatggcaacctgcccgcttcttctaggtttactagacagcaagctaagctatgccgaagctctgaaaccattttttccagaaggtacacaactggatgacatccgagtattactgtgcccatctgatttaaaaaaacttatgagcaatgtatctgttacgggcaagtctcgtcgcagagcccagaactctgcaggggagacgaaaaatggtacagaggatgctgggcctggagatgacaggcaatga

SEQ ID NO: 341638 - DNA, 705 bp, Pseudomonas aeruginosa
atgatgcccgttggttttagagttagggggagtgcaggacagattcaaatttccgacgcttcgtataattatatggtcacgcgccagggtggtttcgactcaagtaattacgtgttgggtgatgatcacgttgtggcgttttccaagcctataaatagtgtggagcctcctctgatctttctgcgttttaactctgcctatgtaatgatgggggggttttccctgacgggaaggcctggggagtggaccggtttttccatgtggcttggctgggtcaacgaaaacggctctggtattgcacccatgccatgctctggtgattggtttgctgcttcgaccaaagtagagaaatcaaatgagctcgtaggtattcgtattcgaaatggaaaaagtggcgagatcgtgtatgacagcggttaccctttggtcaagtttctttcgcaggagtcaaattttactccggcaggtagaatacatcatacatggttaatatataaagttggtaggccggcgcggtctttttttttggctaatactctcgctggatctgtggggaaatttggtaagtatgacgaggtttggatgcaggtagggcagatagcgagcgagccgtcgacactgtatctttattttttgagcaggctctcatctcctccatatcaatctcatatgtggacagctctttttgcctcgtatgatatgtaa

SEQ ID NO: 341639 - DNA, 1326 bp, Pseudomonas aeruginosa
atgacacagtggactgctaaagctgatcctactaaagaattcttcattgacatgatcacaagagatattggtctagatgaatgtatttttgatctacttgataatagcatagatggcgcttatagaaaccgccatgaaaatggacgcctagatggctttcatgccgaaattaatgtttatgccgactcttttgcaatccatgacaattgcggaggcatgaagctgtctgacgcgacggattacgcattccattttggtcggcgagctgacgcgcctaaagactctgatcgctctataggcctttatggtatcgggatgaaacgggcagttttcaagataggtaaaaagatcgtaatccagagctcaaccgagagccatccacaagaagcattttcaacaaccattgaagtcgatgactgggctgcaagtaaagtatgggactttaccctagaacagcttgctcaaccagatttcattggaaccaagattgacataacagatctcaaagaaggtgtaggctccgaatttggagacgatcttttcattaaagagctgagaacaaatatcggccgatattactccttcttcatagaagatggatttgaaataaaagttaatggcgtaatagtcaagcaacacattttcggtgttcgctccagtgaagaaatcgaaccttacgtagactcttacgttgacaaagaaacaggcgtaaatgtacgaatagtatccgggcttgccggaattcctccagatgatgcttcagacccagatgtggttagccgaaatacaagtaactggggttggtttgtggtttgtaataaccgcgttgtgctcgcaggagacaagactgacaaaacagtttggggagacggaacatttccaagctggcaccctcagtacaatggatttatgggcattgtgtttttcgagtcagacaagcccggcgagctgccatggacaactactaagcgccaaatagatgaaactgttccagtgtaccgtcgcgccgttgttggaatgcgcgacgcaactcgcacttatctgagctatacaaacactaggaaggcatctttagagcaagcaaaatcagtagaaggcaaggctgattacgtgtctgtaaaaacagcagctccttctacagctaagtcaatgaagctaccaaactacgctccaaagccaaaagtcaaagtggctaacatactatacgtaaaacctcttgatcaggtagagaaagtagcagaagccttaggcaatcgatcactttcttacaaagacgttggcataaagacctttgagtatttctacgagaatgaggtcggtgaataa

SEQ ID NO: 341640 - DNA, 954 bp, Pseudomonas aeruginosa
atggcctctttcgaatcggtaaattacttaattcgccccaacaaaagtgtagagcgaaagctcatttttgacacgctttcacatttaaaaaagactttcgatatatctagctatacgtatgtcggaatggggtcgatgtggttcatcgacttcgttttagctcatagaaacataggtatctcaaagttgatttcctttgagcatccagattactccaatagagctaaattcaactgtccatataaagctatcgaagttcgcggtgaaactgtgtccgaggggattaaaagtcttgactggcaggaagactcagttgtttggttggattatgacacgggccccgaagggcctgttctagatgatgtaggctatcttgctcagcgtatgtctgctggttcatttttgctggtcactctcaacgctcacgtcgctaggcttccagacaaagacagccaaggtaatcctctcactagacatcaagctctcgctgaactcatgggagaatttgcacctgatgaaagtgagtttcctaacttaaatcttaaacagtacccctcagctctagccaaagctttaactctatgcatcgagagggaagctcgccgatcagccaggggtgttgaattccacccattcatgaactttaaatacagtgacaatgccccaatgatcactataggtggaatttttctagatgcaccaactaaagacaaattcctagcaaatgagcacatacagagcagcaattatttaaataaatcgctcttcgagataaaaattccgcacctaacacaaaaggaacgagctgtgctggacagcctacttcctgatcatcaaggtataagtgaagagaaattcgaagaaatttgcggatttaaaatttcacagaaaagccttaatggatactcagaattttataaactctaccctgtttttggtgaagtccttctttaa

SEQ ID NO: 341641 - DNA, 1125 bp, Pseudomonas aeruginosa
atgtataatagccccccagcatacaccttgggcatcagaatgaaattgcttgatttatttagcggttgcggcggactaacactaggctcaaagaaggccggatttcaaaccgcactcgcagttgacattgaccctattctctccagctcctttggcgttaactttcctggcgtccgtttcttaagggctgacgtcagcctacttaatcatgagatattatccagtcttattcctgatggggtagatggtgttgttggcgggcctccttgccagggatttagcggaattggtaaaggggatatctctgaccctagaagagatcttttaaaagagttctttagagttgtaagcttggtgaatcctaagttctttgtaatggaaaatgtccccggacttatttttcctaacaacaaacccttccttgatcaagccctttctattctcggctctgagtgggagatacttggccccacagttctggatgcatcagactatggtgccccgactaagcgtcgcagggtatttgtgtttggctttaacacctccaagactacccctctttctcttgaagacatagtttctggaacctacccacgcaccacggtccatgatgctattcacgatttaaaaggtgcatatcagggcaaagacggactgtggcgatataagcgaaaggctatttctccttactcattcaagatgagatcagccacaggaaagttttctgggcatcaattgacaaagcataaacgtgaagtcgaatctcgctttgctagagttcctcaaggaggcgttgatcctgtaggaaagcataaaagacttgagtggtctggcttttgcccaacgcttagggctggcactggatctgacaaaggttcctttcagtctgtacgcccccttcaccccgatgacaatagagtcatcacgccacgcgaaggggcacgtttgcagggctttcctgatgactttgtttttcatgagacggtttggcacagctttaggatgattggaaatagtgtttccccaatcattgcagaggctttgctaaaaaacattgctaacggtttagagaaatattccgctagaacagtacgcacaataactgaagcttgcgcttttgcttag

SEQ ID NO: 341642 - DNA, 192 bp, Pseudomonas aeruginosa
atgagagagacgccgattggctcgaatcgatggagaatggtgctctacaacaaggatgtacggatcagcacggacgagatcgaaaccctgggtgctttgtatccgagttatcgctggtggatggtcagtggcgagataacgccggaaatagtccagaccagtccgactatgaccaagccaaccgaaatctaa

SEQ ID NO: 341643 - DNA, 1107 bp, Pseudomonas aeruginosa
atgaaaaagccgggaagaaatgatccttgttggtgtaagtcagggaggaagtataagcactgccaccgagatacagaaaatcagccgcctgtagcgattcatacagttattcaaactttaggctccttcaagaaaaccaaaaaatgcagcgtcccgcaaacactggcgcatgaatgctcaagcaagataattaatgctcacacagtttcaaaaagctcatccttgaaagcgatagccaaagacggtcatgtgctaaaaatatctatagatattaagagcaatgttgcgccgaaaattgcacttgtcgagaccggaataaacaatgcatcaacattctcaggtttctgttctgttcatgataagaaattattttccccaatagaagatgagcctttcaaagctgtgccgctacattgctttctagttacctatcgaggggtcgcaaaagaattatttagtaaagcctacgcttcaaaaatctatgattttatgaaaaccctcgacagaggaaaaaatctgcttcatcaggtggccattcaagccgcagcaagcacgttcggcaccaataatgcgctaactgtacgcgacttagaattcatcaagtcaaagctcgatacaatgttgacgtcgaacgattattcgggcttaagctatgctgtatttatcctcgactctccacctccaataatggggagcgccattgttggcccgacgtttgatttcaatggtgataaagctcaggatatatccaacgatcccggtataatgccggattacattgccatcaattcattttccagcgaggataaaggctatattgttttgtcttggttgccagagcacgctaaaacttgcagtaagttaataaagcagttcttggataagaagctgacggctgatagcttggcggcctttatgatattgcttatcgaaaacttctatatgtcgccaagctggtgggcatcactggatagtgatatccaaggtcttgtaaagagcttgtactcgcaaggcatagatacctataccgacggcgactcaataaatattcgttgtcctctgctttttccacgcataacgaatgttctgacgcatcctgcaatttag

SEQ ID NO: 341644 - DNA, 765 bp, Pseudomonas aeruginosa
atgaaactcaaggaatgggctcaactcgaggccctttataaaatcagtcgcaaacaacccaataaacacatatttaaactccacaatgctcgcaagttatggccaatgtggtcagcgatagggtcaaccgcattgctttttgtgttcgcaatgttcggcatcaagaaccctacgctgattccttacacctacatggcactggctccttgggctcttctgctctatatcacgcgccttaaagcattgcgcatggtttacccgcagcagtttgcagatcacgcgattgaccaccagccgagcctagaaagggaaaacaccctttgttatgccttctttctggagggattgcgcaaggaaggctacacggttgagaaactacgcgagttgtcagcttatgctggcctgaccggaaaacccgccaggcctgctttatcccagaacctgagtttcgcctctctgatcgcgctgatgatcgcgttgtgcacggaaattattaaagccacgcctttgttcacatggggcaagggctcggtgatcgtggtgctgggtatgggcgcactgttcttgaactggctggtactggacggtattcgcagcgtttcctatgagcggatgtgcataaaacgctatgtcgaaatggccgttttcgacttggatgaacttcttgataagaccgccgagttacctgtcgagcagcagctaccggcggtgttgagcatcgcagaacgagacagtagcgtcagccctgtcgatgatttgtcctag

SEQ ID NO: 341645 - DNA, 759 bp, Pseudomonas aeruginosa
atgtcttccattactgctcttgatgctcagggccagcggctgctggcgctcctagtagccaaactaccctccgtaaggcctgcaaacccgcaaaccttcatcggctacaaggaagtgcacgaccgtctcggcctacctcagctgcgagaaaaatttggcgaaagcctcaaggtccaaggactcgtttctcttgctgaatggacgcatgaaactggcaaaccagcgatcaccggcctggtgattgatcgcagctcattgatgccgggcaaaggctattttgagttgtttggtcgacagcctgaggactttgcctggtggagggaagaaattgaaaaatcgaaaagcttcgattggttgccatttctcccccaggagactgttccagagccgcctgcggccgttgatattgaaggttcaactgatcgcgcagaagtaacaatttatcggatcattcgcgacacattgctggcacggcgagtcaagcaactacacgactaccaatgccaactctgcgatcacacgatcatactgcctgatgggagccggtacgctgaagcccatcatgttcagccactgggagccccccataacggaccggatatattggagaacatcgtctgcgtatgcccgaatcaccacgccgagcttgattacggcgcgcgcactctcaaccaaaccgacctccgaccagcagaggggcactctcttggagaccgctatctggcataccacaatacgaatgtccacaaagcgccttag

SEQ ID NO: 341646 - DNA, 1482 bp, Pseudomonas aeruginosa
atgaggatcccgaatccgcctttggccaaggatcttatggctaccgccagaagctttggtagctatgacttggccgcagctctggctgacctgatagataacagcatcaaggcacgggcgaaacgggtggacattaccttcattccgaagccggatgatgtgcaggtgaggatcagggatgacggtgtcggtatggacagggagaccctgaccgtcgctatgcgcccagccagtgccaatcctcaggcagagcgtgagcctgatgatctgggccggttcggatgggggctcaagtctgcatcgctttcccaagcacgcatcttgacggttgtttcctggcagcagagcgccattactgccgcaagctgggatatcgatgatatcgacgactggagcatgaatgtcgtggaaggagctgaggctctgcacttgcttgacgggaagccgggtaccccttcgggaaccgaggtgatatggagtcgctcggacaggcttctggatcgggaacacagtgtttcagttgacgagtcgcttacccacacaattgcccacgccattcagaaactttccctgatatttcatcgttaccttgccggtgagggcaagcgacggttgacgatagtcatcaatggcaatcagcttttcccgatcgacccgttcatgacctcacatgatgcaacccagacactggatgcagagaacatcgtcatgcccagtggggagcagatcagggttcaaccctatgtactgcctcatttctccaagttgtcgaccgaggaccaagagaagctgggcgggccagagggcatggttcgaaatcaagggttctatgtatatcggaatcgacgcctcattatctacggaacctggttccgtctggtgccgcatggggagctcactcaactgacgcgggtccgggtggatctgccgaatactctggatgccgattggcgaataactgtggacaagtctgacgctcagctacccgcagtcttgaagcgcagactgcaggaggttgtgaggcgtttcaatcgacgctcgattcgagtacatcgcaataaaggtgttgctctggatcggcttgagatccattcggtctggcgacgatacgtaaagaacggccagattcgttatcgcgtgaaccgcgagcacccaatggtggcccggcttttggggcagccggacttctctgcggatttcgatgcggtactccggctgcttgagtcctattttccgactgacatgtttctgaaagatgccgaagcaggggtgaatcagtgttccacctctgtcgaggagttcgagtcgctggttgaccagtgcatgatcaattacctgcaggactgtgatggtgccccggagatcgagggctttctgaagttcattgccgtaatggagccatttgcaagccaatggacctatacggaaagctatgttcgtaaaaatacggccaggaagtgggggatgtcgaatggactttga

SEQ ID NO: 341647 - DNA, 2793 bp, Pseudomonas aeruginosa
atgttcgtaaaaatacggccaggaagtgggggatgtcgaatggactttgatgctagcttgagctttctgcgagtggagatagacagacggattcaggggcggtttccagtacctcaggggtttctggacacacatgtgaaggaagtttctgctcttgcaagtattcttgatgaagagctggcgagtcgcctgatcaggcatctggaaacgatatatggtacccagcagggggagggtcacgttctcaagaccgatttccaggagtggtaccccgggcggaagggagaagtcgacttctactactggcgcaggctgcagaagtactggctggatcattcgatcctgcctgttcaggtcgtccagtccgtcgacaaggttaccgacgagattctgggatatctgggtgaccctcttgagggcgactcttggcggcgccgaggtctggtcatggggcatgtgcagtcgggaaagaccacgaactattccgcgttgattgccaaggcggcagatgcaggttatcgggtaatcgtggttctcgctgggctgaccaattcactgagatatcagactcaggtcaggctggatcagacttttgtcggaaaatcatccctcggagacaattttgtttcggaaatatatccggtctcctatgttctcaaggggcttgagggggagggaggggagataaggcatcccttctgtgggactacgcagagtgctgacttcagtgtgaaaacggcgaaaagtgtcggtgccacagagggcaattttgctgatccaatactgtttgttaccaagaagaacgagaaggttctggctcgtcttgccgactggttgagagggcttcgtcaggacgggcaactcgaggggccgatgttgctgatcgatgacgaagcggacaatgcatcggtcaataccgcaaaggatccgggtgttaccacgcgcatcaacgctcggatacgtgaattgctgagctgttcgcggcgctcttcctacgttggctatacggctacgccatttgccaacatcttcatcgatccggataccgaagacagcatgctcaaggatgacctttttccggagcacttcatcaagtctcttgagccgccaggaaactatatcggcgccgagaagctcttttccgacggcggagagctgttcgaggcttgcatccgcgaaataccaggcgactaccttgatctgcttccactgagccacaagtccggagatccggtcagtgaactgccggaaagtctcgaggatgcagttctcgaattcactgtattcaggtccattcgggttcttgccggcgagagccgcaggcattcatcgatgctggtgaatgtcagcagattcaatgccattcagcgccagatccacgatctcatctacctgctgctgcaggatctgaaggctgctgttgatgcctgggcatccagcagctcctggggtagttcgcggctgcttttaaggctgcacgagatctgggaaaaggaatatgcggagcactgcgatttcgactgggacgatgttcgtggtgccttgcggcgtggcctggcacctgtcgaggtccggctggtaaacatgcagggcggtggtctggactatacgaaagcccccgagtcaggcatgcatgtgattgcagtcggtggtctggccctggcccgtggactgactctcgaggggttggcggtatcgtacgtactgaggaatgtcggtgctgctgacacactgctgcagatggggcgctggttcggctatcggccgggctatgagcgactgtgtcggatccatgctaccggcgagatgctgggggactttcgtgaggtaagcaacgcggttgaagagctgcgggaggaccttgttcgcatggagcggatggggatcacgcctaacgagttcggtctcaaggtccgccaaagtccaacaggtatagccattaccgccgcgaacaagatgcgggccgccaagcctgtgctgatggcagtggatctttccaccaagcatcttcaggcgttcgagctgttcaacgacgggagcatcaatgctgagcatttcgctgccgtgacgtccctcgtggagaagcttggaacaggctgggttgagcatgaggtgtcagatgatggagctctggtctggaagggcgttggcgttgctctggttcaggagctgcttcgagagttcaagcttccgcaactgcattttgctttgggatacgaaggccgaagtctcacatcggactacattgctgatcgtgccagcggcgaactggcactatgggacattgcgatcccgttccggcgaactggtgagccgggaatagattttccgttcgggcgagggggggggaagaatatctactgtcgagtacgacattccggggtttccaaatcggatgaccccaatgtcgtgaagataacggcaaagaacgttgtcgcagatgctgcaagaaccgaccttcagtatggcgaaagagaggaactgcgtgagcagattgcaaaaatagagagcgaatttccggatttcagcccagagatgcagtacctgatggccagaacacggcctctcctgttgatacatctgctggatttcaggctgaagaaatccgacgagaagagcaagaagctcgacttcgaggctggcaggcctgtcgtgtcgatcagtctggcatttccagacacgggtgtggctccacagccgcgcgaatatgcggtgaccaagcgtctggctcagatgatggagcggcaacgtcaggaggcagagtcggacgaggatcttgatggtgacgaatga

SEQ ID NO: 341648 - DNA, 972 bp, Pseudomonas aeruginosa
atggtgacgaatgacttcattgccaagtgggacgagatcgcacatctcggccgaggcgccgggcgcttcagggtttgtccggatcatctcctcgatctgttcatcagctactccagtgcaggcgagcgagaattcattctggagtccagcgcatcggagctgaatggctcgaacttgccggagttcgagaatgtggccgttcgtcactgcgagatcgacggggggcaccgtcttgtgctctgcctgacagaccatcagttgaaggatctcttttcgatcatgtgtgccgacctcgcggatgcctcttcgcgatcggaaagccctgccggagccgcgaacatattcgccgtacggctgaatcgctgggcagacctgctgcgccgagggcgatcgcgggaaatgtcgttcagggagcggctcggcctactcggtgagctctgtctggtgaagtggttgatcgacgtttgtgaggttgctccagaggtggtcacccgcgggtggcgagggccggatggtgataccaacgatatcggcctcaacaacgttcgtatagaagtcaagtcgcagctttcgacccagccgttcatgatcagggtgtcctcgctggaacagcttgacggtgatggacgagagctctgcgttgctctgcaccgattcaccgtttcggaaagtggagtcagtctggcgtcgctcgtggcggacatatccttccggctttctggtacccattctggtctgatggagttccagcggaagttgttcctcgttggatatcagcatgacgccggctatgtcagtgaagcgttcaacctggacgccgtacgggtctatcgtgttgccgaggggtttccgcggctagtcccttctaccgttcctgacgggatcgttcgagtgaagtacgacatcgcttgcgaagccatagacgactaccggatagatcagatggaactggagatgttcatcaatggctga
